(19) United States
(12) Patent Application Publication
(10) Pub. No.: US 2026/0218238 A1
(43) Pub. Date: Jul. 30, 2026

(54) VIRAL OPEN READING FRAMES, USES THEREOF, AND METHODS OF DETECTING THE SAME

(71) Applicants: The Broad Institute, Inc., Cambridge, MA (US); President and Fellows of Harvard College, Cambridge, MA (US)

(72) Inventors: Pardis Sabeti, Cambridge, MA (US); Shira Weingarten-Gabbay, Cambridge, MA (US); Matthew Bauer, Cambridge, MA (US); Alexandra Stanton, Cambridge, MA (US)

(21) Appl. No.: 19/573,370

(22) Filed: Mar. 20, 2026

Related U.S. Application Data
(63) Continuation of application No. PCT/US2024/048478, filed on Sep. 25, 2024.
(60) Provisional application No. 63/540,279, filed on Sep. 25, 2023.

(51) Int. Cl. C12N 15/86; A61K 39/29; C12N 15/10

(52) U.S. Cl. CPC C12N 15/86; A61K 39/292; C12N 15/1058; C12N 15/1089; C12N 2730/10143

(57) ABSTRACT

Described in certain example embodiments herein are compositions, such as immunogenic compositions that can contain or more viral polynucleotides and/or polypeptides. In some embodiments, the one or more viral polynucleotide is a non-canonical viral open reading frame (ORF). Also described herein are methods to identify one or more viral polynucleotides and/or polypeptides such as a non-canonical viral ORF, such as massively parallel ribosome profiling.

### CROSS-REFERENCE TO RELATED APPLICATIONS

[0001] This application is a continuation application of International Patent Application No. PCT/US2024/048478, filed Sep. 25, 2024, which claims the benefit of and priority to U.S. Provisional Patent Application No. 63/540,279, filed on Sep. 25, 2023, the contents of which is incorporated by reference herein in its entirety.

### STATEMENT REGARDING FEDERALLY SPONSORED RESEARCH

[0002] This invention was made with government support under Grant No. U19AI110818 awarded by the National Institutes of Health and 58-3022-2-031 awarded by the United States Department of Agriculture. The government has certain rights in the invention.

### SEQUENCE LISTING

[0003] This application contains a sequence listing filed in electronic form as an xml file entitled “BROD_5825US_ST26.xml”, created on Feb. 20, 2026, and having a size of 25,189,988 bytes. The content of the sequence listing is incorporated herein in its entirety.

### TECHNICAL FIELD

[0004] The subject matter disclosed herein is generally directed to massively parallel methods and techniques for evaluating open reading frames in genomes, particularly viral genomes.

### BACKGROUND

[0005] Recent pandemics and epidemics, e.g., SARS-CoV2, Ebola, and Zika are stark reminders of the enormous impact of viruses on public health, emphasizing the great need for transformative vaccines and therapeutics. Despite many recent technological advances, systematic methods to investigate virology have lagged behind, so that many of the global principles underlying viral infection remain unknown. As such there exists a need for improved compositions and techniques for combating viral and other pathogens.

[0006] Citation or identification of any document in this application is not an admission that such a document is available as prior art to the present invention.

### SUMMARY

[0007] Described in certain embodiments herein are polynucleotides comprising one or more viral polynucleotides from SEQ ID NOS: 1-9890 or SEQ ID NOS: 9891-16277.

[0008] Described in certain example embodiments herein are polynucleotides and/or polypeptides identified using the method described herein.

[0009] Described in certain example embodiments herein are polynucleotides, such as engineered polynucleotides, comprising one or more viral polynucleotides selected from those polynucleotides identified by a method described herein and/or SEQ ID NOS: 1-9890 or SEQ ID NOS: 9891-16277.

[0010] Described in certain example embodiments herein are vectors comprising a polynucleotide of any one of the preceding paragraphs or as described elsewhere herein. In certain example embodiments, the vector is an expression vector. In certain example embodiments, the vector is a eukaryotic vector, prokaryotic vector, or viral vector.

[0011] Described in certain example embodiments herein are polypeptides encoded by a polynucleotide or vector as in any one of the preceding paragraphs or as described elsewhere herein.

[0012] Described in certain example embodiments herein are delivery vehicles comprising a polynucleotide, a vector, and/or polypeptide as in any one of the preceding paragraphs or as described elsewhere herein. In certain example embodiments, the delivery vehicle comprises a particle, lipid particle, liposome, exosome, virus particle, virus-like particle, capsid, cell penetrating peptide, DNA nanoclew, supercharged protein, self-assembling nanoparticle, spherical nucleic acid, streptolysin, lipoplex, polyplex, sugar-based particle, stable nucleic-acid particles, mRNA vaccine, and any combination thereof.

[0013] Described in certain example embodiments herein are cells comprising a polynucleotide, a vector, polypeptide, and/or delivery vehicle as in any one of the preceding paragraphs or as described elsewhere herein.

[0014] Described in certain example embodiments herein are immunogenic compositions comprising a polynucleotide, a vector, polypeptide, delivery vehicle, and/or cell as in any one of the preceding paragraphs or as described elsewhere herein. In certain example embodiments, the polynucleotide and/or the polypeptide of the immunogenic composition is capable of stimulating a B-cell and/or T-cell response in a subject to which it is delivered. In certain example embodiments, the B-cell response comprises antibody production.

[0015] Described in certain example embodiments herein are therapeutic compositions comprising an immunogenic composition as in any one of the preceding paragraphs or as described elsewhere herein; and an anti-viral therapeutic. In certain example embodiments, the one or more polynucleotides is a synthetic mRNA vaccine.

[0016] Described in certain example embodiments herein are formulations comprising a polynucleotide, a vector, polypeptide, delivery vehicle, cell, and/or immunogenic composition as in any one of the preceding paragraphs or as described elsewhere herein, and a pharmaceutically acceptable carrier.

[0017] Described in certain example embodiments herein are methods of inducing a B-cell response and/or T-cell response to a virus in a subject in need thereof, comprising administering, to the subject, the immunogenic composition or the therapeutic composition, or a pharmaceutical formulation thereof as in any one of the preceding paragraphs or as described elsewhere herein. In certain example embodiments, the B cell response comprises antibody production.

[0018] Described in certain example embodiments herein are methods of treating a viral infection in a subject in need thereof comprising administering, to the subject in need thereof, the immunogenic composition or the therapeutic composition, or a pharmaceutical formulation thereof as in any one of the preceding paragraphs or as described elsewhere herein in combination with an antiviral therapeutic.

[0019] Described in certain example embodiments herein are methods an infection status of a subject comprising contacting immune cells derived from a subject with the immunogenic composition or a pharmaceutical formulation thereof as in any one of the preceding paragraphs or as described elsewhere herein; and detecting cross-reactivity of the immune cells to the immunogenic composition.

[0020] Described in certain example embodiments herein are methods of massively parallel antigen profiling comprising delivering to and expressing in a plurality of cells a pan-genomic library or a polynucleotide as in any one of the preceding paragraphs or as described elsewhere herein, wherein the pan-genomic library comprises a plurality of synthetic library expression constructs, each comprising a short synthetic polynucleotide and a pair of constant primers flanking the short synthetic polynucleotide, wherein the short synthetic polynucleotide has a sequence corresponding to a region of a genome; and determining the antigens presented by the cells. In certain example embodiments, delivery comprises infecting the plurality of cells with viral particles comprising the pan-genomic library or a polynucleotide as in any one of the preceding paragraphs or as described elsewhere herein. In certain example embodiments, determining the antigens comprises protein sequencing, mass spectrometry, Raman spectroscopy, immunodetection, chromatography, centrifugation, isoelectric focusing, or any combination thereof. In certain example embodiments, determining the antigens comprises isolating MHC complexes from the cells and detecting peptides loaded in the MHC, wherein the MHC is optionally an HLA. In certain example embodiments, the method further comprises evaluating an immune response to the antigens presented.

[0021] Described in certain example embodiments herein are vectors comprising a synthetic library expression construct comprising: a short synthetic polynucleotide; a pair of constant primers flanking the short synthetic polynucleotide, the pair of constant primers comprising a forward constant primer and a reverse constant primer, wherein the forward constant primer and the reverse constant primer are each independently coupled to the 5′ end or the 3′ end of the short synthetic polynucleotide; a stop codon polynucleotide comprising one or more stop codons, wherein the stop codon polynucleotide is coupled to the constant primer coupled to the 3′ end of the short synthetic polynucleotide such that the constant primer coupled to the 3′ end of the short synthetic polynucleotide is between the multiple stop codon polynucleotide and the short synthetic polynucleotide; a poly A signal, wherein the poly A signal is operably coupled to the short synthetic polynucleotide, the pair of constant primers, and the stop codon polynucleotide; and a promoter, wherein the promoter is operably coupled to the short synthetic polynucleotide, the pair of constant primers, and the stop codon polynucleotide, and the poly A signal. In certain example embodiments, the short synthetic polynucleotide is about 200 nucleotides. In certain example embodiments, the short synthetic polynucleotide has a sequence corresponding to a region of a genome. In certain example embodiments, the short synthetic polynucleotide has a sequence corresponding to a region of a human genome, a non-human animal genome, a plant genome, a microbial genome, or a viral genome. In certain example embodiments, the short synthetic polynucleotide has a sequence corresponding to a (a) an annotated region of a genome; (b) an unannotated region of a genome; (c) a mutation; (d) a 5′UTR; (e) a 3′UTR; (f) an open reading frame; or (g) any combination thereof. In certain example embodiments, the short synthetic polynucleotide (a) is a sequence according to a sequence in SEQ ID NOS: 1-9890 or SEQ ID NOS: 9891-16277; (b) is a synthetic in silico designed sequence; (d) does not have 100 percent identity to a genome sequence, optionally a human genome, a non-human animal genome, a plant genome, a microbial genome, or a viral genome; (e) is not native to any genome, optionally a human genome, a non-human animal genome, a plant genome, a microbial genome, or a viral genome; or (f) any combination thereof. In certain example embodiments, the vector comprises two or more synthetic library expression constructs. In certain example embodiments, at least two of the two or more synthetic library expression constructs comprises a different short synthetic polynucleotide. In certain example embodiments, each of the two or more synthetic library expression constructs comprises a different short synthetic polynucleotide. In certain example embodiments, at least two of the two or more synthetic library constructs comprises the same short synthetic polynucleotide. In certain example embodiments, the vector further comprises an additional regulatory element, a reporter gene, an origin of replication, a cloning sites, an internal ribosome entry sites, a transcription termination sequence, an inverted terminal repeat, a long terminal repeats, a trans-activating response elements, a central polypurine tract, a Psi element, a Rev response element, a packaging protein gene, a polymerase gene, an envelope protein gene, a capsid protein gene, a Rep protein gene, a U3 element, a repeat element (R), a unique 5′ element (U5), an untranslated region stabilization element, or any combination thereof. In certain example embodiments, the vector further comprises a Woodchuck hepatitis virus post-transcriptional regulatory element (WPRE), wherein the WPRE is operably coupled to the short synthetic polynucleotide and the pair of constant primers. In certain example embodiments, the vector is a eukaryotic expression vector. In certain example embodiments, the vector is a viral expression vector. In certain example embodiments, the promoter is a constitutive promoter. In certain example embodiments, the promoter is an inducible promoter or a conditional promoter.

[0022] Described in certain example embodiments herein are vector libraries each comprising a plurality of vectors as in any one of the preceding paragraphs or as described elsewhere herein. In certain example embodiments, at least two or more of the vectors comprise different short synthetic polynucleotides. In certain example embodiments, each vector of the plurality of vectors comprise different short synthetic polynucleotides. In certain example embodiments, at least two of the vectors comprise the same short synthetic polynucleotides.

[0023] Described in certain example embodiments herein are cells comprising a vector or vector library as in any one of the preceding paragraphs or as described elsewhere herein. In certain example embodiments, the cell is a eukaryotic cell or a prokaryotic cell.

[0024] Described in certain example embodiments herein are high throughput methods of determining translated sequences, the method comprising expressing a vector as in any one of the preceding paragraphs or as described elsewhere herein or a vector library as in any one of the preceding paragraphs or as described elsewhere herein in one or more cells under conditions sufficient to produce translation products; obtaining a sample of ribosomes comprising ribosome-protected mRNA fragments (RPFs) from the cells; recovering ribosome footprints consisting essentially of the RPFs from the sample of ribosomes; and determining the sequence of the RPFs thereby identifying translated sequences. In certain example embodiments, determining the sequence of the RPFs comprises nucleotide sequencing. In certain example embodiments, sequencing comprises RNA sequencing. In certain example embodiments, sequencing comprises generating cDNA from the RPFs for form RPF cDNA and DNA sequencing the RPF cDNA. In certain example embodiments the method further comprises digesting unprotected mRNA prior to recovering ribosome footprints. In certain example embodiments, the method further comprises removing rRNA from the sample containing ribosomes.

[0025] Described in certain example embodiments herein are methods of determining translational regulation comprising determining a first set of translated sequences by a method comprising expressing a pan-genomic library in a first plurality of cells, wherein the pan-genomic library comprises a plurality of synthetic library expression constructs, each comprising a short synthetic polynucleotide and a pair of constant primers flanking the short synthetic polynucleotide, wherein the short synthetic polynucleotide has a sequence corresponding to a region of a genome; obtaining a sample of ribosomes comprising ribosome-protected mRNA fragments (RPFs) from the first plurality of cells; recovering ribosome footprints consisting essentially of the RPFs from the sample of ribosomes; and determining the sequence of the RPFs thereby identifying translated sequences to form the first set of translated sequences; determining a second set of translated sequences by a method comprising expressing the pan-genomic library in a second plurality of cells; applying a stress to the second plurality of cells; obtaining a sample of ribosomes comprising ribosome-protected mRNA fragments (RPFs) from the second plurality of cells; recovering ribosome footprints consisting essentially of the RPFs from the sample of ribosomes; and determining the sequence of the RPFs thereby identifying translated sequences to form the second set of translated sequences, whereby similarities and differences in the sequences of the first and the second set of translated sequences indicates sequences that are translationally regulated or regulate translation. In certain example embodiments, the short synthetic polynucleotide is about 200 nucleotides. In certain example embodiments, the short synthetic polynucleotide has a sequence corresponding to a region of a genome. In certain example embodiments, the short synthetic polynucleotide has a sequence corresponding to a region of a human genome, a non-human animal genome, a plant genome, a microbial genome, or a viral genome. In certain example embodiments, the short synthetic polynucleotide has a sequence corresponding to (a) an annotated region of a genome; (b) an unannotated region of a genome; (c) a mutation; (d) a 5′UTR; (e) a 3′UTR; (f) an open reading frame; or (g) any combination thereof. In certain example embodiments herein, the short synthetic polynucleotide (a) is a sequence according to a sequence in SEQ ID NOS: 1-9890 or SEQ ID NOS: 9891-16277; (b) is a synthetic in silico designed sequence; (d) does not have 100 percent identity to a genome sequence, optionally a human genome, a non-human animal genome, a plant genome, a microbial genome, or a viral genome; (e) is not native to any genome, optionally a human genome, a non-human animal genome, a plant genome, a microbial genome, or a viral genome; or (f) any combination thereof. In certain example embodiments herein, expressing a pan-genomic library in a first plurality of cells and expressing a pan-genomic library in a second plurality of cells comprises expressing one or more vectors as in any one of the preceding paragraphs or elsewhere herein or a vector library as in any one of the preceding paragraphs or elsewhere herein in the first plurality of cells and the second plurality of cells. In certain example embodiments, the stress is a small molecule agent, a biologic agent, a physical stress, a chemical stress, or any combination thereof. In certain example embodiments, the stress is arsenite.

[0026] Described in certain example embodiments herein are vectors comprising an optically active reporter construct comprising a test polynucleotide; a first optically active protein encoding polynucleotide, wherein the first optically active protein encoding polynucleotide is operatively coupled in-frame with the test polynucleotide; a second optically active protein encoding polynucleotide, wherein the second optically active protein is a different optically active protein that the first optically active protein; a promoter, wherein the test polynucleotide, the first optically active protein encoding polynucleotide, and the second optically active protein encoding polynucleotide are operatively coupled to the promoter; and an internal ribosomal entry site (IRES), wherein the IRES is between the first optically active protein encoding polynucleotide and the second optically active protein encoding polynucleotide. In certain example embodiments, the method further comprises one or more additional regulatory elements, one or more additional reporters, viral replication elements and/or encoding polynucleotides, viral packaging elements and/or encoding polynucleotides, viral envelope protein encoding polynucleotides, long-terminal repeats, viral poly or any combination thereof. In certain example embodiments, the promoter is a constitutive promoter or an inducible promoter. In certain example embodiments, the method further comprises one or more untranslated regions (UTRs), wherein the one or more untranslated regions are operatively coupled at the 5′ and/or 3′ end of the test polynucleotide and/or the first optically active protein encoding polynucleotide. In certain example embodiments, the one or more untranslated regions comprise or consist of 5′ UTRs, 3′ UTRs, or both. In certain example embodiments, the test polynucleotide comprises or consists of a short synthetic polynucleotide. In certain example embodiments, the short synthetic polynucleotide is about 200 nucleotides. In certain example embodiments, the short synthetic polynucleotide has a sequence corresponding to a region of a genome. In certain example embodiments, the short synthetic polynucleotide has a sequence corresponding to a region of a human genome, a non-human animal genome, a plant genome, a microbial genome, or a viral genome. In certain example embodiments, the short synthetic polynucleotide has a sequence corresponding to (a) an annotated region of a genome; (b) an unannotated region of a genome; (c) a mutation; (d) a 5′UTR; (e) a 3′UTR; (f) an open reading frame; or (g) any combination thereof. In certain example embodiments, the short synthetic polynucleotide (a) is a sequence according to a sequence in SEQ ID NOS: 1-9890 or SEQ ID NOS: 9891-16277; (b) is a synthetic in silico designed sequence; (d) does not have 100 percent identity to a genome sequence, optionally a human genome, a non-human animal genome, a plant genome, a microbial genome, or a viral genome; (e) is not native to a genome, optionally a human genome, a non-human animal genome, a plant genome, a microbial genome, or a viral genome; or (f) any combination thereof. In certain example embodiments, the vector is a viral vector, optionally a retroviral vector, lentiviral vector, adenoviral vector, or adeno-associated viral vector.

[0027] Described in certain example embodiments, are vector systems comprising a vector comprising an optically active reporter construct of any one of the preceding paragraphs and as described elsewhere herein, and optionally one or more a viral envelope protein vectors, one or more viral packaging vectors, or any combination thereof. In certain example embodiments, the vectors or vector systems are capable of producing viral particles comprising the optically active reporter construct.

[0028] Described in certain example embodiments, are an optically active reporter construct library, optionally a pan-genome or pan-viral genomic optically active reporter construct library comprising a plurality of vectors each comprising an optically active reporter construct as in any one of the preceding paragraphs, wherein at least two test polynucleotides are different or the same, or wherein each test polynucleotide is different, and the test polynucleotides in each of the vectors of the plurality of vectors comprises or consists of a short synthetic polynucleotide.

[0029] Described in certain example embodiments herein are engineered viral particles each comprising a cargo comprising an optically active reporter construct, wherein the optically active reporter construct cargo comprises a test polynucleotide; a first optically active protein encoding polynucleotide, wherein the first optically active protein encoding polynucleotide is operatively coupled in-frame with the test polynucleotide; a second optically active protein encoding polynucleotide, wherein the second optically active protein is a different optically active protein that the first optically active protein; a promoter, wherein the test polynucleotide, the first optically active protein encoding polynucleotide, and the second optically active protein encoding polynucleotide are operatively coupled to the promoter; and an internal ribosomal entry site (IRES), wherein the IRES is between the first optically active protein encoding polynucleotide and the second optically active protein encoding polynucleotide. In certain example embodiments, the promoter is a constitutive promoter or an inducible promoter. In certain example embodiments, the optically active reporter construct further comprises one or more untranslated regions (UTRs), wherein the one or more untranslated regions are operatively coupled at the 5′ and/or 3′ end of the test polynucleotide and/or the first optically active protein encoding polynucleotide. In certain example embodiments, the one or more untranslated regions comprise or consist of 5′ UTRs, 3′ UTRs, or both. In certain example embodiments, the test polynucleotide comprises or consists of a short synthetic polynucleotide. In certain example embodiments, the short synthetic polynucleotide is about 200 nucleotides. In certain example embodiments, the short synthetic polynucleotide has a sequence corresponding to a region of a genome. In certain example embodiments, the short synthetic polynucleotide has a sequence corresponding to a region of a human genome, a non-human animal genome, a plant genome, a microbial genome, or a viral genome. In certain example embodiments, the short synthetic polynucleotide has a sequence corresponding to a) an annotated region of a genome; (b) an unannotated region of a genome; (c) a mutation; (d) a 5′UTR; (e) a 3′UTR; (f) an open reading frame; or (g) any combination thereof.

[0030] The engineered viral particle of any one of the preceding paragraphs or as described elsewhere herein, wherein the short synthetic polynucleotide has a sequence corresponding to (a) an annotated region of a genome; (b) an unannotated region of a genome; (c) a mutation; (d) a 5′UTR; (e) a 3′UTR; (f) an open reading frame; or (g) any combination thereof. In certain example embodiments, the short synthetic polynucleotide (a) is a sequence according to a sequence in SEQ ID NOS: 1-9890 or SEQ ID NOS: 9891-16277; (b) is a synthetic in silico designed sequence; (d) does not have 100 percent identity to a genome sequence, optionally a human genome, a non-human animal genome, a plant genome, a microbial genome, or a viral genome; (e) is not native to a genome, optionally a human genome, a non-human animal genome, a plant genome, a microbial genome, or a viral genome; or (f) any combination thereof. In certain example embodiments, the engineered viral particle is a viral particle, optionally a retroviral viral particle, lentiviral viral particle, adenoviral viral particle, or adeno-associated viral particle.

[0031] Described in certain example embodiments herein are methods comprising: (a) transducing one or more cells with one or more viral particles or a pan-viral engineered viral particle library comprising an optically active reporter construct as described herein and allowing for genomic integration and expression of the optically active reporter construct in the one or more cells; (b) selecting cells for genomic integration of the optically active reporter construct via sorting by detecting an optical signal produced from the first optically active protein and selecting cells that produce the optical signal from the second optically active protein; (c) sorting selected cells from (b) into expression bins, wherein sorting selected cells from (b) comprises detecting an optical signal produced by the first optically active protein; (d) sequencing one or more nucleic acids of the sorted selected cells by expression bin; and (e) computing an expression score for each test polynucleotide by expression bin. In certain example embodiments, sequencing comprises DNA sequencing, RNA sequencing, or both. In certain example embodiments, sequencing comprises genomic DNA sequencing. In certain example embodiments, sequencing comprises next generation sequencing or third generation sequencing. In certain example embodiments, sequencing comprises deep sequencing. In certain example embodiments, sequencing comprises single cell sequencing.

[0032] Described in certain example embodiments herein are methods of screening test agents and/or conditions comprising (a) transducing a first set of one or more cells with one or more viral particles or a pan-viral engineered viral particle library having an optically active reporter construct as described in any one of the preceding claims and elsewhere herein and allowing for genomic integration and expression of the optically active reporter construct in the one or more cells; (b) transducing a second set of the one or more cells with the one or more viral particles or a pan-viral engineered viral particle library having an optically active reporter construct as in any one of the preceding paragraphs or elsewhere herein and allowing for genomic integration and expression of the optically active reporter construct in the one or more cells, wherein the second set of one or more cells comprises the same one or more cells as the first set of one or more cells, and wherein the one or more viral particles or the pan-viral engineered viral particle library used to transduce the second set of one or more cells is the same as the one or more viral particles or the pan-viral engineered viral particle library used to transduce the first set of one or more cells; (c) exposing the second set of one or more cells to one or more test agents and/or conditions; (d) selecting cells in each of the first set of one or more cells and second set of one or more cells for genomic integration of the optically active reporter construct via sorting by detecting an optical signal produced from the first optically active protein and selecting cells that produce the optical signal from the second optically active protein; (e) sorting selected cells from (d) into expression bins, wherein sorting selected cells from (d) comprises detecting an optical signal produced by the first optically active protein; (f) sequencing one or more nucleic acids of the sorted selected cells by expression bin; (g) computing an expression score for each test polynucleotide by expression bin; and (h) comparing expression scores for each test polynucleotide between the first and second set of cells to determine an effect of the test agent and/or condition. In certain example embodiments, the test agent or condition is a small molecule agent, a biologic agent, a physical stress, a chemical stress, or any combination thereof. In certain example embodiments, sequencing comprises DNA sequencing, RNA sequencing, or both. In certain example embodiments, sequencing comprises genomic DNA sequencing. In certain example embodiments, sequencing comprises next generation sequencing or third generation sequencing. In certain example embodiments, sequencing comprises deep sequencing. In certain example embodiments, sequencing comprises single cell sequencing.

### BRIEF DESCRIPTION OF THE DRAWINGS

[0033] An understanding of the features and advantages of the present invention will be obtained by reference to the following detailed description that sets forth illustrative embodiments, in which the principles of the invention may be utilized, and the accompanying drawings of which:

[0034] FIG. 1—Sources for MHC-I presented antigens. See also Cardinaud et al. J Exp Med (2004) 199 (8): 1053-1063; Ingolia et al., Cell Reports 8, 1365-1379; Antón and Yewdell. J Leukoc Biol. 2014 April; 95(4):551-62; Starck et al., Science. 2016 Jan. 29; 351(6272); Starck and Shastri. Immunol Rev. 2016 July; 272(1):8-16.

[0035] FIG. 2—Systematic approach for characterization of viral antigens in hundreds of viruses.

[0036] FIG. 3—Schematic for synthetic libraries for systemic investigation of viral genomes.

[0037] FIG. 4A-4D—Exemplary high throughput measurements of antigen translation and presentation using synthetic libraries of designed oligos.

[0038] FIG. 5—Schematic for massively parallel ribosome profiling. A synthetic designed oligo construct is used to synthesize a synthetic designed oligo library. The library is expressed in cells. Ribosome protected fragments are sequenced and sequencing reads are mapped to identify open reading frames (ORFs) present in the expressed synthetic oligo library.

[0039] FIG. 6—Construct design for synthetic library expression plasmids. The synthetic designed oligo (variable region) is about 200 nucleotides. Two constant primers are coupled directly to 5′ and 3′ ends of the variable region. The 3′ end constant primer is followed by multiple frame shifted stop codons. This can be followed by a polyadenylation signal and/or WPRE element. A promoter is used to drive expression of the construct.

[0040] FIG. 7A-7B—Design and measurement of a ~5,000 oligo library towards previously reported viral ORFs to demonstrate accuracy of detection of ORFS using the massively parallel ribosome profiling approach of FIG. 5.

[0041] FIG. 8—A reduction in ribosome occupancy is obtained when the reported start codon is mutated in the synthetic oligo.

[0042] FIGS. 9A-9B—Detection of trinucleotides periodicity in ORFs encoded from synthetic oligos (SEQ ID NO: 16277) and (SEQ ID NO: 16278).

[0043] FIG. 10—Design of a 15,000 oligo pan-viral library and its use for identifying uORFs (upstream open reading frames) and short ORFs (SEQ ID NO: 16279).

[0044] FIG. 11—Reproducible and specific measurements of ribosome footprints.

[0045] FIG. 12—Predicting novel ORFs using ribosome profiling measurements of synthetic oligos.

[0046] FIGS. 13—Accurate detection of annotated coding sequences using massively parallel ribosome profiling—Ribosome footprint analysis.

[0047] FIG. 14—Accurate detection of annotated coding sequences using massively parallel ribosome profiling—Metagene analysis.

[0048] FIG. 15A-15B—Accurate detection of annotated coding sequences using massively parallel ribosome profiling—Inhibition of ribosome elongation with cycloheximide (FIG. 15A) or lactimidoycin (FIG. 15B).

[0049] FIG. 16—Pan-viral library measurements uncover ~7,000 viral ORFs.

[0050] FIG. 17—Ribosome density measurements across thousands of annotated viral coding sequences and their 5′ untranslated region (UTR).

[0051] FIG. 18A-18C—Discovery of hundreds of viral uORFs that negatively regulated the translation of the main coding sequence.

[0052] FIGS. 19-20—Ribosomes are transitioned from the detected uORFs to the main coding sequences in response to eIF2alpha phosphorylation.

[0053] FIG. 21—Exemplary optically active constructs for quantitative measurement of translation of viral ORFs.

[0054] FIG. 22—Quantitative measurements of viral ORFs translation using an optically active reporter construct. The reporter construct can have at least two different optically active polypeptides.

[0055] FIG. 23A-23B—Inferring RFP expression of individual oligos from their representation in sorted expression bins.

[0056] FIG. 24—Developing a Massively Parallel Reporter Assay for quantitative translation measurements of 15,000 viral sequences.

[0057] FIG. 25—Constant expression of one of the at least two different optically active proteins of the construct of FIG. 22 can be used to control for multiplicity of infection (MOI).

[0058] FIG. 26—Uniform coverage of sequencing reads across library oligos was achieved.

[0059] FIG. 27—Computing weighted average for each oligo from reads distribution across expression bins.

[0060] FIG. 28—Assessing the accuracy of pooled expression measurements.

[0061] FIG. 29—Detection of annotated viral ORFs using a Massively Parallel Reporter Assay (MPRA).

[0062] FIG. 30—Translation of viral ORFs is lower in genes with upstream ORFs in their 5′ UTRs.

[0063] FIG. 31—Development of a high-throughput method for systematic investigation of gene expression regulation.

[0064] FIG. 32—ORF discovery in hundreds of viral genomes using Massively Parallel Ribosome Profiling (MPRP).

[0065] FIGS. 33-35—Assessment of synthetic oligo library performance using a predefined set of viral ORFs from ribosome profiling experiments.

[0066] FIG. 36—Experimental measurements of pan-viral library composing 4,274 genes from 679 human viruses.

[0067] FIG. 37—Massively Parallel Ribosome Profiling of pan-viral library successfully detects annotated ORFs of human Coronaviruses.

[0068] FIG. 38—Massively Parallel Ribosome Profiling detects the translation of ORF9b in the SARS-CoV-1 genome.

[0069] FIG. 39—MPRP on pan-viral library detects internal out-of-frame ORFs in the nucleocapsid region of SARS-CoV-1 and HCoV-HKU1.

[0070] FIG. 40—A synthetic approach for the discovery of ORFs in hundreds of viral genomes.

[0071] FIG. 41—Summary of evaluation of viral ORFs. Massively Parallel Ribosome Profiling can be used to evaluate viral ORFs. This approach can be coupled with additional methodologies to evaluate the viral ORFs on additional cellular processes such as gene expression regulation and antigen presentation on infected cells.

[0072] FIG. 42—Other approaches that rely on tailing whole transcripts with 200 nt oligos can result in false positive discovery of internal ORFs.

[0073] FIGS. 43-44—ORFs discovery in hundreds of viral genomes using Massively Parallel Ribosome Profiling.

[0074] FIG. 45—Although ORF9b is conserved in SARS-CoV-1 it is missing from SARS-CoV-2 genomic annotations (SEQ ID NOS: 16280-16283).

[0075] FIG. 46—Understanding of the repertoire of proteins translated from the viral genome extends beyond the canonical ORFs, which includes identifying non-canonical ORFs and understanding their effects, including on other cellular processes such as gene expression regulation and antigen presentation (See e.g., FIG. 41).

[0076] FIG. 47—Researching HLA-I peptidome of HCMV uncovers peptides from non-canonical ORFs detected by the pan-viral library (SEQ ID NOS: 16284-16285).

[0077] FIG. 48A-48E—Design of oligonucleotide synthetic library and MPRP measurements. (FIG. 48A) (FIG. 48A) Illustration of the Massively Parallel Ribosome Profiling experiment (MPRP). (1) Synthetic library amplification using constant primers. (2) Cloning library into overexpression vector. (3) Transient transfection of plasmid pool into HEK293T or A549 cells for 24 h. (4) Treating cells with either LTM or CHX and performing ribosome profiling protocol. (5) Mapping deep sequencing reads (representing ribosome footprints) to the synthetic library. (6) Inferring translated ORFs using PRICE (Erhard et al. 2018). (FIG. 48B) Design of the tested synthetic oligonucleotides: (i) ORFs that were identified by ribosome profiling in infected cells with either intact start codon or a GCC mutation. (ii) Tailing oligos encompassing complete viral genomes/transcripts. (iii) Oligos spanning the 5′UTR and the first 140 nt of annotated viral CDSs. For the region containing the CDS, two oligos were designed: the wild type sequence and a start codon mutated oligo. (FIG. 48C) Comparing the number of ribosome footprints mapped to 15,000 oligos in two biological replicates of MPRP experiment in HEK293T cells. R=0.92, Pearson correlation. (FIG. 48D) Comparing the number of ribosome footprints mapped to 15,000 oligos in the MPRP experiment in HEK293T and A549 cells. R=0.89, Pearson correlation. (FIG. 48E) Comparing the number of ribosome footprints mapped to 1,163 identical oligos in two synthetic libraries that were independently cloned, transfected and measured using MPRP in HEK293T cells. R=0.79, Pearson correlation.

[0078] FIG. 49A-49F—Annotated CDSs measurements and ORF discovery. (FIG. 49A) (Left) Example of four individual oligos representing genes from the Herpesviridae family and the number of ribosome footprints observed in the MPRP assay. (Right) Metagene analysis showing the average of ribosome footprints in each position along 1,103 genes from the Herpesviridae family. Different colors, as represented in greyscale, represent the three reading frames (blue, 0; orange, +1; gray, −1). (FIG. 49B) Average number of ribosome footprints in each position for six additional viral families. A virus representing each family is illustrated in each plot. (FIG. 49C) Comparing the average number of ribosome footprints between oligos containing the wt start codon (upper graph) to those in which the annotated start codon was mutated to GCC (lower graph). Shown are the average ribosome footprints in each position across 3,777 oligos. The region with maximum information from footprints containing the wt or mutated start codon (position −3 to +15) is highlighted in red. (FIG. 49D) Pairwise analysis of the number of ribosome footprints on 3,777 viral CDSs with either the wt start codon or a GCC mutant. Showing the number of footprints in position −3 to +15 relative to the annotated start codon in each oligo. p<10⁻²⁸⁸, Wilcoxon signed-rank test. (FIG. 49E) ORF discovery using PRICE. Showing the number of ORFs that were detected in each position (referring to the ORF start position). (FIG. 49F) Comparing the number of reads estimated by PRICE for the detected CDSs in two biological replicates. R=0.93, Pearson correlation.

[0079] FIG. 50A-50E—MPRP measurements of canonical and non-canonical ORFs that were identified by traditional ribosome profiling. (FIG. 50A-50C) Metagene analysis of oligos containing the sequence of ORFs that were identified by ribosome profiling of HCMV-infected cells done by Stern-Ginossar et al. (Stern-Ginossar et al. 2012). Showing the average of ribosome footprints in each position across 143 annotated canonical ORFs (FIG. 50A), 573 non-canonical (FIG. 50B), and 245 non-canonical ORFs in the length of 20 aa or shorter (FIG. 50C). Different colors, as represented in greyscale, represent the three reading frames (blue, 0; orange, +1; gray, −1). (FIG. 50D) Comparing the average number of ribosome footprints between oligos containing the wt start codon (upper graph) to those in which the reported start codon was mutated to GCC (lower graph). Shown are the average ribosome footprints in each position across 284 oligos, containing Ribo-seq ORFs in the length of 7-45 aa. The region with maximum information from footprints containing the wt or mutated start codon (position −3 to +15) is highlighted in red, as represented in greyscale. (FIG. 50E) ORF discovery using PRICE. Showing the number of ORFs that were detected in each position (referring to the ORF start position).

[0080] FIG. 51A-51C—HLA-I peptides derived from non-canonical ORFs in HCMV and VACV. (FIG. 51A) (Left) Illustration of the HLA-I immunopeptidome profiling performed by Erhard et al. and Lorente et al. for HCMV- and VACV-infected cells, respectively. (Right) The dataset that we built to research the mass spectrometry raw data including non-canonical ORFs that were identified in the MPRP assay. (FIG. 51B) HLA-I peptides that were detected in four non-canonical ORFs of HCMV identified by MPRP: two uORFs in the 5′UTRs of UL4 and UL148, an uoORF in the 5′UTR and coding region of UL135, and an N-extended isoform of UL36 (SEQ ID NOS: 16286-16297). (FIG. 51C) HLA-I peptide that was detected in an uORF in the non-coding region upstream of the I7L coding sequence. Ribosome densities on uORFs and CDSs in non-stressed cells and in response to eIF2alpha phosphorylation (SEQ ID NOS: 16298-16302).

[0081] FIG. 52A-52F—(FIG. 52A) Heatmap showing ribosome footprint densities across 2,418 viral oligos. Each line represents a single viral gene and each column represents the position relative to the annotated start codon. Genes in the upper cluster (purple, as represented in greyscale) had more footprints in the 5′UTR region than the CDS region, and genes in the lower cluster (blue, as represented in greyscale) had more footprints in the CDS than the 5′UTR. (FIG. 52B) Example of two individual genes from each cluster and the distribution of ribosome footprints observed in each position. (FIG. 52C) Metagene analysis showing the average ribosome footprints in each position along 2,473 uORFs detected by PRICE, relative to the uORF start position. Shown for CHX (Left) and LTM (right) inhibitors. Different colors, as represented in greyscale, represent the three reading frames (blue, 0; orange, +1; gray, −1). (FIG. 52D) Illustration of uORF-mediated attenuation of translation initiation from canonical CDSs. Ribosomes that initiate at the uORF start codon are less likely to efficiently reinitiate at the downstream start codon of the main CDS. Upon stress, eIF2alpha is phosphorylated as part of integrated stress response, which includes cellular response to viral infection. Ribosomes are more likely to “miss” the uORF start codon and initiate successfully at the start codon of the main CDS. (FIG. 52E) Western blot analysis lysates from HEK293T cells treated with 40 uM Sodium-Arsenite for 30 and 60 min. Phosphorylated eIF2alpha was detected with a monoclonal phospho S51 antibody (Upper panel). ATF4 protein was detected using a polyclonal antibody (Lower panel). In both membranes, Vinculin was used as a loading control. (FIG. 52F) Repeating the MPRP experiment in HEK293T cells that were treated with 40 uM Sodium-Arsenite and in non-treated cells. Shown are heatmaps of ribosome densities across viral oligos and clusters similarly to the analysis in (FIG. 52A).

[0082] FIG. 53A-53C—Ribosome profiling of exogenous ORF from overexpression plasmid. (FIG. 53A) Illustration of EmGFP plasmid transfection followed by ribosome profiling. (FIG. 53B) Mapping ribosome footprints to EmGFP plasmids using Integrative Genomics Viewer (IGV). (FIG. 53C) (Top) The design of a truncated EmGFP construct mimicking the synthetic library oligos including the constant primers and the plasmid cloning site. (Bottom) Mapping ribosome footprints to the truncated EmGFP oligo using IGV.

[0083] FIG. 54A-54B—MPRP measurements of tailing oligos across 30 transcripts of HCMV and HSV-1. (FIG. 54A) The design of tailing oligo across 30 mRNAs. (FIG. 54B) Showing the total number of ribosome footprints in each position relative to the CDS start codon or the stop codon in 30 annotated mRNAs (14 of HSV-1 and 16 of HCMV).

[0084] FIG. 55—Biological replicate of MPRP measurements of the pilot library. Comparing the number of ribosome footprints mapped to 5,170 oligos of the pilot library in two biological replicates of MPRP experiment in HEK293T cells. R=0.81, Pearson correlation.

[0085] FIG. 56—Metagene analysis of elongating ribosome footprints across 21 viral families. Average number of ribosome footprints in each position for 21 viral families observed in MPRP measurements after treatment with CHX to inhibit elongation ribosome. Different colors, as represented in greyscale, represent the three reading frames (blue, 0; orange, +1; gray, −1).

[0086] FIG. 57—Metagene analysis of initiating ribosome footprints across 21 viral families. Average number of ribosome footprints in each position for 21 viral families observed in MPRP measurements after treatment with LTM to inhibit initiating ribosome. Different colors, as represented in greyscale, represent the three reading frames (blue, 0; orange, +1; gray, −1).

[0087] The figures herein are for illustrative purposes only and are not necessarily drawn to scale.

### DETAILED DESCRIPTION OF THE EXAMPLE EMBODIMENTS

[0088] Before the present disclosure is described in greater detail, it is to be understood that this disclosure is not limited to particular embodiments described, and as such may, of course, vary. It is also to be understood that the terminology used herein is for the purpose of describing particular embodiments only, and is not intended to be limiting.

[0089] Unless defined otherwise, all technical and scientific terms used herein have the same meaning as commonly understood by one of ordinary skill in the art to which this disclosure belongs. Although any methods and materials similar or equivalent to those described herein can also be used in the practice or testing of the present disclosure, the preferred methods and materials are now described.

[0090] All publications and patents cited in this specification are cited to disclose and describe the methods and/or materials in connection with which the publications are cited. All such publications and patents are herein incorporated by references as if each individual publication or patent were specifically and individually indicated to be incorporated by reference. Such incorporation by reference is expressly limited to the methods and/or materials described in the cited publications and patents and does not extend to any lexicographical definitions from the cited publications and patents. Any lexicographical definition in the publications and patents cited that is not also expressly repeated in the instant application should not be treated as such and should not be read as defining any terms appearing in the accompanying claims. The citation of any publication is for its disclosure prior to the filing date and should not be construed as an admission that the present disclosure is not entitled to antedate such publication by virtue of prior disclosure. Further, the dates of publication provided could be different from the actual publication dates that may need to be independently confirmed.

[0091] As will be apparent to those of skill in the art upon reading this disclosure, each of the individual embodiments described and illustrated herein has discrete components and features which may be readily separated from or combined with the features of any of the other several embodiments without departing from the scope or spirit of the present disclosure. Any recited method can be carried out in the order of events recited or in any other order that is logically possible.

[0092] Where a range is expressed, a further embodiment includes from the one particular value and/or to the other particular value. Where a range of values is provided, it is understood that each intervening value, to the tenth of the unit of the lower limit unless the context clearly dictates otherwise, between the upper and lower limit of that range and any other stated or intervening value in that stated range, is encompassed within the disclosure. The upper and lower limits of these smaller ranges may independently be included in the smaller ranges and are also encompassed within the disclosure, subject to any specifically excluded limit in the stated range. Where the stated range includes one or both of the limits, ranges excluding either or both of those included limits are also included in the disclosure. For example, where the stated range includes one or both of the limits, ranges excluding either or both of those included limits are also included in the disclosure, e.g., the phrase “x to y” includes the range from ‘x’ to ‘y’ as well as the range greater than ‘x’ and less than ‘y’. The range can also be expressed as an upper limit, e.g. ‘about x, y, z, or less’ and should be interpreted to include the specific ranges of ‘about x’, ‘about y’, and ‘about z’ as well as the ranges of ‘less than x’, less than y’, and ‘less than z’. Likewise, the phrase ‘about x, y, z, or greater’ should be interpreted to include the specific ranges of ‘about x’, ‘about y’, and ‘about z’ as well as the ranges of ‘greater than x’, greater than y’, and ‘greater than z’. In addition, the phrase “about ‘x’ to ‘y’”, where ‘x’ and ‘y’ are numerical values, includes “about ‘x’ to about ‘y’”.

[0093] It should be noted that ratios, concentrations, amounts, and other numerical data can be expressed herein in a range format. It will be further understood that the endpoints of each of the ranges are significant both in relation to the other endpoint, and independently of the other endpoint. It is also understood that there are a number of values disclosed herein, and that each value is also herein disclosed as “about” that particular value in addition to the value itself. For example, if the value “10” is disclosed, then “about 10” is also disclosed. Ranges can be expressed herein as from “about” one particular value, and/or to “about” another particular value. Similarly, when values are expressed as approximations, by use of the antecedent “about,” it will be understood that the particular value forms a further embodiment. For example, if the value “about 10” is disclosed, then “10” is also disclosed.

[0094] It is to be understood that such a range format is used for convenience and brevity, and thus, should be interpreted in a flexible manner to include not only the numerical values explicitly recited as the limits of the range, but also to include all the individual numerical values or sub-ranges encompassed within that range as if each numerical value and sub-range is explicitly recited. To illustrate, a numerical range of “about 0.1% to 5%” should be interpreted to include not only the explicitly recited values of about 0.1% to about 5%, but also include individual values (e.g., about 1%, about 2%, about 3%, and about 4%) and the sub-ranges (e.g., about 0.5% to about 1.1%; about 5% to about 2.4%; about 0.5% to about 3.2%, and about 0.5% to about 4.4%, and other possible sub-ranges) within the indicated range. General Definitions

[0095] Unless defined otherwise, technical and scientific terms used herein have the same meaning as commonly understood by one of ordinary skill in the art to which this disclosure pertains. Definitions of common terms and techniques in molecular biology may be found in Molecular Cloning: A Laboratory Manual, 2^{nd} edition (1989) (Sambrook, Fritsch, and Maniatis); Molecular Cloning: A Laboratory Manual, 4^{th} edition (2012) (Green and Sambrook); Current Protocols in Molecular Biology (1987) (F. M. Ausubel et al. eds.); the series Methods in Enzymology (Academic Press, Inc.): PCR 2: A Practical Approach (1995) (M. J. MacPherson, B. D. Hames, and G. R. Taylor eds.): Antibodies, A Laboratory Manual (1988) (Harlow and Lane, eds.): Antibodies A Laboratory Manual, 2^{nd} edition 2013 (E. A. Greenfield ed.); Animal Cell Culture (1987) (R. I. Freshney, ed.); Benjamin Lewin, Genes IX, published by Jones and Bartlett, 2008 (ISBN 0763752223); Kendrew et al. (eds.), The Encyclopedia of Molecular Biology, published by Blackwell Science Ltd., 1994 (ISBN 0632021829); Robert A. Meyers (ed.), Molecular Biology and Biotechnology: a Comprehensive Desk Reference, published by VCH Publishers, Inc., 1995 (ISBN 9780471185710); Singleton et al., Dictionary of Microbiology and Molecular Biology 2nd ed., J. Wiley & Sons (New York, N.Y. 1994), March, Advanced Organic Chemistry Reactions, Mechanisms and Structure 4th ed., John Wiley & Sons (New York, N.Y. 1992); and Marten H. Hofker and Jan van Deursen, Transgenic Mouse Methods and Protocols, 2^{nd} edition (2011).

[0096] As used herein, the singular forms “a”, “an”, and “the” include both singular and plural referents unless the context clearly dictates otherwise.

[0097] As used herein, “about,” “approximately,” “substantially,” and the like, when used in connection with a measurable variable such as a parameter, an amount, a temporal duration, and the like, are meant to encompass variations of and from the specified value including those within experimental error (which can be determined by e.g. given data set, art accepted standard, and/or with e.g., a given confidence interval (e.g. 90%, 95%, or more confidence interval from the mean), such as variations of +/−10% or less, +/−5% or less, +/−1% or less, and +/−0.1% or less of and from the specified value, insofar such variations are appropriate to perform in the disclosed invention. As used herein, the terms “about,” “approximate,” “at or about,” and “substantially” can mean that the amount or value in question can be the exact value or a value that provides equivalent results or effects as recited in the claims or taught herein. That is, it is understood that amounts, sizes, formulations, parameters, and other quantities and characteristics are not and need not be exact, but may be approximate and/or larger or smaller, as desired, reflecting tolerances, conversion factors, rounding off, measurement error and the like, and other factors known to those of skill in the art such that equivalent results or effects are obtained. In some circumstances, the value that provides equivalent results or effects cannot be reasonably determined. In general, an amount, size, formulation, parameter or other quantity or characteristic is “about,” “approximate,” or “at or about” whether or not expressly stated to be such. It is understood that where “about,” “approximate,” or “at or about” is used before a quantitative value, the parameter also includes the specific quantitative value itself, unless specifically stated otherwise.

[0098] The term “optional” or “optionally” means that the subsequent described event, circumstance or substituent may or may not occur, and that the description includes instances where the event or circumstance occurs and instances where it does not.

[0099] The recitation of numerical ranges by endpoints includes all numbers and fractions subsumed within the respective ranges, as well as the recited endpoints.

[0100] As used herein, a “biological sample” refers to a sample obtained from, made by, secreted by, excreted by, or otherwise containing part of or from a biologic entity. A biologic sample can contain whole cells and/or live cells and/or cell debris, and/or cell products, and/or virus particles. The biological sample can contain (or be derived from) a “bodily fluid”. The biological sample can be obtained from an environment (e.g., water source, soil, air, and the like). Such samples are also referred to herein as environmental samples. As used herein “bodily fluid” refers to any non-solid excretion, secretion, or other fluid present in an organism and includes, without limitation unless otherwise specified or is apparent from the description herein, amniotic fluid, aqueous humor, vitreous humor, bile, blood or component thereof (e.g. plasma, serum, etc.), breast milk, cerebrospinal fluid, cerumen (earwax), chyle, chyme, endolymph, perilymph, exudates, feces, female ejaculate, gastric acid, gastric juice, lymph, mucus (including nasal drainage and phlegm), pericardial fluid, peritoneal fluid, pleural fluid, pus, rheum, saliva, sebum (skin oil), semen, sputum, synovial fluid, sweat, tears, urine, vaginal secretion, vomit and mixtures of one or more thereof. Biological samples include cell cultures, bodily fluids, cell cultures from bodily fluids. Bodily fluids may be obtained from an organism, for example by puncture, or other collecting or sampling procedures.

[0101] The terms “subject,” “individual,” and “patient” are used interchangeably herein to refer to a vertebrate, preferably a mammal, more preferably a human. Mammals include, but are not limited to, murines, simians, humans, farm animals, sport animals, and pets. Tissues, cells and their progeny of a biological entity obtained in vivo or cultured in vitro are also encompassed.

[0102] Various embodiments are described hereinafter. It should be noted that the specific embodiments are not intended as an exhaustive description or as a limitation to the broader embodiments discussed herein. One embodiment described in conjunction with a particular embodiment is not necessarily limited to that embodiment and can be practiced with any other embodiment(s). Reference throughout this specification to “one embodiment”, “an embodiment,” “an example embodiment,” means that a particular feature, structure or characteristic described in connection with the embodiment is included in at least one embodiment of the present invention. Thus, appearances of the phrases “in one embodiment,” “in an embodiment,” or “an example embodiment” in various places throughout this specification are not necessarily all referring to the same embodiment, but may. Furthermore, the particular features, structures or characteristics may be combined in any suitable manner, as would be apparent to a person skilled in the art from this disclosure, in one or more embodiments. Furthermore, while some embodiments described herein include some but not other features included in other embodiments, combinations of features of different embodiments are meant to be within the scope of the invention. For example, in the appended claims, any of the claimed embodiments can be used in any combination.

[0103] All publications, published patent documents, and patent applications cited herein are hereby incorporated by reference to the same extent as though each individual publication, published patent document, or patent application was specifically and individually indicated as being incorporated by reference.

### OVERVIEW

[0104] Recent epidemics of Ebola and Zika are stark reminders of the enormous impact of viruses on public health, emphasizing the great need for transformative vaccines and therapeutics. Despite many recent technological advances, systematic methods to investigate virology have lagged behind, so that many of the global principles underlying viral infection remain unknown. One critical area of study is how viruses evade the host immune response. During infection, viral peptides are uploaded on the major histocompatibility class I molecule (MHC-I) and presented to cytotoxic T-cells. Some viruses respond by inhibiting the MHC-I pathway globally, but many infected host cells maintain an active presentation pathway, suggesting the existence of additional response mechanisms. Although it was thought that the MHC-I repertoire reflects the intracellular protein pool, recent studies demonstrate that many of the presented antigens result from newly synthesized peptides from non-functional sequences. Among these are alternative reading frames (ARFs), upstream open reading frames (uORFs), short open reading frames (sORFs) and defective ribosomal products (DRiPs). These sources vastly increase the availability of viral peptides for presentation and immune evasion and imply an important role for translational regulation in this process. Since traditional studies investigate only a few peptides at a time, a comprehensive view of the collection of functional ORFs and immunogenic peptides in each virus is not fully characterized and, in turn, the causal effect of viral mutations on immunogenicity.

[0105] Applicant has developed high-throughput techniques to evaluate the translation of hundreds of viral genomes. Exemplary embodiments disclosed herein provide massively parallel ribosome profiling, massively parallel antigen presentation assays, and massively parallel reporter assays for high throughput analysis of viral translatomes and/or immunopeptidome. Additionally, Applicant provides non-canonical viral ORFs and compositions, such as vaccines and other immunogenic compositions, including or capable of producing the non-canonical viral ORFs. Other compositions, compounds, methods, features, and advantages of the present disclosure will be or become apparent to one having ordinary skill in the art upon examination of the following drawings, detailed description, and examples. It is intended that all such additional compositions, compounds, methods, features, and advantages be included within this description, and be within the scope of the present disclosure.

### Viral Polynucleotides, Polypeptides, and Compositions

[0106] Described in certain embodiments herein are polynucleotides comprising one or more viral polynucleotides from SEQ ID NOS: 1-9890 or SEQ ID NOS: 9891-16277. Described in certain example embodiments herein are polynucleotides, such as engineered polynucleotides, comprising one or more viral polynucleotides selected from those polynucleotides identified by a method described herein and/or SEQ ID NOS: 1-9890 or SEQ ID NOS: 9891-16277. Described in certain example embodiments herein are polypeptides encoded by the polynucleotides of the present invention such as one or more of those set forth in SEQ ID NOS: 1-9890 or SEQ ID NOS: 9891-16277 and/or as identified by a method of the present invention described in greater detail elsewhere herein.

[0107] The polynucleotide and/or polypeptides of the present invention can be included in a cell, vector, and/or delivery vehicle. Described in certain example embodiments herein are immunogenic compositions comprising a polynucleotide, a vector, polypeptide, delivery vehicle, and/or cell as in any one of the preceding paragraphs or as described elsewhere herein. In certain example embodiments, the polynucleotide and/or the polypeptide of the immunogenic composition is capable of stimulating a B-cell and/or T-cell response in a subject to which it is delivered. In certain example embodiments, the B-cell response comprises antibody production. The immunogenic compositions may elicit an immunological response in the host to which the immunogenic compositions are administered. Such immunological response may be a T cell-mediated (e.g., cytotoxic T cell-mediated) immune response to the immunogenic compositions. In certain embodiments, the immunogenic compositions may be combined with one or more antigenic components and/or anti-viral therapeutics. In some examples, such combination may elicit cellular and/or antibody-mediated immune response, e.g., production or activation of antibodies, B cells, helper T cells, suppressor T cells, and/or cytotoxic T cells and/or gamma-delta T cells.

[0108] In some embodiments, the composition may be used to treat viral infection of a subject. For example, the composition may be used to remove infected cells in the subject. In some embodiments, the composition may be used to prevent viral infection or reduce the impact of viral infection on the subject (e.g., clinical signs normally displayed by an infected host, a quicker recovery time and/or a lowered duration of infectivity or lowered pathogen titer in the tissues or body fluids or excretions of the infected subject). In some cases, the subject displays a protective immunological response such that resistance to new infection may be enhanced and/or the clinical severity of the disease may be reduced.

[0109] Described in certain embodiments elsewhere herein are methods, such as massively parallel ribosome profiling, antigen presentation profiling, and/or massively parallel reporter assays. Such assays can be used to identify viral polypeptides and encoding polynucleotides, including but not limited to, non-canonical open reading frames. In certain example embodiments, such non-canonical open reading frames are alternative reading frames (ARFs), upstream open reading frames (uORFs), short open reading frames (sORFs) and defective ribosomal products (DRiPs). Described in certain example embodiments herein are polynucleotides and/or polypeptides identified using the method described herein, such as the massively parallel ribosome profiling, immunopeptidome profiling, and/or massively parallel reporter assays described elsewhere herein.

### Polynucleotides and Polypeptides

[0110] Described in certain example embodiments herein are polynucleotides, such as engineered polynucleotides, comprising one or more viral polynucleotides selected from those polynucleotides identified by a method described herein and/or SEQ ID NOS: 1-9890 or SEQ ID NOS: 9891-16277. In some embodiments, the polynucleotides are codon optimized for expression in humans or non-human animals. In some embodiments, the one or more viral polynucleotides has a sequence corresponding to a (a) an annotated region of a genome; (b) an unannotated region of a genome; (c) a mutation; (d) a 5′UTR; (e) a 3′UTR; (f) an open reading frame; or (g) any combination thereof. In certain example embodiments, the short synthetic polynucleotide (a) is a sequence according to a sequence in SEQ ID NOS: 1-9890 or SEQ ID NOS: 9891-16277; (b) is a synthetic in silico designed sequence; (d) does not have 100 percent identity to a genome sequence, optionally a human genome, a non-human animal genome, a plant genome, a microbial genome, or a viral genome; (e) is not native to any genome, optionally a human genome, a non-human animal genome, a plant genome, a microbial genome, or a viral genome; or (f) any combination thereof.

[0111] In some embodiments, a polynucleotide of the present invention has 50-100% identity to a polynucleotide of SEQ ID NOS: 1-9890 or SEQ ID NOS: 9891-16277 or a polynucleotide identified using a method of the present invention described elsewhere herein. In some embodiments, a polynucleotide of the present invention has 50%, to/or 51%, 52%, 53%, 54%, 55%, 56%, 57%, 58%, 59%, 60%, 61%, 62%, 63%, 64%, 65%, 66%, 67%, 68%, 69%, 70%, 71%, 72%, 73%, 74%, 75%, 76%, 77%, 78%, 79%, 80%, 81%, 82%, 83%, 84%, 85%, 86%, 87%, 88%, 89%, 90%, 91%, 92%, 93%, 94%, 95%, 96%, 97%, 98%, 99%, 100% identity to a polynucleotide of SEQ ID NOS: 1-9890 or SEQ ID NOS: 9891-16277 or a polynucleotide identified using a method of the present invention described elsewhere herein. The terms “percent (%) sequence identity”, and the like, generally refer to the degree of identity or correspondence between different nucleotide sequences of nucleic acid molecules or amino acid sequences of polypeptides that may or may not share a common evolutionary origin. Sequence identity can be determined using any of a number of publicly available sequence comparison algorithms, such as BLAST, FASTA, DNA Strider, GCG (Genetics Computer Group, Program Manual for the GCG Package, Version 7, Madison, Wis.), etc. In some embodiments, a polypeptide of the present invention has 50%, to 100% identity to a polypeptide encoded by a polynucleotide of SEQ ID NOS: 1-9890 or SEQ ID NOS: 9891-16277 or a polynucleotide identified using a method of the present invention described elsewhere herein. In some embodiments, a polypeptide of the present invention has 50%, to/or 51%, 52%, 53%, 54%, 55%, 56%, 57%, 58%, 59%, 60%, 61%, 62%, 63%, 64%, 65%, 66%, 67%, 68%, 69%, 70%, 71%, 72%, 73%, 74%, 75%, 76%, 77%, 78%, 79%, 80%, 81%, 82%, 83%, 84%, 85%, 86%, 87%, 88%, 89%, 90%, 91%, 92%, 93%, 94%, 95%, 96%, 97%, 98%, 99%, 100% identity to a polypeptide encoded by a polynucleotide of SEQ ID NOS: 1-9890 or SEQ ID NOS: 9891-16277 or a polynucleotide identified using a method of the present invention described elsewhere herein.

[0112] In some embodiments, the one or more viral polynucleotides corresponds to an open reading frame (ORF) in a viral genome. The one or more viral polypeptides may be expressed from one or more open reading frames (ORFs) in a viral genome. An ORF refers to a polynucleotide that encodes a protein, or a portion of a protein. An open reading frame usually begins with a start codon and is read in codon-triplets until the frame ends with a STOP codon. In some embodiments, the ORFs are canonical ORFs. A canonical ORF is an ORF that is most prevalent, most similar to orthologous sequences found in other species, by virtue of its length or amino acid composition, allows for the clearest description of domains, isoforms, polymorphisms, post-translational modifications, or in the absence of other information is the longest sequence. In some embodiments, the ORFs are non-canonical ORFs. In some embodiments, the non-canonical ORFs are alternative reading frames (ARFs), upstream open reading frames (uORFs), short open reading frames (sORFs), defective ribosomal products (DRiPs), out-of-frame ORFs, or other non-canonical ORFs.

### Exemplary Viruses

[0113] The one or more polynucleotides and/or polypeptides may be derived from one or more polynucleotides (e.g., viral genome) or proteins of a virus. A polypeptide derived from a protein has an amino acid sequence that is a portion or the full-length of the protein's amino acid sequence. In some examples, the one or more polypeptides may be peptides resulting from digestion or degradation of a viral protein in cells infected by the virus. The virus may be a DNA virus, an RNA virus, or a retrovirus.

[0114] The one or more proteins of a virus may be protein(s) of a coronavirus. The coronavirus may be a positive-sense single stranded RNA family of viruses, infecting a variety of animals and humans. In one example, the one or more proteins are protein(s) of SARS-CoV-2. SARS-CoV is one type of coronavirus infection, as well as MERS-CoV. Example sequences of the SARS-CoV-2 are available at GISAID accession no. EPI_ISL_402124 and EPI_ISL_402127-402130, and described in DOI: 10.1101/2020.01.22.914952. Further deposits of the example SARS-CoV2 are deposited in the GISAID platform include EP_ISL_402119-402121 and EP_ISL_402123-402124; see also GenBank Accession No. MN908947.3.

[0115] The one or more polypeptides may be derived from proteins of other viruses. Examples of such viruses include Ebola, measles, SARS, Chikungunya, hepatitis, Marburg, yellow fever, MERS, Dengue, Lassa, influenza, rhabdovirus or HIV. A hepatitis virus may include hepatitis A, hepatitis B, or hepatitis C. An influenza virus may include, for example, influenza A or influenza B. An HIV may include HIV 1 or HIV 2. In certain example embodiments, the viral sequence may be a human respiratory syncytial virus, Sudan ebola virus, Bundibugyo virus, Tai Forest ebola virus, Reston ebola virus, Achimota, Aedes flavivirus, Aguacate virus, Akabane virus, Alethinophid reptarenavirus, Allpahuayo mammarenavirus, Amapari mmarenavirus, Andes virus, Apoi virus, Aravan virus, Aroa virus, Arumwot virus, Atlantic salmon paramyxovirus, Australian bat lyssavirus, Avian bornavirus, Avian metapneumovirus, Avian paramyxoviruses, penguin or Falkland Islandsvirus, BK polyomavirus, Bagaza virus, Banna virus, Bat herpesvirus, Bat sapovirus, Bear Canon mammarenavirus, Beilong virus, Betacoronavirus, Betapapillomavirus 1-6, Bhanja virus, Bokeloh bat lyssavirus, Borna disease virus, Bourbon virus, Bovine hepacivirus, Bovine parainfluenza virus 3, Bovine respiratory syncytial virus, Brazoran virus, Bunyamwera virus, Caliciviridae virus. California encephalitis virus, Candiru virus, Canine distemper virus, Canine pneumovirus, Cedar virus, Cell fusing agent virus, Cetacean morbillivirus, Chandipura virus, Chaoyang virus, Chapare mammarenavirus, Chikungunya virus, Colobus monkey papillomavirus, Colorado tick fever virus, Cowpox virus, Crimean-Congo hemorrhagic fever virus, Culex flavivirus, Cupixi mammarenavirus, Dengue virus, Dobrava-Belgrade virus, Donggang virus, Dugbe virus, Duvenhage virus, Eastern equine encephalitis virus, Entebbe bat virus, Enterovirus A-D, European bat lyssavirus 1-2, Eyach virus, Feline morbillivirus, Fer-de-Lance paramyxovirus, Fitzroy River virus, Flaviviridae virus, Flexal mammarenavirus, GB virus C, Gairo virus, Gemycircularvirus, Goose paramyxovirus SF02, Great Island virus, Guanarito mammarenavirus, Hantaan virus, Hantavirus Z10, Heartland virus, Hendra virus, Hepatitis A/B/C/E, Hepatitis delta virus, Human bocavirus, Human coronavirus, Human endogenous retrovirus K, Human enteric coronavirus, Human genital-associated circular DNA virus-1, Human herpesvirus 1-8, Human immunodeficiency virus 1/2, Human mastadenovirus A-G, Human papillomavirus, Human parainfluenza virus 1-4, Human paraechovirus, Human picornavirus, Human smacovirus, Ikoma lyssavirus, Ilheus virus, Influenza A-C, Ippy mammarenavirus, Irkut virus, J-virus, JC polyomavirus, Japanese encephalitis virus, Junin mammarenavirus, KI polyomavirus, Kadipiro virus, Kamiti River virus, Kedougou virus, Khujand virus, Kokobera virus, Kyasanur forest disease virus, Lagos bat virus, Langat virus, Lassa mammarenavirus, Latino mammarenavirus, Leopards Hill virus, Liao ning virus, Ljungan virus, Lloviu virus, Louping ill virus, Lujo mammarenavirus, Luna mammarenavirus, Lunk virus, Lymphocytic choriomeningitis mammarenavirus, Lyssavirus Ozernoe, MSSI2\.225 virus, Machupo mammarenavirus, Mamastrovirus 1, Manzanilla virus, Mapuera virus, Marburg virus, Mayaro virus, Measles virus, Menangle virus, Mercadeo virus, Merkel cell polyomavirus, Middle East respiratory syndrome coronavirus, Mobala mammarenavirus, Modoc virus, Moijang virus, Mokolo virus, Monkeypox virus, Montana myotis leukoenchalitis virus, Mopeia lassa virus reassortant 29, Mopeia mammarenavirus, Morogoro virus, Mossman virus, Mumps virus, Murine pneumonia virus, Murray Valley encephalitis virus, Nariva virus, Newcastle disease virus, Nipah virus, Norwalk virus, Norway rat hepacivirus, Ntaya virus, O'nyong-nyong virus, Oliveros mammarenavirus, Omsk hemorrhagic fever virus, Oropouche virus, Parainfluenza virus 5, Parana mammarenavirus, Parramatta River virus, Peste-des-petits-ruminants virus, Pichande mammarenavirus, Picornaviridae virus, Pirital mammarenavirus, Piscihepevirus A, Porcine parainfluenza virus 1, porcine rubulavirus, Powassan virus, Primate T-lymphotropic virus 1-2, Primate erythroparvovirus 1, Punta Toro virus, Puumala virus, Quang Binh virus, Rabies virus, Razdan virus, Reptile bornavirus 1, Rhinovirus A-B, Rift Valley fever virus, Rinderpest virus, Rio Bravo virus, Rodent Torque Teno virus, Rodent hepacivirus, Ross River virus, Rotavirus A-I, Royal Farm virus, Rubella virus, Sabia mammarenavirus, Salem virus, Sandfly fever Naples virus, Sandfly fever Sicilian virus, Sapporo virus, Sathuperi virus, Seal anellovirus, Semliki Forest virus, Sendai virus, Seoul virus, Sepik virus, Severe acute respiratory syndrome-related coronavirus, Severe fever with thrombocytopenia syndrome virus, Shamonda virus, Shimoni bat virus, Shuni virus, Simbu virus, Simian torque teno virus, Simian virus 40-41, Sin Nombre virus, Sindbis virus, Small anellovirus, Sosuga virus, Spanish goat encephalitis virus, Spondweni virus, St. Louis encephalitis virus, Sunshine virus, TTV-like mini virus, Tacaribe mammarenavirus, Taila virus, Tamana bat virus, Tamiami mammarenavirus, Tembusu virus, Thogoto virus, Thottapalayam virus, Tick-borne encephalitis virus, Tioman virus, Togaviridae virus, Torque teno canis virus, Torque teno douroucouli virus, Torque teno felis virus, Torque teno midi virus, Torque teno sus virus, Torque teno tamarin virus, Torque teno virus, Torque teno zalophus virus, Tuhoko virus, Tula virus, Tupaia paramyxovirus, Usutu virus, Uukuniemi virus, Vaccinia virus, Variola virus, Venezuelan equine encephalitis virus, Vesicular stomatitis Indiana virus, WU Polyomavirus, Wesselsbron virus, West Caucasian bat virus, West Nile virus, Western equine encephalitis virus, Whitewater Arroyo mammarenavirus, Yellow fever virus, Yokose virus, Yug Bogdanovac virus, Zaire ebolavirus, Zika virus, or Zygosaccharomyces bailii virus Z viral sequence. Examples of RNA viruses that may be detected include one or more of (or any combination of) Coronaviridae virus, a Picornaviridae virus, a Caliciviridae virus, a Flaviviridae virus, a Togaviridae virus, a Bornaviridae, a Filoviridae, a Paramyxoviridae, a Pneumoviridae, a Rhabdoviridae, an Arenaviridae, a Bunyaviridae, an Orthomyxoviridae, or a Deltavirus. In certain example embodiments, the virus is Coronavirus, SARS, Poliovirus, Rhinovirus, Hepatitis A, Norwalk virus, Yellow fever virus, West Nile virus, Hepatitis C virus, Dengue fever virus, Zika virus, Rubella virus, Ross River virus, Sindbis virus, Chikungunya virus, Boma disease virus, Ebola virus, Marburg virus, Measles virus, Mumps virus, Nipah virus, Hendra virus, Newcastle disease virus, Human respiratory syncytial virus, Rabies virus, Lassa virus, Hantavirus, Crimean-Congo hemorrhagic fever virus, Influenza, or Hepatitis D virus.

### SARS-CoV-2 Variants

[0116] The present disclosure relates to and/or involves SARS-CoV-2. More particularly the disclosure describes, inter alia, SARS-CoV-2 variant immunogenic polypeptides and encoding polynucleotides. As described herein are vaccines that include the SARS-CoV-2 variant immunogenic polypeptides and/or encoding polynucleotides. Such vaccines can be effective against one or more SARS-CoV-2 variants.

[0117] As used herein, the term “variant” refers to any virus having one or more mutations as compared to a known virus. A strain is a genetic variant or subtype of a virus. The terms ‘strain’, ‘variant’, and ‘isolate’ may be used interchangeably. In certain embodiments, a variant has developed a “specific group of mutations” that causes the variant to behave differently than that of the strain it originated from. While there are many thousands of variants of SARS-CoV-2, (Koyama, Takahiko Koyama; Platt, Daniela; Parida, Laxmi (June 2020). “Variant analysis of SARS-CoV-2 genomes”. Bulletin of the World Health Organization. 98: 495-504) there are also much larger groupings called clades. Several different clade nomenclatures for SARS-CoV-2 have been proposed. As of December 2020, GISAID, referring to SARS-CoV-2 as hCoV-19 identified seven clades (0, S, L, V, G, GH, and GR) (Alm E, Broberg E K, Connor T, et al. Geographical and temporal distribution of SARS-CoV-2 clades in the WHO European Region, January to June 2020 [published correction appears in Euro Surveill. 2020 August; 25(33):]. Euro Surveill. 2020; 25(32):2001410). Also as of December 2020, Nextstrain identified five (19A, 19B, 20A, 20B, and 20C) (Cited in Alm et al. 2020). Guan et al. identified five global clades (G614, 584, V251, 1378 and D392) (Guan Q, Sadykov M, Mfarrej S, et al. A genetic barcode of SARS-CoV-2 for monitoring global distribution of different clades during the COVID-19 pandemic. Int J Infect Dis. 2020; 100:216-223). Rambaut et al. proposed the term “lineage” in a 2020 article in Nature Microbiology; as of December 2020, there have been five major lineages (A, B, B.1, B.1.1, and B.1.777) identified (Rambaut, A.; Holmes, E. C.; O'Toole, A.; et al. “A dynamic nomenclature proposal for SARS-CoV-2 lineages to assist genomic epidemiology”. 5: 1403-1407).

[0118] Genetic variants of SARS-CoV-2 have been emerging and circulating around the world throughout the COVID-19 pandemic (see, e.g., The US Centers for Disease Control and Prevention; www.cdc.gov/coronavirus/2019-ncov/variants/variant-info.html). Exemplary, non-limiting variants applicable to the present disclosure include variants of SARS-CoV-2, particularly those having substitutions of therapeutic concern. Table 1 shows exemplary, non-limiting genetic substitutions in SARS-CoV-2 variants.

TABLE 1

| | Common Pango Lineages with |
|---|---|
| Spike Protein Substitution | Spike Protein Substitutions |
| L452R | A.2.5, B.1, B.1.429, B.1.427, B.1.617.1, |
| | B.1.526.1, B.1.617.2, C.36.3 |
| E484K | B.1.1.318, B.1.1.7, B.1.351, B.1.525, |
| | B.1.526, B.1.621, B.1.623, P.1, P.1.1, |
| | P.1.2, R.1 |
| K417N, E484K, N501Y | B.1.351, B.1.351.3 |
| K417T, E484K, N501Y | P.1, P.1.1, P.1.2 |

Phylogenetic Assignment of Named Global Outbreak (PANGO) Lineages is software tool developed by members of the Rambaut Lab. The associated web application was developed by the Centre for Genomic Pathogen Surveillance in South Cambridgeshire and is intended to implement the dynamic nomenclature of SARS-CoV-2 lineages, known as the PANGO nomenclature. It is available at cov-lineages.org.

[0119] In some embodiments, the SARS-CoV-2 variant is and/or includes: B.1.1.7, also known as Alpha (WHO) or UK variant, having the following spike protein substitutions: 69del, 70del, 144del, (E484K*), (S494P*), N501Y, A570D, D614G, P681H, T716I, S982A, and D1118H (K1191N*); B.1.351, also known as Beta (WHO) or South Africa variant, having the following spike protein substitutions: D80A, D215G, 241del, 242del, 243del, K417N, E484K, N501Y, D614G, and A701V; B.1.427, also known as Epsilon (WHO) or US California variant, having the following spike protein substitutions: L452R, and D614G; B.1.429, also known as Epsilon (WHO) or US California variant, having the following spike protein substitutions: S13I, W152C, L452R, and D614G; B.1.617.2, also known as Delta (WHO) or India variant, having the following spike protein substitutions: T19R, (G142D), 156del, 157del, R158G, L452R, T478K, D614G, P681R, and D950N; and P.1, also known as Gamma (WHO) or Japan/Brazil variant, having the following spike protein substitutions: L18F, T20N, P26S, D138Y, R190S, K417T, E484K, N501Y, D614G, H655Y, and T1027I, or any combination thereof.

[0120] In some embodiments, the SARS-CoV-2 variant is classified and/or otherwise identified as a Variant of Concern (VOC) by the World Health Organization and/or the U.S. Centers for Disease Control. A VOC is a variant for which there is evidence of an increase in transmissibility, more severe disease (e.g., increased hospitalizations or deaths), significant reduction in neutralization by antibodies generated during previous infection or vaccination, reduced effectiveness of treatments or vaccines, or diagnostic detection failures.

[0121] In some embodiments, the SARS-Cov-2 variant is classified and/or otherwise identified as a Variant of High Consequence (VHC) by the World Health Organization and/or the U.S. Centers for Disease Control. A variant of high consequence has clear evidence that prevention measures or medical countermeasures (MCMs) have significantly reduced effectiveness relative to previously circulating variants.

[0122] In some embodiments, the SARS-Cov-2 variant is classified and/or otherwise identified as a Variant of Interest (VOI) by the World Health Organization and/or the U.S. Centers for Disease Control. A VOI is a variant with specific genetic markers that have been associated with changes to receptor binding, reduced neutralization by antibodies generated against previous infection or vaccination, reduced efficacy of treatments, potential diagnostic impact, or predicted increase in transmissibility or disease severity.

[0123] In some embodiments, the SARS-Cov-2 variant is classified and/or is otherwise identified as a Variant of Note (VON). As used herein, VON refers to both “variants of concern” and “variants of note” as the two phrases are used and defined by Pangolin (cov-lineages.org) and provided in their available “VOC reports” available at cov-lineages.org.

[0124] In some embodiments the SARS-Cov-2 variant is a VOC. In some embodiments, the SARS-CoV-2 variant is or includes an Alpha variant (e.g., Pango lineage B.1.1.7), a Beta variant (e.g., Pango lineage B.1.351, B.1.351.1, B.1.351.2, and/or B.1.351.3), a Delta variant (e.g., Pango lineage B.1.617.2, AY.1, AY.2, AY.3 and/or AY.3.1); a Gamma variant (e.g., Pango lineage P.1, P.1.1, P.1.2, P.1.4, P.1.6, and/or P.1.7), or any combination thereof.

[0125] In some embodiments, the SARS-Cov-2 variant is a VOI. In some embodiments, the SARS-CoV-2 variant is or includes an Eta variant (e.g., Pango lineage B.1.525 (Spike protein substitutions A67V, 69del, 70del, 144del, E484K, D614G, Q677H, F888L)); an Iota variant (e.g., Pango lineage B.1.526 (Spike protein substitutions L5F, (D80G*), T95I, (Y144-*), (F157S*), D253G, (L452R*), (S477N*), E484K, D614G, A701V, (T859N*), (D950H*), (Q957R*))); a Kappa variant (e.g., Pango lineage B.1.617.1 (Spike protein substitutions (T95I), G142D, E154K, L452R, E484Q, D614G, P681R, Q1071H)); Pango lineage variant B.1.617.2 (Spike protein substitutions T19R, G142D, L452R, E484Q, D614G, P681R, D950N)), Lambda (e.g., Pango lineage C.37); or any combination thereof.

[0126] In some embodiments, SARS-Cov-2 variant is a VON. In some embodiments, the SARS-Cov-2 variant is or includes Pango lineage variant P.1 (alias, B.1.1.28.1.) as described in Rambaut et al. 2020. Nat. Microbiol. 5:1403-1407) (spike protein substitutions: T20N, P26S, D138Y, R190S, K417T, E484K, N501Y, H655Y, TI027I)); an Alpha variant (e.g., Pango lineage B.1.1.7); a Beta variant (e.g., Pango lineage B.1.351, B.1.351.1, B.1.351.2, and/or B.1.351.3); Pango lineage variant B.1.617.2 (Spike protein substitutions T19R, G142D, L452R, E484Q, D614G, P681R, D950N)); an Eta variant (e.g., Pango lineage B.1.525); Pango lineage variant A.23.1 (as described in Bugembe et al. medRxiv. 2021. doi: https://doi.org/10.1101/2021.02.08.21251393) (spike protein substitutions: F157L, V367F, Q613H, P681R); or any combination thereof.

### Major Histocompatibility Complex (MHC) Binding Polypeptides

### MHC I

[0127] The polypeptide(s) described herein or as identified by a method of the present invention, such as those encoded by a polynucleotide described herein, can bind, or is capable of binding, to Major Histocompatibility Complex (MHC) class I, e.g., Human Leukocyte Antigen class I. In some cases, after binding, the MHC class I may present the one or more polypeptides to activate cytotoxic T cells. As used herein, MHC refers to protein complexes capable of binding peptides resulting from the proteolytic cleavage of protein antigens and representing potential T-cell epitopes, transporting them to the cell surface and presenting them there to specific cells, in particular cytotoxic T-lymphocytes or T-helper cells.

[0128] MHC class I, or MHC-I, function mainly in antigen presentation to CD8+ T lymphocytes or cytotoxic T cells and may be heterodimers comprising two polypeptide chains, an alpha chain and β2-microglobulin.

[0129] In some embodiments, the MHC class I may be Human Leukocyte Antigen (HLA) class I, which is the MHC class I in human. HLA class I may comprises an alpha chain and β2-microglobulin. The alpha chain may be HLA-A, HLA-B, or HLA-C. In one example, the one or more peptides binds, or is capable of binding, to HLA-A. In another example, the one or more peptides binds, or is capable of binding, to HLA-B. In another example, the one or more peptides binds, or is capable of binding, to HLA-C. In another example, the one or more peptides binds, or is capable of binding, to β2-microglobulin of HLA-1.

### MHC II

[0130] The polypeptide(s) described herein or as identified by a method of the present invention, such as those encoded by a polynucleotide described herein, can bind, or is capable of binding, to Major Histocompatibility Complex (MHC) class II, e.g., Human Leukocyte Antigen class II. Like MHC class I molecules, class II molecules are also heterodimers, but in this case consist of two homogenous peptides, an α and β chain, both of which are encoded in the MHC. The subdesignation α1, α2, etc. refers to separate domains within the HLA gene; each domain is usually encoded by a different exon within the gene, and some genes have further domains that encode leader sequences, transmembrane sequences, etc. These molecules have both extracellular regions as well as a transmembrane sequence and a cytoplasmic tail. The α1 and β1 regions of the chains come together to make a membrane-distal peptide-binding domain, while the α2 and β2 regions, the remaining extracellular parts of the chains, form a membrane-proximal immunoglobulin-like domain. The antigen binding groove, where the antigen or peptide binds, is made up of two α-helixes walls and β-sheet. See also e.g., Jones et al., Nature Reviews. Immunology. 6 (4): 271-82. doi:10.1038/nri1805. PMID 16557259. S2CID 131777.

[0131] In some embodiments, the MHC class II may be Human Leukocyte Antigen (HLA) class II, which is the MHC class II in human. In some embodiments, the HLA II that binds a polypeptide of the present invention is HLA-DM, HLA-DO, HLA-DP, HLA-DQ, or HLA-DR. In some embodiments, the HLA II that binds a polypeptide of the present invention comprises an alpha chain selected from HLA-DMA, HLA-DOA, HLA-DPA1, HLA-DQA1, HLA-DQA2, or HLA-DRA. In some embodiments, the HLA II that binds a polypeptide of the present invention comprises a beta chain selected from HLA-DMB, HLA-DOB, HLA-DPB1, HLA-DQB1, HLA-DQB2, HLA-DRB1, HLA-DRB3, HLA-DRB4, or HLA-DRB5.

### HLA Alleles

[0132] The one or more peptides may bind, or may be capable of binding, to proteins encoded by certain HLA alleles. HLA genes may be polymorphic and have many different alleles, allowing them to fine-tune the immune system. The nomenclature of HLA genes are well known in the art, e.g., as described in Marsh S G E et al., Nomenclature for factors of the HLA system, 2010, Tissue Antigens. 2010 April; 75(4): 291-455, which is incorporated by reference in its entirety.

[0133] The HLA alleles may encode HLA protein capable of epitope binding. In some cases, the HLA alleles may have a ranking cut-off as determined by a machine learning predictor of HLA (e.g., HLA-I or HLA-II) epitope binding. For example, the HLA alleles may have a ranking cut-off of at least 0.1%, 0 at least 0.5%, or at least 1.0% as determined by HLAthena. Examples of methods for determining the ranking include those described in Sarkizova S. et al., A large peptidome dataset improves HLA class I epitope prediction across most of the human population, Nat Biotechnol. 2020 February; 38(2):199-209; and Abelin J G et al., Mass Spectrometry Profiling of HLA-Associated Peptidomes in Mono-allelic Cells Enables More Accurate Epitope Prediction, Immunity. 2017 Feb. 21; 46(2):315-326, which are incorporated by reference herein in their entireties.

[0134] In some embodiments, the proteins encoded by HLA alleles include HLA proteins encoded by HLA-A*02:01, HLA-A*25:01, HLA-A*30:01, HLA-B*18:01, HLA-B*44:03, HLA-C*12:03, HLA-B*16:01, HLA-A*02:01, HLA-B*07:02, HLA-C*07:02; HLA-A*01:01; HLA-A*02:06; HLA-A*26:01; HLA-A*02:07; HLA-A*29:02; HLA-A*02:03; HLA-A*30:02; HLA-A*32:01; HLA-A*68:02; HLA-A*02:05; HLA-A*02:02; HLA-A*36:01; HLA-A*02:11; HLA-A*02:04; HLA-B*35:01; HLA-B*51:01; HLA-B*40:01; HLA-B*40:02; HLA-B*07:02; HLA-B*07:04; HLA-B*08:01; HLA-B*13:01; HLA-B*46:01; HLA-B*52:01; HLA-B*44:02; HLA-B*40:06; HLA-B*13:02; HLA-B*56:01; HLA-B*54:01; HLA-B*15:02; HLA-B*35:07; HLA-B*27:05; HLA-B*15:03; HLA-B*42:01; HLA-B*55:02; HLA-B*45:01; HLA-B*50:01; HLA-B*35:03; HLA-B*49:01; HLA-B*58:02; HLA-B*15:17; HLA-C*57:02; HLA-C*04:01; HLA-C*03:04; HLA-C*01:02; HLA-C*07:01; HLA-C*06:02; HLA-C*03:03; HLA-C*08:01; HLA-C*15:02; HLA-C*12:02; HLA-C*02:02; HLA-C*05:01; HLA-C*03:02; HLA-C*16:01; HLA-C*08:02; HLA-C*04:03; HLA-C*17:01; or HLA-C*17:04. In some embodiments, the HLA-1 is encoded by HLA-A*02:01, HLA-A*25:01, HLA-A*30:01, HLA-B*18:01, HLA-B*44:03, HLA-C*12:03, HLA-B*16:01, HLA-A*02:01, HLA-B*07:02, or HLA-C*07:02. In some embodiments, the proteins encoded by HLA alleles include HLA proteins encoded by HLA-A*02:01, HLA-A*25:01, HLA-A*30:01, HLA-B*18:01, HLA-B*44:03, HLA-C*12:03, HLA-B*16:01, HLA-A*02:01, HLA-B*07:02, HLA-C*07:02, or a combination thereof.

[0135] In one example, the one or more polypeptides binds, or is capable of binding, to an HLA protein encoded by HLA-A*02:01. In another example, the one or more polypeptides binds, or is capable of binding, to an HLA protein encoded by HLA-A*25:01. In another example, the one or more polypeptides binds, or is capable of binding, to an HLA protein encoded by HLA-A*30:01. In another example, the one or more polypeptides binds, or is capable of binding, to an HLA protein encoded by HLA-B*18:01. In another example, the one or more polypeptides binds, or is capable of binding, to an HLA protein encoded by HLA-B*44:03. In another example, the one or more polypeptides binds, or is capable of binding, to an HLA protein encoded by HLA-C*12:03. In another example, the one or more polypeptides binds, or is capable of binding, to an HLA protein encoded by HLA-B*16:01. In another example, the one or more polypeptides binds, or is capable of binding, to an HLA protein encoded by HLA-A*02:01. In another example, the one or more polypeptides binds, or is capable of binding, to an HLA protein encoded by HLA-B*07:02. In another example, the one or more polypeptides binds, or is capable of binding, to an HLA protein encoded by HLA-C*07:02. In another example, the one or more polypeptides binds, or is capable of binding, to an HLA protein encoded by HLA-A*01:01. In another example, the one or more polypeptides binds, or is capable of binding, to an HLA protein encoded by HLA-A*02:06. In another example, the one or more polypeptides binds, or is capable of binding, to an HLA protein encoded by HLA-A*26:01. In another example, the one or more polypeptides binds, or is capable of binding, to an HLA protein encoded by HLA-A*02:07. In another example, the one or more polypeptides binds, or is capable of binding, to an HLA protein encoded by HLA-A*29:02. In another example, the one or more polypeptides binds, or is capable of binding, to an HLA protein encoded by HLA-A*02:03. In another example, the one or more polypeptides binds, or is capable of binding, to an HLA protein encoded by HLA-A*30:02. In another example, the one or more polypeptides binds, or is capable of binding, to an HLA protein encoded by HLA-A*32:01. In another example, the one or more polypeptides binds, or is capable of binding, to an HLA protein encoded by HLA-A*68:02. In another example, the one or more polypeptides binds, or is capable of binding, to an HLA protein encoded by HLA-A*02:05. In another example, the one or more polypeptides binds, or is capable of binding, to an HLA protein encoded by HLA-A*02:02. In another example, the one or more polypeptides binds, or is capable of binding, to an HLA protein encoded by HLA-A*36:01. In another example, the one or more polypeptides binds, or is capable of binding, to an HLA protein encoded by HLA-A*02:11. In another example, the one or more polypeptides binds, or is capable of binding, to an HLA protein encoded by HLA-A*02:04. In another example, the one or more polypeptides binds, or is capable of binding, to an HLA protein encoded by HLA-B*35:01. In another example, the one or more polypeptides binds, or is capable of binding, to an HLA protein encoded by HLA-B*51:01. In another example, the one or more polypeptides binds, or is capable of binding, to an HLA protein encoded by HLA-B*40:01. In another example, the one or more polypeptides binds, or is capable of binding, to an HLA protein encoded by HLA-B*40:02. In another example, the one or more polypeptides binds, or is capable of binding, to an HLA protein encoded by HLA-B*07:02. In another example, the one or more polypeptides binds, or is capable of binding, to an HLA protein encoded by HLA-B*07:04. In another example, the one or more polypeptides binds, or is capable of binding, to an HLA protein encoded by HLA-B*08:01. In another example, the one or more polypeptides binds, or is capable of binding, to an HLA protein encoded by HLA-B*13:01. In another example, the one or more polypeptides binds, or is capable of binding, to an HLA protein encoded by HLA-B*46:01. In another example, the one or more polypeptides binds, or is capable of binding, to an HLA protein encoded by HLA-B*52:01. In another example, the one or more polypeptides binds, or is capable of binding, to an HLA protein encoded by HLA-B*44:02. In another example, the one or more polypeptides binds, or is capable of binding, to an HLA protein encoded by HLA-B*40:06. In another example, the one or more polypeptides binds, or is capable of binding, to an HLA protein encoded by HLA-B*13:02. In another example, the one or more polypeptides binds, or is capable of binding, to an HLA protein encoded by HLA-B*56:01. In another example, the one or more polypeptides binds, or is capable of binding, to an HLA protein encoded by HLA-B*54:01. In another example, the one or more polypeptides binds, or is capable of binding, to an HLA protein encoded by HLA-B*15:02. In another example, the one or more polypeptides binds, or is capable of binding, to an HLA protein encoded by HLA-B*35:07. In another example, the one or more polypeptides binds, or is capable of binding, to an HLA protein encoded by HLA-B*27:05. In another example, the one or more polypeptides binds, or is capable of binding, to an HLA protein encoded by HLA-B*15:03. In another example, the one or more polypeptides binds, or is capable of binding, to an HLA protein encoded by HLA-B*42:01. In another example, the one or more polypeptides binds, or is capable of binding, to an HLA protein encoded by HLA-B*55:02. In another example, the one or more polypeptides binds, or is capable of binding, to an HLA protein encoded by HLA-B*45:01. In another example, the one or more polypeptides binds, or is capable of binding, to an HLA protein encoded by HLA-B*50:01. In another example, the one or more polypeptides binds, or is capable of binding, to an HLA protein encoded by HLA-B*35:03. In another example, the one or more polypeptides binds, or is capable of binding, to an HLA protein encoded by HLA-B*49:01. In another example, the one or more polypeptides binds, or is capable of binding, to an HLA protein encoded by HLA-B*58:02. In another example, the one or more polypeptides binds, or is capable of binding, to an HLA protein encoded by HLA-B*15:17. In another example, the one or more polypeptides binds, or is capable of binding, to an HLA protein encoded by HLA-C*57:02. In another example, the one or more polypeptides binds, or is capable of binding, to an HLA protein encoded by HLA-C*04:01. In another example, the one or more polypeptides binds, or is capable of binding, to an HLA protein encoded by HLA-C*03:04. In another example, the one or more polypeptides binds, or is capable of binding, to an HLA protein encoded by HLA-C*01:02. In another example, the one or more polypeptides binds, or is capable of binding, to an HLA protein encoded by HLA-C*07:01. In another example, the one or more polypeptides binds, or is capable of binding, to an HLA protein encoded by HLA-C*06:02. In another example, the one or more polypeptides binds, or is capable of binding, to an HLA protein encoded by HLA-C*03:03. In another example, the one or more polypeptides binds, or is capable of binding, to an HLA protein encoded by HLA-C*08:01. In another example, the one or more polypeptides binds, or is capable of binding, to an HLA protein encoded by HLA-C*15:02. In another example, the one or more polypeptides binds, or is capable of binding, to an HLA protein encoded by HLA-C*12:02. In another example, the one or more polypeptides binds, or is capable of binding, to an HLA protein encoded by HLA-C*02:02. In another example, the one or more polypeptides binds, or is capable of binding, to an HLA protein encoded by HLA-C*05:01. In another example, the one or more polypeptides binds, or is capable of binding, to an HLA protein encoded by HLA-C*03:02. In another example, the one or more polypeptides binds, or is capable of binding, to an HLA protein encoded by HLA-C*16:01. In another example, the one or more polypeptides binds, or is capable of binding, to an HLA protein encoded by HLA-C*08:02. In another example, the one or more polypeptides binds, or is capable of binding, to an HLA protein encoded by HLA-C*04:03. In another example, the one or more polypeptides binds, or is capable of binding, to an HLA protein encoded by HLA-C*17:01. In another example, the one or more polypeptides binds, or is capable of binding, to an HLA protein encoded by HLA-C*17:04.

[0136] In some embodiments, the proteins encoded by HLA alleles include HLA proteins encoded by HLA-DR, HLA-DQ, HLA-DM, or HLA-DP. In another example, the one or more polypeptides of the present invention binds, or is capable of binding, to an HLA protein encoded by HLA-DR, HLA-DQ, HLA-DM, or HLA-DP.

### Sizes of Polynucleotides and Polypeptides

[0137] In some embodiments, the polynucleotides may be any length reasonable to encode an epitope. In some embodiments, the polynucleotides range in length from about 10 to about 200 or more polynucleotides. In some embodiments, the polynucleotides in length from 10, 11, 12, 13, 14, 15, 16, 17, 18, 19, 20, 21, 22, 23, 24, 25, 26, 27, 28, 29, 30, 31, 32, 33, 34, 35, 36, 37, 38, 39, 40, 41, 42, 43, 44, 45, 46, 47, 48, 49, 50, 51, 52, 53, 54, 55, 56, 57, 58, 59, 60, 61, 62, 63, 64, 65, 66, 67, 68, 69, 70, 71, 72, 73, 74, 75, 76, 77, 78, 79, 80, 81, 82, 83, 84, 85, 86, 87, 88, 89, 90, 91, 92, 93, 94, 95, 96, 97, 98, 99, 100, 101, 102, 103, 104, 105, 106, 107, 108, 109, 110, 111, 112, 113, 114, 115, 116, 117, 118, 119, 120, 121, 122, 123, 124, 125, 126, 127, 128, 129, 130, 131, 132, 133, 134, 135, 136, 137, 138, 139, 140, 141, 142, 143, 144,145, 146, 147, 148, 149, 150, 151, 152, 153, 154, 155, 156, 157, 158, 159, 160, 161, 162, 163, 164, 165, 166, 167, 168, 169, 170, 171, 172, 173, 174, 175, 176, 177, 178, 179, 180, 181, 182, 183, 184, 185, 186, 187, 188, 189, 190, 191, 192, 193, 194, 195, 196, 197, 198, 199, to/or 200 nucleotides in length.

[0138] In some embodiments, the polypeptides may be any length that is reasonable for an epitope. For example, the polypeptides may have a size of from 5 to 30 or more, e.g., from 5 to 25, from 5 to 20, from 5 to 15, from 5 to 10, from 6 to 10, from 7 to 9, or from 8 to 9 amino acids. For example, the polypeptides may have 5, 6, 7, 8, 9, 10, 11, 12, 13, 14, or 15 amino acids. In some embodiments, the optimal length of a polypeptide may be determined based the immunogenicity of the polypeptides of different lengths when introduced to a cell or subject.

### Modifications on Polypeptides

[0139] In some embodiments, polypeptides of the present invention herein may comprise one or more modifications (e.g., post-translational modifications). In some cases, the polypeptides may comprise cysteinylated Cysteine. Other examples of modifications include ubiquitination, phosphorylation, sulfonation, glycosylation, acetylation, methylation, ADP-ribosylation, methionine oxidation, cysteine oxidation, cysteine lipidation, farnesylation, geranylation, pyroglutamation, and deamidation. In some embodiments, the polypeptide comprises one or more (e.g., 1, 2, 3, 4, 5, 6, 7, 8, 9, 10, or more) amino acids that are each independently modified with an ubiquitination, phosphorylation, sulfonation, glycosylation, acetylation, methylation, ADP-ribosylation, methionine oxidation, cysteine oxidation, cysteine lipidation, farnesylation, geranylation, pyroglutamation, or deamidation.

Synthetic mRNA

[0140] In some embodiments, the polynucleotide of the present invention is mRNA, e.g., synthetic mRNA. In some embodiments, the synthetic mRNA may comprise coding sequence(s) for one or more polypeptides herein. In some embodiments, the synthetic mRNA is encoded by a polynucleotide of SEQ ID NOS: 1-9890 or SEQ ID NOS: 9891-16277 and/or identified using a method of the present invention described elsewhere herein. A synthetic mRNA may be an mRNA produced through an in vitro transcription reaction or through artificial (non-natural) chemical synthesis or through a combination thereof. In some embodiments, the synthetic mRNA further comprises a poly A tail, a Kozak sequence, a 3′ untranslated region, a 5′ untranslated region, or any combination thereof. Poly A tails in particular can be added to a synthetic RNA using a variety of art-recognized techniques, e.g., using poly A polymerase, using transcription directly from PCR products, or by ligating to the 3′ end of a synthetic RNA with RNA ligase.

[0141] The synthetic mRNA may comprise one or more stabilizing elements that maintain or enhance the stabilities of mRNA, e.g., reducing or preventing degradation of the mRNA. Examples of stabilizing elements include untranslated regions (UTR) at their 5′-end (5′UTR) and/or at their 3′-end (3′UTR), in addition to other structural features, such as a 5′-cap structure or a 3′-poly(A) tail. The stabilizing elements may be a histone stem-loop, e.g., a histone stem loop added by a stem-loop binding protein (SLBP).

### Delivery Vehicles

[0142] Described in certain example embodiments herein delivery vehicles, including but not limited to, vectors and virus particles that can deliver a polynucleotide and/or polypeptide of the present invention, which is also generally referred to as “cargo” in this context. It will be appreciated that other molecules can also be included as cargo. The delivery vehicles may deliver the cargo into cells, tissues, organs, or organisms (e.g., animals or plants). The cargos may be packaged, carried, or otherwise associated with the delivery vehicles. The delivery vehicles may be selected based on the types of cargo to be delivered, and/or the delivery is in vitro and/or in vivo. Examples of delivery vehicles include vectors, viruses (e.g., virus particles), non-viral vehicles, and other delivery reagents described herein.

[0143] The delivery vehicles described herein can have a greatest dimension or greatest average dimension (e.g., diameter or greatest average diameter) of less than 100 microns (μm). In some embodiments, the delivery vehicles have a greatest dimension or greatest average dimension of less than 10 μm. In some embodiments, the delivery vehicles may have a greatest dimension or greatest average dimension of less than 2000 nanometers (nm). In some embodiments, the delivery vehicles may have a greatest dimension or greatest average dimension of less than 1000 nanometers (nm). In some embodiments, the delivery vehicles may have a greatest dimension or greatest average dimension (e.g., diameter or average diameter) of less than 900 nm, less than 800 nm, less than 700 nm, less than 600 nm, less than 500 nm, less than 400 nm, less than 300 nm, less than 200 nm, less than 150 nm, or less than 100 nm, less than 50 nm. In some embodiments, the delivery vehicles may have a greatest dimension or greatest average dimension ranging between 25 nm and 200 nm.

[0144] In some embodiments, the delivery vehicles may be or comprise particles. For example, the delivery vehicle may be or comprise nanoparticles (e.g., particles with a greatest dimension or greatest average dimension (e.g., diameter or greatest average diameter) no greater than 1000 nm. The particles may be provided in different forms, e.g., as solid particles (e.g., metal such as silver, gold, iron, titanium), non-metal, lipid-based solids, polymers), suspensions of particles, or combinations thereof. Metal, dielectric, and semiconductor particles may be prepared, as well as hybrid structures (e.g., core-shell particles).

[0145] In some embodiments, the delivery vehicles are nanoparticles. Exemplary nanoparticles are described in WO 2008042156, US 20130185823, and WO2015089419. In general, a “nanoparticle” refers to any particle having a diameter of less than 1000 nm. In certain embodiments, nanoparticles of the invention have a greatest dimension or greatest average dimension (e.g., diameter or average diameter) of 500 nm or less. In other embodiments, nanoparticles of the invention have a greatest dimension or greatest average dimension ranging between 25 nm and 200 nm. In other embodiments, nanoparticles of the invention have a greatest dimension or greatest average dimension of 100 nm or less. In other embodiments, nanoparticles of the invention have a greatest dimension or greatest average dimensions ranging between 35 nm and 60 nm. It will be appreciated that reference made herein to particles or nanoparticles can be interchangeable, where appropriate. Nanoparticles made of semiconducting material may also be labeled quantum dots if they are small enough (typically sub 10 nm) that quantization of electronic energy levels occurs. Such nanoscale particles are used in biomedical applications as drug carriers or imaging agents and may be adapted for similar purposes in the present invention. Semi-solid and soft nanoparticles have been manufactured, and are within the scope of the present invention. Nanoparticles with one half hydrophilic and the other half hydrophobic are termed Janus particles and are particularly effective for stabilizing emulsions. They can self-assemble at water/oil interfaces and act as solid surfactants.

[0146] Particle characterization (including e.g., characterizing morphology, dimension, etc.) is done using a variety of different techniques. Common techniques are electron microscopy (TEM, SEM), atomic force microscopy (AFM), dynamic light scattering (DLS), X-ray photoelectron spectroscopy (XPS), powder X-ray diffraction (XRD), Fourier transform infrared spectroscopy (FTIR), matrix-assisted laser desorption/ionization time-of-flight mass spectrometry(MALDI-TOF), ultraviolet-visible spectroscopy, dual polarization interferometry and nuclear magnetic resonance (NMR). Characterization (dimension measurements) may be made as to native particles (i.e., preloading) or after loading of the cargo (herein cargo refers to e.g., one or more components of CRISPR-Cas system e.g., CRISPR enzyme or mRNA or guide RNA, or any combination thereof, and may include additional carriers and/or excipients) to provide particles of an optimal size for delivery for any in vitro, ex vivo and/or in vivo application of the present invention. In certain preferred embodiments, particle dimension (e.g., diameter) characterization is based on measurements using dynamic laser scattering (DLS). Mention is made of U.S. Pat. Nos. 8,709,843; 6,007,845; 5,855,913; 5,985,309; 5,543,158; and the publication by James E. Dahlman and Carmen Barnes et al. Nature Nanotechnology (2014) published online 11 May 2014, doi:10.1038/nnano.2014.84, describing particles, methods of making and using them and measurements thereof.

### Vectors and Vector Systems

[0147] Also provided herein are vectors that can contain one or more of the polynucleotides of the present invention described elsewhere herein. In certain embodiments, the vector can contain one or more polynucleotides encoding one or more polypeptides, such as a viral polypeptide, of the present invention described elsewhere herein. The vectors can be useful in producing bacterial, fungal, yeast, plant cells, animal cells, and transgenic animals that can express one or more polynucleotides and/or polypeptides of the present invention described elsewhere herein. Within the scope of this disclosure are vectors containing one or more of the polynucleotide sequences described herein. The vectors and/or vector systems can be used, for example, to express one or more of the polynucleotides in a cell, such as a producer cell, to produce virus particles containing one or more polynucleotide(s) of the present invention described elsewhere herein. Other uses for the vectors and vector systems described herein are also within the scope of this disclosure. In general, and throughout this specification, the term “vector” refers to a tool that allows or facilitates the transfer of an entity from one environment to another. In some contexts which will be appreciated by those of ordinary skill in the art, “vector” can be a term of art to refer to a nucleic acid molecule capable of transporting another nucleic acid to which it has been linked. A vector can be a replicon, such as a plasmid, phage, or cosmid, into which another DNA segment may be inserted so as to bring about the replication of the inserted segment. Generally, a vector is capable of replication when associated with the proper control elements.

[0148] Vectors include, but are not limited to, nucleic acid molecules that are single-stranded, double-stranded, or partially double-stranded; nucleic acid molecules that comprise one or more free ends, no free ends (e.g., circular); nucleic acid molecules that comprise DNA, RNA, or both; and other varieties of polynucleotides known in the art. One type of vector is a “plasmid,” which refers to a circular double stranded DNA loop into which additional DNA segments can be inserted, such as by standard molecular cloning techniques. Another type of vector is a viral vector, wherein virally-derived DNA or RNA sequences are present in the vector for packaging into a virus (e.g. retroviruses, replication defective retroviruses, adenoviruses, replication defective adenoviruses, and adeno-associated viruses (AAVs)). Viral vectors also include polynucleotides carried by a virus for transfection into a host cell. Certain vectors are capable of autonomous replication in a host cell into which they are introduced (e.g. bacterial vectors having a bacterial origin of replication and episomal mammalian vectors). Other vectors (e.g., non-episomal mammalian vectors) are integrated into the genome of a host cell upon introduction into the host cell, and thereby are replicated along with the host genome. Moreover, certain vectors are capable of directing the expression of genes to which they are operatively-linked. Such vectors are referred to herein as “expression vectors.” Common expression vectors of utility in recombinant DNA techniques are often in the form of plasmids.

[0149] Recombinant expression vectors can be composed of a nucleic acid (e.g. a polynucleotide) of the invention in a form suitable for expression of the nucleic acid in a host cell, which means that the recombinant expression vectors include one or more regulatory elements, which can be selected on the basis of the host cells to be used for expression, that is operatively-linked to the nucleic acid sequence to be expressed. Within a recombinant expression vector, “operably linked” and “operatively-linked” are used interchangeably herein and further defined elsewhere herein. In the context of a vector, the term “operably linked” is intended to mean that the nucleotide sequence of interest is linked to the regulatory element(s) in a manner that allows for expression of the nucleotide sequence (e.g., in an in vitro transcription/translation system or in a host cell when the vector is introduced into the host cell). Advantageous vectors include lentiviruses and adeno-associated viruses, and types of such vectors can also be selected for targeting particular types of cells. These and other embodiments of the vectors and vector systems are described elsewhere herein.

[0150] In an embodiment, the vector can be a viral vector. In certain embodiments, the viral vector is an is an adeno-associated virus (AAV), adenovirus vector, a retroviral vector, or lentiviral vector.

[0151] These and others are further detailed and described elsewhere herein.

### Cell-Based Vector Amplification and Expression

[0152] Vectors may be introduced and propagated in a prokaryote or prokaryotic cell. In some embodiments, a prokaryote is used to amplify copies of a vector to be introduced into a eukaryotic cell or as an intermediate vector in the production of a vector to be introduced into a eukaryotic cell (e.g., amplifying a plasmid as part of a viral vector packaging system). The vectors can be viral-based or non-viral based. In some embodiments, a prokaryote is used to amplify copies of a vector and express one or more nucleic acids, such as to provide a source of one or more proteins for delivery to a host cell or host organism.

[0153] Vectors can be designed for expression of the polynucleotides and/or polypeptides of the present invention described herein (e.g. nucleic acid transcripts, proteins, enzymes, and combinations thereof) in a suitable host cell. In some embodiments, the suitable host cell is a prokaryotic cell. Suitable host cells include, but are not limited to, bacterial cells, yeast cells, insect cells, and mammalian cells. In some embodiments, the suitable host cell is a eukaryotic cell.

[0154] In some embodiments, the suitable host cell is a suitable bacterial cell. Suitable bacterial cells include but are not limited to bacterial cells from the bacteria of the species Escherichia coli. Many suitable strains of E. coli are known in the art for expression of vectors. These include, but are not limited to Pir1, Stbl2, Stbl3, Stbl4, TOP10, XL1 Blue, and XL10 Gold. In some embodiments, the host cell is a suitable insect cell. Suitable insect cells include those from Spodoptera frugiperda. Suitable strains of S. frugiperda cells include, but are not limited to Sf9 and Sf21. In some embodiments, the host cell is a suitable yeast cell. In some embodiments, the yeast cell can be from Saccharomyces cerevisiae. In some embodiments, the host cell is a suitable mammalian cell. Many types of mammalian cells have been developed to express vectors. Suitable mammalian cells include, but are not limited to, HEK293, Chinese Hamster Ovary Cells (CHOs), mouse myeloma cells, HeLa, U2OS, A549, HT1080, CAD, P19, NIH 3T3, L929, N2a, MCF-7, Y79, SO-Rb50, HepG G2, DIKX-X11, J558L, Baby hamster kidney cells (BHK), and chicken embryo fibroblasts (CEFs). Suitable host cells are discussed further in Goeddel, GENE EXPRESSION TECHNOLOGY: METHODS IN ENZYMOLOGY 185, Academic Press, San Diego, Calif (1990).

[0155] In some embodiments, the vector can be a yeast expression vector. Examples of vectors for expression in yeast Saccharomyces cerevisiae include pYepSec1 (Baldari, et al., 1987. EMBO J. 6: 229-234), pMFa (Kuijan and Herskowitz, 1982. Cell 30: 933-943), pJRY88 (Schultz et al., 1987. Gene 54: 113-123), pYES2 (Invitrogen Corporation, San Diego, Calif.), and picZ (InVitrogen Corp, San Diego, Calif.). As used herein, a “yeast expression vector” refers to a nucleic acid that contains one or more sequences encoding an RNA and/or polypeptide and may further contain any desired elements that control the expression of the nucleic acid(s), as well as any elements that enable the replication and maintenance of the expression vector inside the yeast cell. Many suitable yeast expression vectors and features thereof are known in the art; for example, various vectors and techniques are illustrated in in Yeast Protocols, 2nd edition, Xiao, W., ed. (Humana Press, New York, 2007) and Buckholz, R. G. and Gleeson, M. A. (1991) Biotechnology (NY) 9(11): 1067-72. Yeast vectors can contain, without limitation, a centromeric (CEN) sequence, an autonomous replication sequence (ARS), a promoter, such as an RNA Polymerase III promoter, operably linked to a sequence or gene of interest, a terminator such as an RNA polymerase III terminator, an origin of replication, and a marker gene (e.g., auxotrophic, antibiotic, or other selectable markers). Examples of expression vectors for use in yeast may include plasmids, yeast artificial chromosomes, 2 plasmids, yeast integrative plasmids, yeast replicative plasmids, shuttle vectors, and episomal plasmids.

[0156] In some embodiments, the vector is a baculovirus vector or expression vector and can be suitable for expression of polynucleotides and/or proteins in insect cells. In some embodiments, the suitable host cell is an insect cell. Baculovirus vectors available for expression of proteins in cultured insect cells (e.g., SF9 cells) include the pAc series (Smith, et al., 1983. Mol. Cell. Biol. 3: 2156-2165) and the pVL series (Lucklow and Summers, 1989. Virology 170: 31-39). rAAV (recombinant Adeno-associated viral) vectors are preferably produced in insect cells, e.g., Spodoptera frugiperda Sf9 insect cells, grown in serum-free suspension culture. Serum-free insect cells can be purchased from commercial vendors, e.g., Sigma Aldrich (EX-CELL 405).

[0157] In some embodiments, the vector is a mammalian expression vector. In some embodiments, the mammalian expression vector is capable of expressing one or more polynucleotides and/or polypeptides in a mammalian cell. Examples of mammalian expression vectors include, but are not limited to, pCDM8 (Seed, 1987. Nature 329: 840) and pMT2PC (Kaufman, et al., 1987. EMBO J. 6: 187-195). The mammalian expression vector can include one or more suitable regulatory elements capable of controlling expression of the one or more polynucleotides and/or proteins in the mammalian cell. For example, commonly used promoters are derived from polyoma, adenovirus 2, cytomegalovirus, simian virus 40, and others disclosed herein and known in the art. More detail on suitable regulatory elements are described elsewhere herein.

[0158] For other suitable expression vectors and vector systems for both prokaryotic and eukaryotic cells see, e.g., Chapters 16 and 17 of Sambrook, et al., MOLECULAR CLONING: A LABORATORY MANUAL. 2nd ed., Cold Spring Harbor Laboratory, Cold Spring Harbor Laboratory Press, Cold Spring Harbor, N.Y., 1989.

[0159] In some embodiments, the recombinant mammalian expression vector is capable of directing expression of the nucleic acid preferentially in a particular cell type (e.g., tissue-specific regulatory elements are used to express the nucleic acid). Tissue-specific regulatory elements are known in the art. Non-limiting examples of suitable tissue-specific promoters include the albumin promoter (liver-specific; Pinkert, et al., 1987. Genes Dev. 1: 268-277), lymphoid-specific promoters (Calame and Eaton, 1988. Adv. Immunol. 43: 235-275), in particular promoters of T cell receptors (Winoto and Baltimore, 1989. EMBO J. 8: 729-733) and immunoglobulins (Baneiji, et al., 1983. Cell 33: 729-740; Queen and Baltimore, 1983. Cell 33: 741-748), neuron-specific promoters (e.g., the neurofilament promoter; Byrne and Ruddle, 1989. Proc. Natl. Acad. Sci. USA 86: 5473-5477), pancreas-specific promoters (Edlund, et al., 1985. Science 230: 912-916), and mammary gland-specific promoters (e.g., milk whey promoter; U.S. Pat. No. 4,873,316 and European Application Publication No. 264,166). Developmentally-regulated promoters are also encompassed, e.g., the murine hox promoters (Kessel and Gruss, 1990. Science 249: 374-379) and the α-fetoprotein promoter (Campes and Tilghman, 1989. Genes Dev. 3: 537-546). With regards to these prokaryotic and eukaryotic vectors, mention is made of U.S. Pat. No. 6,750,059, the contents of which are incorporated by reference herein in their entirety. Other embodiments can utilize viral vectors, with regards to which mention is made of U.S. patent application Ser. No. 13/092,085, the contents of which are incorporated by reference herein in their entirety. Tissue-specific regulatory elements are known in the art and in this regard, mention is made of U.S. Pat. No. 7,776,321, the contents of which are incorporated by reference herein in their entirety. In some embodiments, a regulatory element can be operably linked to one or more polynucleotides of the present invention so as to drive expression of the one or more polynucleotides of the present invention described herein.

[0160] In some embodiments, the vector can be a fusion vector or fusion expression vector. In some embodiments, fusion vectors add a number of amino acids to a protein encoded therein, such as to the amino terminus, carboxy terminus, or both of a recombinant protein. Such fusion vectors can serve one or more purposes, such as: (i) to increase expression of recombinant protein; (ii) to increase the solubility of the recombinant protein; and (iii) to aid in the purification of the recombinant protein by acting as a ligand in affinity purification. In some embodiments, expression of polynucleotides (such as non-coding polynucleotides) and proteins in prokaryotes can be carried out in Escherichia coli with vectors containing constitutive or inducible promoters directing the expression of either fusion or non-fusion polynucleotides and/or proteins. In some embodiments, the fusion expression vector can include a proteolytic cleavage site, which can be introduced at the junction of the fusion vector backbone or other fusion moiety and the recombinant polynucleotide or protein to enable separation of the recombinant polynucleotide or protein from the fusion vector backbone or other fusion moiety subsequent to purification of the fusion polynucleotide or protein. Such enzymes, and their cognate recognition sequences, include Factor Xa, thrombin and enterokinase. Example fusion expression vectors include pGEX (Pharmacia Biotech Inc; Smith and Johnson, 1988. Gene 67: 31-40), pMAL (New England Biolabs, Beverly, Mass.) and pRIT5 (Pharmacia, Piscataway, N.J.) that fuse glutathione S-transferase (GST), maltose E binding protein, or protein A, respectively, to the target recombinant protein. Examples of suitable inducible non-fusion E. coli expression vectors include pTrc (Amrann et al., (1988) Gene 69:301-315) and pET lid (Studier et al., GENE EXPRESSION TECHNOLOGY: METHODS IN ENZYMOLOGY 185, Academic Press, San Diego, Calif. (1990) 60-89).

[0161] In some embodiments, one or more vectors driving expression of one or more polynucleotides of the present invention described herein are introduced into a cell, such as a host cell for viral particle production and/or a target cell to which a polypeptide of the present invention is to be expressed.

### Cell-Free Vector and Polynucleotide Expression

[0162] In some embodiments, the polynucleotide encoding one or more polynucleotides of the present invention can be expressed from a vector or suitable polynucleotide in a cell-free in vitro system. In other words, the polynucleotide can be transcribed and optionally translated in vitro. In vitro transcription/translation systems and appropriate vectors are generally known in the art and commercially available. Generally, in vitro transcription and in vitro translation systems replicate the processes of RNA and protein synthesis, respectively, outside of the cellular environment. Vectors and suitable polynucleotides for in vitro transcription can include T7, SP6, T3, promoter regulatory sequences that can be recognized and acted upon by an appropriate polymerase to transcribe the polynucleotide or vector.

[0163] In vitro translation can be stand-alone (e.g., translation of a purified polyribonucleotide) or linked/coupled to transcription. In some embodiments, the cell-free (or in vitro) translation system can include extracts from rabbit reticulocytes, wheat germ, and/or E. coli. The extracts can include various macromolecular components that are needed for translation of exogenous RNA (e.g., 70S or 80S ribosomes, tRNAs, aminoacyl-tRNA, synthetases, initiation, elongation factors, termination factors, etc.). Other components can be included or added during the translation reaction, including but not limited to, amino acids, energy sources (ATP, GTP), energy regenerating systems (creatine phosphate and creatine phosphokinase (eukaryotic systems)) (phosphoenol pyruvate and pyruvate kinase for bacterial systems), and other co-factors (Mg2+, K+, etc.). As previously mentioned, in vitro translation can be based on RNA or DNA starting material. Some translation systems can utilize an RNA template as starting material (e.g., reticulocyte lysates and wheat germ extracts). Some translation systems can utilize a DNA template as a starting material (e.g., E coli-based systems). In these systems transcription and translation are coupled and DNA is first transcribed into RNA, which is subsequently translated. Suitable standard and coupled cell-free translation systems are generally known in the art and are commercially available.

### Vector Features

[0164] The vectors can include additional features that can confer one or more functionalities to the vector, the polynucleotide to be delivered, a virus particle produced there from, or polypeptide expressed thereof. Such features include, but are not limited to, regulatory elements, selectable markers, molecular identifiers (e.g., molecular barcodes), stabilizing elements, and the like. It will be appreciated by those skilled in the art that the design of the expression vector and additional features included can depend on such factors as the choice of the host cell to be transformed, the level of expression desired, etc.

### Regulatory Elements

[0165] In certain embodiments, the polynucleotides and/or vectors thereof described herein (such as the polynucleotides of the present invention, such as a viral polynucleotides of the present invention) can include one or more regulatory elements that can be operatively linked to the polynucleotide. The term “regulatory element” is intended to include promoters, enhancers, internal ribosomal entry sites (IRES), other expression control elements (e.g., transcription termination signals, such as polyadenylation signals and poly-U sequences) and cellular localization signals (e.g., nuclear localization signals). Such regulatory elements are described, for example, in Goeddel, GENE EXPRESSION TECHNOLOGY: METHODS IN ENZYMOLOGY 185, Academic Press, San Diego, Calif (1990). Regulatory elements include those that direct constitutive expression of a nucleotide sequence in many types of host cell and those that direct expression of the nucleotide sequence only in certain host cells (e.g., tissue-specific regulatory sequences). A tissue-specific promoter can direct expression primarily in a desired tissue of interest, such as muscle, neuron, bone, skin, blood, specific organs (e.g., liver, pancreas), or particular cell types (e.g., lymphocytes). Regulatory elements may also direct expression in a temporal-dependent manner, such as in a cell-cycle dependent or developmental stage-dependent manner, which may or may not also be tissue or cell-type specific. In some embodiments, a vector comprises one or more pol III promoter (e.g., 1, 2, 3, 4, 5, or more pol III promoters), one or more pol II promoters (e.g., 1, 2, 3, 4, 5, or more pol II promoters), one or more pol I promoters (e.g., 1, 2, 3, 4, 5, or more pol I promoters), or combinations thereof. Examples of pol III promoters include, but are not limited to, U6 and H1 promoters. Examples of pol II promoters include, but are not limited to, the retroviral Rous sarcoma virus (RSV) LTR promoter (optionally with the RSV enhancer), the cytomegalovirus (CMV) promoter (optionally with the CMV enhancer) (see, e.g., Boshart et al, Cell, 41:521-530 (1985)), the SV40 promoter, the dihydrofolate reductase promoter, the β-actin promoter, the phosphoglycerol kinase (PGK) promoter, and the EF1α promoter. Also encompassed by the term “regulatory element” are enhancer elements, such as WPRE; CMV enhancers; the R-U5′ segment in LTR of HTLV-I (Mol. Cell. Biol., Vol. 8(1), p. 466-472, 1988); SV40 enhancer; and the intron sequence between exons 2 and 3 of rabbit β-globin (Proc. Natl. Acad. Sci. USA., Vol. 78(3), p. 1527-31, 1981).

[0166] In some embodiments, the regulatory sequence can be a regulatory sequence described in U.S. Pat. No. 7,776,321, U.S. Pat. Pub. No. 2011/0027239, and International Patent Publication No. WO 2011/028929, the contents of which are incorporated by reference herein in their entirety. In some embodiments, the vector can contain a minimal promoter. In some embodiments, the minimal promoter is the Mecp2 promoter, tRNA promoter, or U6. In a further embodiment, the minimal promoter is tissue specific. In some embodiments, the length of the vector polynucleotide the minimal promoters and polynucleotide sequences is less than 4.4 Kb.

[0167] To express a polynucleotide, the vector can include one or more transcriptional and/or translational initiation regulatory sequences, e.g., promoters, that direct the transcription of the gene and/or translation of the encoded protein in a cell. In some embodiments a constitutive promoter may be employed. Suitable constitutive promoters for mammalian cells are generally known in the art and include, but are not limited to SV40, CAG, CMV, EF-1α, β-actin, RSV, and PGK. Suitable constitutive promoters for bacterial cells, yeast cells, and fungal cells are generally known in the art, such as a T-7 promoter for bacterial expression and an alcohol dehydrogenase promoter for expression in yeast.

[0168] In some embodiments, the regulatory element can be a regulated promoter. “Regulated promoter” refers to promoters that direct gene expression not constitutively, but in a temporally- and/or spatially-regulated manner, and includes tissue-specific, tissue-preferred and inducible promoters. Regulated promoters include conditional promoters and inducible promoters. In some embodiments, conditional promoters can be employed to direct expression of a polynucleotide in a specific cell type, under certain environmental conditions, and/or during a specific state of development. Suitable tissue specific promoters can include, but are not limited to, liver specific promoters (e.g. APOA2, SERPIN A1 (hAAT), CYP3A4, and MIR122), pancreatic cell promoters (e.g. INS, IRS2, Pdx1, Alx3, Ppy), cardiac specific promoters (e.g. Myh6 (alpha MHC), MYL2 (MLC-2v), TNI3 (cTnl), NPPA (ANF), Slc8a1 (Ncx1)), central nervous system cell promoters (SYN1, GFAP, INA, NES, MOBP, MBP, TH, FOXA2 (HNF3 beta)), skin cell specific promoters (e.g. FLG, K14, TGM3), immune cell specific promoters, (e.g. ITGAM, CD43 promoter, CD14 promoter, CD45 promoter, CD68 promoter), urogenital cell specific promoters (e.g. Pbsn, Upk2, Sbp, Fer114), endothelial cell specific promoters (e.g. ENG), pluripotent and embryonic germ layer cell specific promoters (e.g. Oct4, NANOG, Synthetic Oct4, T brachyury, NES, SOX17, FOXA2, MIR122), and muscle cell specific promoter (e.g. Desmin). Other tissue and/or cell specific promoters are generally known in the art and are within the scope of this disclosure.

[0169] Inducible/conditional promoters can be positively inducible/conditional promoters (e.g. a promoter that activates transcription of the polynucleotide upon appropriate interaction with an activated activator, or an inducer (compound, environmental condition, or other stimulus) or a negative/conditional inducible promoter (e.g. a promoter that is repressed (e.g. bound by a repressor) until the repressor condition of the promotor is removed (e.g. inducer binds a repressor bound to the promoter stimulating release of the promoter by the repressor or removal of a chemical repressor from the promoter environment). The inducer can be a compound, environmental condition, or other stimulus. Thus, inducible/conditional promoters can be responsive to any suitable stimuli such as chemical, biological, or other molecular agents, temperature, light, and/or pH. Suitable inducible/conditional promoters include, but are not limited to, Tet-On, Tet-Off, Lac promoter, pBad, AlcA, LexA, Hsp70 promoter, Hsp90 promoter, pDawn, XVE/OlexA, GVG, and pOp/LhGR.

[0170] Where expression in a plant cell is desired, the components of the CRISPR-Cas system described herein are typically placed under control of a plant promoter, i.e. a promoter operable in plant cells. The use of different types of promoters is envisaged.

[0171] A constitutive plant promoter is a promoter that is able to express the open reading frame (ORF) that it controls in all or nearly all of the plant tissues during all or nearly all developmental stages of the plant (referred to as “constitutive expression”). One non-limiting example of a constitutive promoter is the cauliflower mosaic virus 35S promoter. Different promoters may direct the expression of a gene in different tissues or cell types, or at different stages of development, or in response to different environmental conditions. In particular embodiments, one or more of the polynucleotides of the present invention are expressed under the control of a constitutive promoter, such as the cauliflower mosaic virus 35S promoter issue-preferred promoters can be utilized to target enhanced expression in certain cell types within a particular plant tissue, for instance vascular cells in leaves or roots or in specific cells of the seed. Examples of particular promoters for expression of one or more polynucleotides of the present invention in plants can be found in e.g., Kawamata et al., (1997) Plant Cell Physiol 38:792-803; Yamamoto et al., (1997) Plant J 12:255-65; Hire et al, (1992) Plant Mol Biol 20:207-18, Kuster et al, (1995) Plant Mol Biol 29:759-72, and Capana et al., (1994) Plant Mol Biol 25:681-91.

[0172] Examples of promoters that are inducible and that can allow for spatiotemporal control of gene editing or gene expression may use a form of energy. The form of energy may include but is not limited to sound energy, electromagnetic radiation, chemical energy and/or thermal energy. Examples of inducible systems include tetracycline inducible promoters (Tet-On or Tet-Off), small molecule two-hybrid transcription activations systems (FKBP, ABA, etc.), or light inducible systems (Phytochrome, LOV domains, or cryptochrome)., such as a Light Inducible Transcriptional Effector (LITE) that direct changes in transcriptional activity in a sequence-specific manner. The components of a light inducible system may include one or more polynucleotides of the present invention described herein, a light-responsive cytochrome heterodimer (e.g., from Arabidopsis thaliana), and a transcriptional activation/repression domain. In some embodiments, the vector can include one or more of the inducible DNA binding proteins provided in International Patent Publication No. WO 2014/018423 and US Patent Publication Nos., 2015/0291966, 2017/0166903, 2019/0203212, which describe e.g., embodiments of inducible DNA binding proteins and methods of use and can be adapted for use with the present invention.

[0173] In some embodiments, transient or inducible expression can be achieved by including, for example, chemical-regulated promotors, i.e., whereby the application of an exogenous chemical induces gene expression. Modulation of gene expression can also be obtained by including a chemical-repressible promoter, where application of the chemical represses gene expression. Chemical-inducible promoters include, but are not limited to, the maize ln2-2 promoter, activated by benzene sulfonamide herbicide safeners (De Veylder et al., (1997) Plant Cell Physiol 38:568-77), the maize GST promoter (GST-ll-27, WO93/01294), activated by hydrophobic electrophilic compounds used as pre-emergent herbicides, and the tobacco PR-1 a promoter (Ono et al., (2004) Biosci Biotechnol Biochem 68:803-7) activated by salicylic acid. Promoters which are regulated by antibiotics, such as tetracycline-inducible and tetracycline-repressible promoters (Gatz et al., (1991) Mol Gen Genet 227:229-37; U.S. Pat. Nos. 5,814,618 and 5,789,156) can also be used herein.

[0174] In some embodiments, the polynucleotide, vector or system thereof can include one or more elements capable of translocating and/or expressing one or more polynucleotides of the present invention to/in a specific cell component or organelle. Such organelles can include, but are not limited to, nucleus, ribosome, endoplasmic reticulum, Golgi apparatus, chloroplast, mitochondria, vacuole, lysosome, cytoskeleton, plasma membrane, cell wall, peroxisome, centrioles, etc. Such regulatory elements can include, but are not limited to, nuclear localization signals (examples of which are described in greater detail elsewhere herein), any such as those that are annotated in the LocSigDB database (see e.g., http://genome.unmc.edu/LocSigDB/ and Negi et al., 2015. Database. 2015: bav003; doi: 10.1093/database/bav003), nuclear export signals (e.g., LXXXLXXLXL and others described elsewhere herein), endoplasmic reticulum localization/retention signals (e.g., KDEL, KDXX, KKXX, KXX, and others described elsewhere herein; and see e.g. Liu et al. 2007 Mol. Biol. Cell. 18(3):1073-1082 and Gorleku et al., 2011. J. Biol. Chem. 286:39573-39584), mitochondria (see e.g., Cell Reports. 22:2818-2826, particularly at FIG. 2; Doyle et al. 2013. PLoS ONE 8, e67938; Funes et al. 2002. J. Biol. Chem. 277:6051-6058; Matouschek et al. 1997. PNAS USA 85:2091-2095; Oca-Cossio et al., 2003. 165:707-720; Waltner et al., 1996. J. Biol. Chem. 271:21226-21230; Wilcox et al., 2005. PNAS USA 102:15435-15440; Galanis et al., 1991. FEBS Lett 282:425-430, peroxisome (e.g. (S/A/C)-(K/R/H)-(L/A), SLK, (R/K)-(L/V/I)-XXXXX-(H/Q)-(L/A/F). Suitable protein targeting motifs can also be designed or identified using any suitable database or prediction tool, including but not limited to Minimotif Miner (http:minimotifminer.org, http://mitominer.mrc-mbu.cam.ac.uk/release-4.0/embodiment.do?name=Protein %20MTS), LocDB (see above), PTSs predictor ( ), TargetP-2.0 (http://www.cbs.dtu.dk/services/TargetP/), ChloroP (http://www.cbs.dtu.dk/services/ChloroP/); NetNES (http://www.cbs.dtu.dk/services/NetNES/), Predotar (https://urgi.versailles.inra.fr/predotar/), and SignalP (http://www.cbs.dtu.dk/services/SignalP/).

### Selectable Markers and Tags

[0175] One or more of the polynucleotides of the present invention can be operably linked, fused to, or otherwise modified to include a polynucleotide that encodes or is a selectable marker or tag, which can be a polynucleotide or polypeptide. In some embodiments, the polynucleotide encoding a polypeptide selectable marker can be incorporated with the polynucleotide of the present invention, such as a viral polynucleotide, such that the selectable marker polypeptide, when translated, is inserted between two amino acids between the N- and C-terminus of the polypeptide of the present invention or is present at the N- and/or C-terminus of the polypeptide of the present invention. In some embodiments, the selectable marker or tag is a polynucleotide barcode or unique molecular identifier (UMI).

[0176] It will be appreciated that the polynucleotide encoding such selectable markers or tags can be incorporated into a polynucleotide encoding one or more polypeptides of the present invention, such as a viral polypeptide, described herein in an appropriate manner to allow expression of the selectable marker or tag. Such techniques and methods are described elsewhere herein and will be instantly appreciated by one of ordinary skill in the art in view of this disclosure. Many such selectable markers and tags are generally known in the art and are intended to be within the scope of this disclosure.

[0177] Suitable selectable markers and tags include, but are not limited to, affinity tags, such as chitin binding protein (CBP), maltose binding protein (MBP), glutathione-S-transferase (GST), poly(His) tag; solubilization tags such as thioredoxin (TRX) and poly(NANP), MBP, and GST; chromatography tags such as those consisting of polyanionic amino acids, such as FLAG-tag; epitope tags such as V5-tag, Myc-tag, HA-tag and NE-tag; protein tags that can allow specific enzymatic modification (such as biotinylation by biotin ligase) or chemical modification (such as reaction with FlAsH-EDT2 for fluorescence imaging), DNA and/or RNA segments that contain restriction enzyme or other enzyme cleavage sites; DNA segments that encode products that provide resistance against otherwise toxic compounds including antibiotics, such as, spectinomycin, ampicillin, kanamycin, tetracycline, Basta, neomycin phosphotransferase II (NEO), hygromycin phosphotransferase (HPT)) and the like; DNA and/or RNA segments that encode products that are otherwise lacking in the recipient cell (e.g., tRNA genes, auxotrophic markers); DNA and/or RNA segments that encode products which can be readily identified (e.g., phenotypic markers such as β-galactosidase, GUS; fluorescent proteins such as green fluorescent protein (GFP), cyan (CFP), yellow (YFP), red (RFP), luciferase, and cell surface proteins); polynucleotides that can generate one or more new primer sites for PCR (e.g., the juxtaposition of two DNA sequences not previously juxtaposed), DNA sequences not acted upon or acted upon by a restriction endonuclease or other DNA modifying enzyme, chemical, etc.; epitope tags (e.g. GFP, FLAG- and His-tags), and, DNA sequences that make a molecular barcode or unique molecular identifier (UMI), DNA sequences required for a specific modification (e.g., methylation) that allows its identification. Other suitable markers will be appreciated by those of skill in the art.

[0178] Selectable markers and tags can be operably linked to one or more polypeptides of the present invention herein via suitable linker, such as a glycine or glycine serine linkers as short as GS or GG up to (GGGGG)₃ (SEQ ID NO: 16303) or (GGGGS)₃ (SEQ ID NO: 16304). Other suitable linkers are described elsewhere herein.

[0179] The vector or vector system can include one or more polynucleotides encoding one or more targeting moieties. In some embodiments, the targeting moiety encoding polynucleotides can be included in the vector or vector system, such as a viral vector system, such that they are expressed within and/or on the virus particle(s) produced such that the virus particles can be targeted to specific cells, tissues, organs, etc. In some embodiments, the targeting moiety encoding polynucleotides can be included in the vector or vector system such that the polynucleotide(s) and/or products expressed therefrom (e.g., polypeptides) include the targeting moiety and can be targeted to specific cells, tissues, organs, etc. In some embodiments, such as non-viral carriers, the targeting moiety can be attached to the carrier (e.g., polymer, lipid, inorganic molecule etc.) and can be capable of targeting the carrier and any attached or associated polynucleotide(s) and/or polypeptides of the present invention to specific cells, tissues, organs, etc.

### Codon Optimization of Vector Polynucleotides

[0180] As described elsewhere herein, the polynucleotide encoding one or more polypeptides of the present invention described herein can be codon optimized. In some embodiments, one or more polynucleotides contained in a vector (“vector polynucleotides”) described herein that are in addition to an optionally codon optimized polynucleotide encoding one or more polypeptides of the present invention, such as viral polypeptides, described herein can be codon optimized. In general, codon optimization refers to a process of modifying a nucleic acid sequence for enhanced expression in the host cells of interest by replacing at least one codon (e.g., about or more than about 1, 2, 3, 4, 5, 10, 15, 20, 25, 50, or more codons) of the native sequence with codons that are more frequently or most frequently used in the genes of that host cell while maintaining the native amino acid sequence. Various species exhibit particular bias for certain codons of a particular amino acid. Codon bias (differences in codon usage between organisms) often correlates with the efficiency of translation of messenger RNA (mRNA), which is in turn believed to be dependent on, among other things, the properties of the codons being translated and the availability of particular transfer RNA (tRNA) molecules. The predominance of selected tRNAs in a cell is generally a reflection of the codons used most frequently in peptide synthesis. Accordingly, genes can be tailored for optimal gene expression in a given organism based on codon optimization. Codon usage tables are readily available, for example, at the “Codon Usage Database” available at www.kazusa.orjp/codon/and these tables can be adapted in a number of ways. See Nakamura, Y., et al. “Codon usage tabulated from the international DNA sequence databases: status for the year 2000” Nucl. Acids Res. 28:292 (2000). Computer algorithms for codon optimizing a particular sequence for expression in a particular host cell are also available, such as Gene Forge (Aptagen; Jacobus, PA), are also available. In some embodiments, one or more codons (e.g., 1, 2, 3, 4, 5, 10, 15, 20, 25, 50, or more, or all codons) in a sequence encoding a DNA/RNA-targeting Cas protein corresponds to the most frequently used codon for a particular amino acid. As to codon usage in yeast, reference is made to the online Yeast Genome database available at http://www.yeastgenome.org/community/codon_usage.shtml, or Codon selection in yeast, Bennetzen and Hall, J Biol Chem. 1982 Mar. 25; 257(6):3026-31. As to codon usage in plants including algae, reference is made to Codon usage in higher plants, green algae, and cyanobacteria, Campbell and Gowri, Plant Physiol. 1990 January; 92(1): 1-11.; as well as Codon usage in plant genes, Murray et al, Nucleic Acids Res. 1989 Jan. 25; 17(2):477-98; or Selection on the codon bias of chloroplast and cyanelle genes in different plant and algal lineages, Morton B R, J Mol Evol. 1998 April; 46(4):449-59.

[0181] The vector polynucleotide can be codon optimized for expression in a specific cell-type, tissue type, organ type, and/or subject type. In some embodiments, a codon optimized sequence is a sequence optimized for expression in a eukaryote, e.g., humans (i.e., being optimized for expression in a human or human cell), or for another eukaryote, such as another animal (e.g. a mammal or avian) as is described elsewhere herein. Such codon optimized sequences are within the ambit of the ordinary skilled artisan in view of the description herein. In some embodiments, the polynucleotide is codon optimized for a specific cell type. Such cell types can include, but are not limited to, epithelial cells (including skin cells, cells lining the gastrointestinal tract, cells lining other hollow organs), nerve cells (nerves, brain cells, spinal column cells, nerve support cells (e.g. astrocytes, glial cells, Schwann cells etc.), muscle cells (e.g. cardiac muscle, smooth muscle cells, and skeletal muscle cells), connective tissue cells (fat and other soft tissue padding cells, bone cells, tendon cells, cartilage cells), blood cells, stem cells and other progenitor cells, immune system cells, germ cells, and combinations thereof. Such codon optimized sequences are within the ambit of the ordinary skilled artisan in view of the description herein. In some embodiments, the polynucleotide is codon optimized for a specific tissue type. Such tissue types can include, but are not limited to, muscle tissue, connective tissue, connective tissue, nervous tissue, and epithelial tissue. Such codon optimized sequences are within the ambit of the ordinary skilled artisan in view of the description herein. In some embodiments, the polynucleotide is codon optimized for a specific organ. Such organs include, but are not limited to, muscles, skin, intestines, liver, spleen, brain, lungs, stomach, heart, kidneys, gallbladder, pancreas, bladder, thyroid, bone, blood vessels, blood, and combinations thereof. Such codon optimized sequences are within the ambit of the ordinary skilled artisan in view of the description herein.

[0182] In some embodiments, a vector polynucleotide is codon optimized for expression in particular cells, such as prokaryotic or eukaryotic cells. The eukaryotic cells may be those of or derived from a particular organism, such as a plant or a mammal, including but not limited to human, or non-human eukaryote or animal or mammal as discussed herein, e.g., mouse, rat, rabbit, dog, livestock, or non-human mammal or primate.

### Vector Construction

[0183] The vectors described herein can be constructed using any suitable process or technique. In some embodiments, one or more suitable recombination and/or cloning methods or techniques can be used to the vector(s) described herein. Suitable recombination and/or cloning techniques and/or methods can include, but not limited to, those described in U.S. Patent Publication No. US 2004/0171156 A1. Other suitable methods and techniques are described elsewhere herein.

[0184] Construction of recombinant AAV vectors are described in a number of publications, including U.S. Pat. No. 5,173,414; Tratschin et al., Mol. Cell. Biol. 5:3251-3260 (1985); Tratschin, et al., Mol. Cell. Biol. 4:2072-2081 (1984); Hermonat & Muzyczka, PNAS 81:6466-6470 (1984); and Samulski et al., J. Virol. 63:03822-3828 (1989). Any of the techniques and/or methods can be used and/or adapted for constructing an AAV or other vector described herein. nAAV vectors are discussed elsewhere herein.

[0185] In some embodiments, a vector comprises one or more insertion sites, such as a restriction endonuclease recognition sequence (also referred to as a “cloning site”). In some embodiments, one or more insertion sites (e.g., about or more than about 1, 2, 3, 4, 5, 6, 7, 8, 9, 10, or more insertion sites) are located upstream and/or downstream of one or more sequence elements of one or more vectors. When multiple different guide polynucleotides are used, a single expression construct may be used to target nucleic acid-targeting activity to multiple different, corresponding target sequences within a cell. For example, a single vector may comprise about or more than about 1, 2, 3, 4, 5, 6, 7, 8, 9, 10, 15, 20, or more guide s polynucleotides. In some embodiments, about or more than about 1, 2, 3, 4, 5, 6, 7, 8, 9, 10, or more such guide-polynucleotide-containing vectors may be provided, and optionally delivered to a cell.

[0186] Delivery vehicles, vectors, particles, nanoparticles, formulations and components thereof for expression of one or more polynucleotides and/or polypeptides of the present invention, such as one or more viral polynucleotides and/or polypeptides, described herein are as used in the foregoing documents, such as International Patent Publication No. WO 2014/093622 (PCT/US2013/074667) and are discussed in greater detail herein.

### Viral Vectors

[0187] In some embodiments, the vector is a viral vector. The term of art “viral vector” and as used herein in this context refers to polynucleotide based vectors that contain one or more elements from or based upon one or more elements of a virus that can be capable of expressing and packaging a polynucleotide, such as a viral polynucleotide of the present invention, into a virus particle and producing said virus particle when used alone or with one or more other viral vectors (such as in a viral vector system). Viral vectors and systems thereof can be used for producing viral particles for delivery of and/or expression of one or more polynucleotides and/or polypeptides of the present invention described herein. The viral vector can be part of a viral vector system involving multiple vectors. In some embodiments, systems incorporating multiple viral vectors can increase the safety of these systems. Suitable viral vectors can include retroviral-based vectors, lentiviral-based vectors, adenoviral-based vectors, adeno associated vectors, helper-dependent adenoviral (HdAd) vectors, hybrid adenoviral vectors, herpes simplex virus-based vectors, poxvirus-based vectors, and Epstein-Barr virus-based vectors. Other embodiments of viral vectors and viral particles produce therefrom are described elsewhere herein. In some embodiments, the viral vectors are configured to produce replication incompetent viral particles for improved safety of these systems.

[0188] In certain embodiments, the virus structural component, which can be encoded by one or more polynucleotides in a viral vector or vector system, comprises one or more capsid proteins including an entire capsid. In certain embodiments, such as wherein a viral capsid comprises multiple copies of different proteins, the delivery system can provide one or more of the same protein or a mixture of such proteins. For example, AAV comprises three (3) capsid proteins, VP1, VP2, and VP3, thus delivery systems of the invention can comprise one or more of VP1, and/or one or more of VP2, and/or one or more of VP3. Accordingly, the present invention is applicable to a virus within the family Adenoviridae, such as Atadenovirus, e.g., Ovine atadenovirus D, Aviadenovirus, e.g., Fowl aviadenovirus A, Ichtadenovirus, e.g., Sturgeon ichtadenovirus A, Mastadenovirus (which includes adenoviruses such as all human adenoviruses), e.g., Human mastadenovirus C, and Siadenovirus, e.g., Frog siadenovirus A. Thus, a virus within the family Adenoviridae is contemplated as within the invention with discussion herein as to adenovirus applicable to other family members. Target-specific AAV capsid variants can be used or selected. Non-limiting examples include capsid variants selected to bind to chronic myelogenous leukemia cells, human CD34 PBPC cells, breast cancer cells, cells of lung, heart, dermal fibroblasts, melanoma cells, stem cell, glioblastoma cells, coronary artery endothelial cells and keratinocytes. See, e.g., Buning et al, 2015, Current Opinion in Pharmacology 24, 94-104. From teachings herein and knowledge in the art as to modifications of adenovirus (see, e.g., U.S. Pat. Nos. 9,410,129, 7,344,872, 7,256,036, 6,911,199, 6,740,525; Matthews, “Capsid-Incorporation of Antigens into Adenovirus Capsid Proteins for a Vaccine Approach,” Mol Pharm, 8(1): 3-11 (2011)), as well as regarding modifications of AAV, the skilled person can readily obtain a modified adenovirus that has a large payload protein, despite that heretofore it was not expected that such a large protein could be provided on an adenovirus. And as to the viruses related to adenovirus mentioned herein, as well as to the viruses related to AAV mentioned elsewhere herein, the teachings herein as to modifying adenovirus and AAV, respectively, can be applied to those viruses without undue experimentation from this disclosure and the knowledge in the art.

### Retroviral and Lentiviral Vectors

[0189] Retroviral vectors can be composed of cis-acting long terminal repeats with packaging capacity for up to 6-10 kb of foreign sequence. The minimum cis-acting LTRs are sufficient for replication and packaging of the vectors, which are then used to integrate the therapeutic gene into the target cell to provide permanent transgene expression. Suitable retroviral vectors for the CRISPR-Cas systems can include those based upon murine leukemia virus (MuLV), gibbon ape leukemia virus (GaLV), Simian immunodeficiency virus (SIV), human immunodeficiency virus (HIV), and combinations thereof (see, e.g., Buchscher et al., J. Virol. 66:2731-2739 (1992); Johann et al., J. Virol. 66:1635-1640 (1992); Sommnerfelt et al., Virol. 176:58-59 (1990); Wilson et al., J. Virol. 63:2374-2378 (1989); Miller et al., J. Virol. 65:2220-2224 (1991); PCT/US94/05700). Selection of a retroviral gene transfer system may therefore depend on the target tissue.

[0190] The tropism of a retrovirus can be altered by incorporating foreign envelope proteins, expanding the potential target population of target cells. Lentiviral vectors are retroviral vectors that are able to transduce or infect non-dividing cells and are described in greater detail elsewhere herein. A retrovirus can also be engineered to allow for conditional expression of the inserted transgene, such that only certain cell types are infected by the lentivirus.

[0191] Lentiviruses are complex retroviruses that have the ability to infect and express their genes in both mitotic and post-mitotic cells. Advantages of using a lentiviral approach can include the ability to transduce or infect non-dividing cells and their ability to typically produce high viral titers, which can increase efficiency or efficacy of production and delivery. Suitable lentiviral vectors include, but are not limited to, human immunodeficiency virus (HIV)-based lentiviral vectors, feline immunodeficiency virus (FIV)-based lentiviral vectors, simian immunodeficiency virus (SIV)-based lentiviral vectors, Moloney Murine Leukaemia Virus (Mo-HLV), Visna.maedi virus (VMV)-based lentiviral vector, carpine arthritis-encephalitis virus (CAEV)-based lentiviral vector, bovine immune deficiency virus (BIV)-based lentiviral vector, and Equine infectious anemia (EIAV)-based lentiviral vector. In some embodiments, an HIV-based lentiviral vector system can be used. In some embodiments, a FIV-based lentiviral vector system can be used.

[0192] In some embodiments, the lentiviral vector is an EIAV-based lentiviral vector or vector system. EIAV vectors have been used to mediate expression, packaging, and/or delivery in other contexts, such as for ocular gene therapy (see, e.g., Balagaan, J Gene Med 2006; 8: 275-285). In another embodiment, RetinoStat®, (see, e.g., Binley et al., HUMAN GENE THERAPY 23:980-991 (September 2012)), which describes RetinoStat®, an equine infectious anemia virus-based lentiviral gene therapy vector that expresses angiostatic proteins endostatin and angiostatin that is delivered via a subretinal injection for the treatment of the wet form of age-related macular degeneration. Any of these vectors described in these publications can be modified for polynucleotides and/or polypeptides of the present invention described herein.

[0193] In some embodiments, the lentiviral vector or vector system thereof can be a first-generation lentiviral vector or vector system thereof. First-generation lentiviral vectors can contain a large portion of the lentivirus genome, including the gag and pol genes, other additional viral proteins (e.g., VSV-G) and other accessory genes (e.g., vif, vprm vpu, nef, and combinations thereof), regulatory genes (e.g., tat and/or rev) as well as the gene of interest between the LTRs. First generation lentiviral vectors can result in the production of virus particles that can be capable of replication in vivo, which may not be appropriate for some instances or applications.

[0194] In some embodiments, the lentiviral vector or vector system thereof can be a second-generation lentiviral vector or vector system thereof. Second-generation lentiviral vectors do not contain one or more accessory virulence factors and do not contain all components necessary for virus particle production on the same lentiviral vector. This can result in the production of a replication-incompetent virus particle and thus increase the safety of these systems over first-generation lentiviral vectors. In some embodiments, the second-generation vector lacks one or more accessory virulence factors (e.g., vif, vprm, vpu, nef, and combinations thereof). Unlike the first-generation lentiviral vectors, no single second generation lentiviral vector includes all features necessary to express and package a polynucleotide into a virus particle. In some embodiments, the envelope and packaging components are split between two different vectors with the gag, pol, rev, and tat genes being contained on one vector and the envelope protein (e.g., VSV-G) are contained on a second vector. The gene of interest, its promoter, and LTRs can be included on a third vector that can be used in conjunction with the other two vectors (packaging and envelope vectors) to generate a replication-incompetent virus particle.

[0195] In some embodiments, the lentiviral vector or vector system thereof can be a third-generation lentiviral vector or vector system thereof. Third-generation lentiviral vectors and vector systems thereof have increased safety over first- and second-generation lentiviral vectors and systems thereof because, for example, the various components of the viral genome are split between two or more different vectors but used together in vitro to make virus particles, they can lack the tat gene (when a constitutively active promoter is included up-stream of the LTRs), and they can include one or more deletions in the 3′LTR to create self-inactivating (SIN) vectors having disrupted promoter/enhancer activity of the LTR. In some embodiments, a third-generation lentiviral vector system can include (i) a vector plasmid that contains the polynucleotide of interest and upstream promoter that are flanked by the 5′ and 3′ LTRs, which can optionally include one or more deletions present in one or both of the LTRs to render the vector self-inactivating; (ii) a “packaging vector(s)” that can contain one or more genes involved in packaging a polynucleotide into a virus particle that is produced by the system (e.g. gag, pol, and rev) and upstream regulatory sequences (e.g. promoter(s)) to drive expression of the features present on the packaging vector, and (iii) an “envelope vector” that contains one or more envelope protein genes and upstream promoters. In certain embodiments, the third-generation lentiviral vector system can include at least two packaging vectors, with the gag-pol being present on a different vector than the rev gene.

[0196] In some embodiments, self-inactivating lentiviral vectors with an siRNA targeting a common exon shared by HIV tat/rev, a nucleolar-localizing TAR decoy, and an anti-CCR5-specific hammerhead ribozyme (see, e.g., DiGiusto et al. (2010) Sci Transl Med 2:36ra43) can be used/and or adapted to the polypeptides and/or polynucleotides of the present invention described elsewhere herein.

[0197] In some embodiments, the pseudotype and infectivity or tropisim of a lentivirus particle can be tuned by altering the type of envelope protein(s) included in the lentiviral vector or system thereof. As used herein, an “envelope protein” or “outer protein” means a protein exposed at the surface of a viral particle that is not a capsid protein. For example, envelope or outer proteins typically comprise proteins embedded in the envelope of the virus. In some embodiments, a lentiviral vector or vector system thereof can include a VSV-G envelope protein. VSV-G mediates viral attachment to an LDL receptor (LDLR) or an LDLR family member present on a host cell, which triggers endocytosis of the viral particle by the host cell. Because LDLR is expressed by a wide variety of cells, viral particles expressing the VSV-G envelope protein can infect or transduce a wide variety of cell types. Other suitable envelope proteins can be incorporated based on the host cell that a user desires to be infected by a virus particle produced from a lentiviral vector or system thereof described herein and can include, but are not limited to, feline endogenous virus envelope protein (RD 114) (see e.g., Hanawa et al. Molec. Ther. 2002 5(3) 242-251), modified Sindbis virus envelope proteins (see e.g., Morizono et al. 2010. J. Virol. 84(14) 6923-6934; Morizono et al. 2001. J. Virol. 75:8016-8020; Morizono et al. 2009. J. Gene Med. 11:549-558; Morizono et al. 2006 Virology 355:71-81; Morizono et al J. Gene Med. 11:655-663, Morizono et al. 2005 Nat. Med. 11:346-352), baboon retroviral envelope protein (see e.g., Girard-Gagnepain et al. 2014. Blood. 124: 1221-1231); Tupaia paramyxovirus glycoproteins (see e.g., Enkirch T. et al., 2013. Gene Ther. 20:16-23); measles virus glycoproteins (see e.g., Funke et al. 2008. Molec. Ther. 16(8): 1427-1436), rabies virus envelope proteins, MLV envelope proteins, Ebola envelope proteins, baculovirus envelope proteins, filovirus envelope proteins, hepatitis E1 and E2 envelope proteins, gp41 and gp120 of HIV, hemagglutinin, neuraminidase, M2 proteins of influenza virus, and combinations thereof.

[0198] In some embodiments, the tropism of the resulting lentiviral particle can be tuned by incorporating cell targeting peptides into a lentiviral vector such that the cell targeting peptides are expressed on the surface of the resulting lentiviral particle. In some embodiments, a lentiviral vector can contain an envelope protein that is fused to a cell targeting protein (see e.g., Buchholz et al. 2015. Trends Biotechnol. 33:777-790; Bender et al. 2016. PLoS Pathog. 12(e1005461); and Friedrich et al. 2013. Mol. Ther. 2013. 21: 849-859.

[0199] In some embodiments, a split-intein-mediated approach to target lentiviral particles to a specific cell type can be used (see e.g., Chamoun-Emaneulli et al. 2015. Biotechnol. Bioeng. 112:2611-2617, Ramirez et al. 2013. Protein. Eng. Des. Sel. 26:215-233. In these embodiments, a lentiviral vector can contain one half of a splicing-deficient variant of the naturally split intein from Nostoc punctiforme fused to a cell targeting peptide and the same or different lentiviral vector can contain the other half of the split intein fused to an envelope protein, such as a binding-deficient, fusion-competent virus envelope protein. This can result in production of a virus particle from the lentiviral vector or vector system that includes a split intein that can function as a molecular Velcro linker to link the cell-binding protein to the pseudotyped lentivirus particle. This approach can be advantageous for use where surface-incompatibilities can restrict the use of, e.g., cell targeting peptides.

[0200] In some embodiments, a covalent-bond-forming protein-peptide pair can be incorporated into one or more of the lentiviral vectors described herein to conjugate a cell targeting peptide to the virus particle (see e.g., Kasaraneni et al. 2018. Sci. Reports (8) No. 10990). In some embodiments, a lentiviral vector can include an N-terminal PDZ domain of InaD protein (PDZ1) and its pentapeptide ligand (TEFCA) from NorpA, which can conjugate the cell targeting peptide to the virus particle via a covalent bond (e.g., a disulfide bond). In some embodiments, the PDZ1 protein can be fused to an envelope protein, which can optionally be binding deficient and/or fusion competent virus envelope protein and included in a lentiviral vector. In some embodiments, the TEFCA can be fused to a cell targeting peptide and the TEFCA-CPT fusion construct can be incorporated into the same or a different lentiviral vector as the PDZ1-envenlope protein construct. During virus production, specific interaction between the PDZ1 and TEFCA facilitates producing virus particles covalently functionalized with the cell targeting peptide and thus capable of targeting a specific cell-type based upon a specific interaction between the cell targeting peptide and cells expressing its binding partner. This approach can be advantageous for use where surface-incompatibilities can restrict the use of, e.g., cell targeting peptides.

[0201] Lentiviral vectors have been disclosed as in the treatment for Parkinson's Disease, see, e.g., US Patent Publication No. 20120295960 and U.S. Pat. Nos. 7,303,910 and 7,351,585. Lentiviral vectors have also been disclosed for the treatment of ocular diseases, see e.g., US Patent Publication Nos. 20060281180, 20090007284, US20110117189; US20090017543; US20070054961, US20100317109. Lentiviral vectors have also been disclosed for delivery to the brain, see, e.g., US Patent Publication Nos. US20110293571; US20110293571, US20040013648, US20070025970, US20090111106 and U.S. Pat. No. 7,259,015. Any of these systems or a variant thereof can be used to deliver a polynucleotide of the present invention described herein to a cell.

[0202] In some embodiments, a lentiviral vector system can include one or more transfer plasmids. Transfer plasmids can be generated from various other vector backbones and can include one or more features that can work with other retroviral and/or lentiviral vectors in the system that can, for example, improve safety of the vector and/or vector system, increase virial titers, and/or increase or otherwise enhance expression of the desired insert to be expressed and/or packaged into the viral particle. Suitable features that can be included in a transfer plasmid can include, but are not limited to, 5′LTR, 3′LTR, SIN/LTR, origin of replication (Ori), selectable marker genes (e.g., antibiotic resistance genes), Psi (Ψ), RRE (rev response element), cPPT (central polypurine tract), promoters, WPRE (woodchuck hepatitis post-transcriptional regulatory element), SV40 polyadenylation signal, pUC origin, SV40 origin, F1 origin, and combinations thereof.

[0203] In another embodiment, Cocal vesiculovirus envelope pseudotyped retroviral or lentiviral vector particles are contemplated (see, e.g., US Patent Publication No. 20120164118 assigned to the Fred Hutchinson Cancer Research Center). Cocal virus is in the Vesiculovirus genus, and is a causative agent of vesicular stomatitis in mammals. Cocal virus was originally isolated from mites in Trinidad (Jonkers et al., Am. J. Vet. Res. 25:236-242 (1964)), and infections have been identified in Trinidad, Brazil, and Argentina from insects, cattle, and horses. Many of the vesiculoviruses that infect mammals have been isolated from naturally infected arthropods, suggesting that they are vector-borne. Antibodies to vesiculoviruses are common among people living in rural areas where the viruses are endemic and laboratory-acquired; infections in humans usually result in influenza-like symptoms. The Cocal virus envelope glycoprotein shares 71.5% identity at the amino acid level with VSV-G Indiana, and phylogenetic comparison of the envelope gene of vesiculoviruses shows that Cocal virus is serologically distinct from, but most closely related to, VSV-G Indiana strains among the vesiculoviruses. Jonkers et al., Am. J. Vet. Res. 25:236-242 (1964) and Travassos da Rosa et al., Am. J. Tropical Med. & Hygiene 33:999-1006 (1984). The Cocal vesiculovirus envelope pseudotyped retroviral vector particles may include, for example, lentiviral, alpharetroviral, betaretroviral, gammaretroviral, deltaretroviral, and epsilonretroviral vector particles that may comprise retroviral Gag, Pol, and/or one or more accessory protein(s) and a Cocal vesiculovirus envelope protein. In certain embodiments of these embodiments, the Gag, Pol, and accessory proteins are lentiviral and/or gammaretroviral. In some embodiments, a retroviral vector can contain encoding polypeptides for one or more Cocal vesiculovirus envelope proteins such that the resulting viral or pseudoviral particles are Cocal vesiculovirus envelope pseudotyped. Adenoviral vectors, Helper-dependent Adenoviral vectors, and Hybrid Adenoviral Vectors

[0204] In some embodiments, the vector can be an adenoviral vector. In some embodiments, the adenoviral vector can include elements such that the virus particle produced using the vector or system thereof can be serotype 2 or serotype 5. In some embodiments, the polynucleotide to be delivered via the adenoviral particle can be up to about 8 kb. Thus, in some embodiments, an adenoviral vector can include a DNA polynucleotide to be delivered that can range in size from about 0.001 kb to about 8 kb. Adenoviral vectors have been used successfully in several contexts (see e.g., Teramato et al. 2000. Lancet. 355:1911-1912; Lai et al. 2002. DNA Cell. Biol. 21:895-913; Flotte et al., 1996. Hum. Gene. Ther. 7:1145-1159; and Kay et al. 2000. Nat. Genet. 24:257-261.

[0205] In some embodiments, the vector can be a helper-dependent adenoviral vector or system thereof. These are also referred to in the art as “gutless” or “gutted” vectors and are a modified generation of adenoviral vectors (see e.g., Thrasher et al. 2006. Nature. 443:E5-7). In certain embodiments of the helper-dependent adenoviral vector system one vector (the helper) can contain all the viral genes required for replication but contains a conditional gene defect in the packaging domain. The second vector of the system can contain only the ends of the viral genome, one or more polynucleotides of the present invention described elsewhere herein, and the native packaging recognition signal, which can allow selective packaged release from the cells (see e.g., Cideciyan et al. 2009. N Engl J Med. 361:725-727). Helper-dependent adenoviral vector systems have been successful for gene delivery in several contexts (see e.g., Simonelli et al. 2010. J Am Soc Gene Ther. 18:643-650; Cideciyan et al. 2009. N Engl J Med. 361:725-727; Crane et al. 2012. Gene Ther. 19(4):443-452; Alba et al. 2005. Gene Ther. 12:18-S27; Croyle et al. 2005. Gene Ther. 12:579-587; Amalfitano et al. 1998. J. Virol. 72:926-933; and Morral et al. 1999. PNAS. 96:12816-12821). The techniques and vectors described in these publications can be adapted for inclusion and delivery of the polynucleotides of the present invention described herein. In some embodiments, the polynucleotide to be delivered via the viral particle produced from a helper-dependent adenoviral vector or system thereof can be up to about 37 kb. Thus, in some embodiments, an adenoviral vector can include a DNA polynucleotide to be delivered that can range in size from about 0.001 kb to about 37 kb (see e.g. Rosewell et al. 2011. J. Genet. Syndr. Gene Ther. Suppl. 5:001).

[0206] In some embodiments, the vector is a hybrid-adenoviral vector or system thereof. Hybrid adenoviral vectors are composed of the high transduction efficiency of a gene-deleted adenoviral vector and the long-term genome-integrating potential of adeno-associated, retroviruses, lentivirus, and transposon based-gene transfer. In some embodiments, such hybrid vector systems can result in stable transduction and limited integration site. See e.g., Balague et al. 2000. Blood. 95:820-828; Morral et al. 1998. Hum. Gene Ther. 9:2709-2716; Kubo and Mitani. 2003. J. Virol. 77(5): 2964-2971; Zhang et al. 2013. PloS One. 8(10) e76771; and Cooney et al. 2015. Mol. Ther. 23(4):667-674), whose techniques and vectors described therein can be modified and adapted for use for delivering the polynucleotide of the present invention described elsewhere herein. In some embodiments, a hybrid-adenoviral vector can include one or more features of a retrovirus and/or an adeno-associated virus. In some embodiments the hybrid-adenoviral vector can include one or more features of a spuma retrovirus or foamy virus (FV). See e.g., Ehrhardt et al. 2007. Mol. Ther. 15:146-156 and Liu et al. 2007. Mol. Ther. 15:1834-1841, whose techniques and vectors described therein can be modified and adapted for use for delivering one or more polynucleotides of the present invention described herein. Advantages of using one or more features from the FVs in the hybrid-adenoviral vector or system thereof can include the ability of the viral particles produced therefrom to infect a broad range of cells, a large packaging capacity as compared to other retroviruses, and the ability to persist in quiescent (non-dividing) cells. See also e.g., Ehrhardt et al. 2007. Mol. Ther. 156:146-156 and Shuji et al. 2011. Mol. Ther. 19:76-82, whose techniques and vectors described therein can be modified and adapted for use in the CRISPR-Cas system of the present invention.

### Adeno Associated Viral (AAV) Vectors

[0207] In an embodiment, the vector can be an adeno-associated virus (AAV) vector. See, e.g., West et al., Virology 160:38-47 (1987); U.S. Pat. No. 4,797,368; WO 93/24641; Kotin, Human Gene Therapy 5:793-801 (1994); and Muzyczka, J. Clin. Invest. 94:1351 (1994). Although similar to adenoviral vectors in some of their features, AAVs have some deficiency in their replication and/or pathogenicity and thus can be safer that adenoviral vectors. In some embodiments the AAV can integrate into a specific site on chromosome 19 of a human cell with no observable side effects. In some embodiments, the capacity of the AAV vector, system thereof, and/or AAV particles can be up to about 4.7 kb. The AAV vector or system thereof can include one or more regulatory molecules. In some embodiments the regulatory molecules can be promoters, enhancers, repressors and the like, which are described in greater detail elsewhere herein. In some embodiments, the AAV vector or system thereof can include one or more polynucleotides that can encode one or more regulatory proteins. In some embodiments, the one or more regulatory proteins can be selected from Rep78, Rep68, Rep52, Rep40, variants thereof, and combinations thereof.

[0208] The AAV vector or system thereof can include one or more polynucleotides that can encode one or more capsid proteins. The capsid proteins can be selected from VP1, VP2, VP3, and combinations thereof. The capsid proteins can be capable of assembling into a protein shell of the AAV virus particle. In some embodiments, the AAV capsid can contain 60 capsid proteins. In some embodiments, the ratio of VP1:VP2:VP3 in a capsid can be about 1:1:10.

[0209] In some embodiments, the AAV vector or system thereof can include one or more adenovirus helper factors or polynucleotides that can encode one or more adenovirus helper factors. Such adenovirus helper factors can include, but are not limited, E1A, E1B, E2A, E40RF6, and VA RNAs. In some embodiments, a producing host cell line expresses one or more of the adenovirus helper factors.

[0210] The AAV vector or system thereof can be configured to produce AAV particles having a specific serotype. In some embodiments, the serotype can be AAV-1, AAV-2, AAV-3, AAV-4, AAV-5, AAV-6, AAV-8, AAV-9 or any combinations thereof. In some embodiments, the AAV can be AAV1, AAV-2, AAV-5 or any combination thereof. One can select the AAV of the AAV with regard to the cells to be targeted; e.g., one can select AAV serotypes 1, 2, 5 or a hybrid capsid AAV-1, AAV-2, AAV-5 or any combination thereof for targeting brain and/or neuronal cells; and one can select AAV-4 for targeting cardiac tissue; and one can select AAV8 for delivery to the liver. Thus, in some embodiments, an AAV vector or system thereof capable of producing AAV particles capable of targeting the brain and/or neuronal cells can be configured to generate AAV particles having serotypes 1, 2, 5 or a hybrid capsid AAV-1, AAV-2, AAV-5 or any combination thereof. In some embodiments, an AAV vector or system thereof capable of producing AAV particles capable of targeting cardiac tissue can be configured to generate an AAV particle having an AAV-4 serotype. In some embodiments, an AAV vector or system thereof capable of producing AAV particles capable of targeting the liver can be configured to generate an AAV having an AAV-8 serotype. In some embodiments, the AAV vector is a hybrid AAV vector or system thereof. Hybrid AAVs are AAVs that include genomes with elements from one serotype that are packaged into a capsid derived from at least one different serotype. For example, if it is the rAAV2/5 that is to be produced, and if the production method is based on the helper-free, transient transfection method discussed above, the 1st plasmid and the 3rd plasmid (the adeno helper plasmid) will be the same as discussed for rAAV2 production. However, the second plasmid, the pRepCap will be different. In this plasmid, called pRep2/Cap5, the Rep gene is still derived from AAV2, while the Cap gene is derived from AAV5. The production scheme is the same as the above-mentioned approach for AAV2 production. The resulting rAAV is called rAAV2/5, in which the genome is based on recombinant AAV2, while the capsid is based on AAV5. It is assumed the cell or tissue-tropism displayed by this AAV2/5 hybrid virus should be the same as that of AAV5.

[0211] A tabulation of certain AAV serotypes as to these cells can be found in Grimm, D. et al, J. Virol. 82: 5887-5911 (2008). The AAV can be any one of the serotypes.

[0212] In some embodiments, the AAV vector or system thereof is configured as a “gutless” vector, similar to that described in connection with a retroviral vector. In some embodiments, the “gutless” AAV vector or system thereof can have the cis-acting viral DNA elements involved in genome amplification and packaging in linkage with the heterologous sequences of interest (e.g., the CRISPR-Cas system polynucleotide(s)).

[0213] In some embodiments, the AAV vectors are produced in in insect cells, e.g., Spodoptera frugiperda Sf9 insect cells, grown in serum-free suspension culture. Serum-free insect cells can be purchased from commercial vendors, e.g., Sigma Aldrich (EX-CELL 405).

[0214] In some embodiments, an AAV vector or vector system can contain or consists essentially of one or more polynucleotides encoding one or more polynucleotides of the present invention, such as one or more viral polynucleotides.

[0215] In another embodiment, the invention provides a polypeptide of the present invention operatively coupled with Adeno Associated Virus (AAV), e.g., an AAV comprising a polypeptide of the present invention as a fusion, with or without a linker, to or with an AAV capsid protein such as VP1, VP2, and/or VP3. More in particular, modifying the knowledge in the art, e.g., Rybniker et al., “Incorporation of Antigens into Viral Capsids Augments Immunogenicity of Adeno-Associated Virus Vector-Based Vaccines,” J Virol. Dec 2012; 86(24): 13800-13804, Lux K, et al. 2005. Green fluorescent protein-tagged adeno-associated virus particles allow the study of cytosolic and nuclear trafficking. J. Virol. 79:11776-11787, Munch R C, et al. 2012. “Displaying high-affinity ligands on adeno-associated viral vectors enables tumor cell-specific and safe gene transfer.” Mol. Ther. [Epub ahead of print.]doi:10.1038/mt.2012.186 and Warrington K H, Jr, et al. 2004. Adeno-associated virus type 2 VP2 capsid protein is nonessential and can tolerate large peptide insertions at its N terminus. J. Virol. 78:6595-6609, each incorporated herein by reference, one can obtain a modified AAV capsid of the invention. It will be understood by those skilled in the art that the modifications described herein if inserted into the AAV cap gene may result in modifications in the VP1, VP2 and/or VP3 capsid subunits. Alternatively, the capsid subunits can be expressed independently to achieve modification in only one or two of the capsid subunits (VP1, VP2, VP3, VP1+VP2, VP1+VP3, or VP2+VP3). One can modify the cap gene to have expressed at a desired location a non-capsid protein advantageously a large payload protein, such as a polypeptide of the present invention. Likewise, these can be fusions, with the protein, e.g., large payload protein such as a polypeptide of the present invention fused in a manner analogous to prior art fusions. See, e.g., US Patent Publication 20090215879; Nance et al., “Perspective on Adeno-Associated Virus Capsid Modification for Duchenne Muscular Dystrophy Gene Therapy,” Hum Gene Ther. 26(12):786-800 (2015) and documents cited therein, incorporated herein by reference. The skilled person, from this disclosure and the knowledge in the art can make and use modified AAV or AAV capsid as in the herein invention, and through this disclosure one knows now that payload proteins, such as large payload proteins, can be fused to the AAV capsid. Accordingly, this approach is also applicable to a virus in the genus Dependoparvovirus or in the family Parvoviridae, for instance, AAV, or a virus of Amdoparvovirus, e.g., Carnivore amdoparvovirus 1, a virus of Aveparvovirus, e.g., Galliform aveparvovirus 1, a virus of Bocaparvovirus, e.g., Ungulate bocaparvovirus 1, a virus of Copiparvovirus, e.g., Ungulate copiparvovirus 1, a virus of Dependoparvovirus, e.g., Adeno-associated dependoparvovirus A, a virus of Erythroparvovirus, e.g., Primate erythroparvovirus 1, a virus of Protoparvovirus, e.g., Rodent protoparvovirus 1, a virus of Tetraparvovirus, e.g., Primate tetraparvovirus 1. Thus, a virus of within the family Parvoviridae or the genus Dependoparvovirus or any of the other foregoing genera within Parvoviridae is contemplated as within the invention with discussion herein as to AAV applicable to such other viruses.

[0216] In one embodiment, the invention provides a non-naturally occurring or engineered composition comprising a polypeptide of the present invention which is part of or tethered to an AAV capsid domain, i.e., VP1, VP2, or VP3 domain of Adeno-Associated Virus (AAV) capsid. In some embodiments, part of or tethered to an AAV capsid domain includes associated with associated with a AAV capsid domain. In some embodiments, the polypeptide of the present invention may be fused to the AAV capsid domain. In some embodiments, the fusion may be to the N-terminal end of the AAV capsid domain. As such, in some embodiments, the C-terminal end of the polypeptide of the present invention is fused to the N-terminal end of the AAV capsid domain. In some embodiments, an NLS and/or a linker (such as a GlySer linker) may be positioned between the C-terminal end of the polypeptide of the present invention and the N-terminal end of the AAV capsid domain. In some embodiments, the fusion may be to the C-terminal end of the AAV capsid domain. In some embodiments, this is not preferred due to the fact that the VP1, VP2 and VP3 domains of AAV are alternative splices of the same RNA and so a C-terminal fusion may affect all three domains. In some embodiments, the AAV capsid domain is truncated. In some embodiments, some or all of the AAV capsid domain is removed. In some embodiments, some of the AAV capsid domain is removed and replaced with a linker (such as a GlySer linker), typically leaving the N-terminal and C-terminal ends of the AAV capsid domain intact, such as the first 2, 5 or 10 amino acids. In this way, the internal (non-terminal) portion of the VP3 domain may be replaced with a linker. It is particularly preferred that the linker is fused to the polypeptide of the present invention. A branched linker may be used, with the polypeptide of the present invention fused to the end of one of the branches. This allows for some degree of spatial separation between the capsid and the polypeptide of the present invention. In this way, the polypeptide of the present invention is part of (or fused to) the AAV capsid domain.

[0217] In other embodiments, the polypeptide of the present invention may be fused in frame within, i.e., internal to, the AAV capsid domain. Thus, in some embodiments, the AAV capsid domain again preferably retains its N-terminal and C-terminal ends. In this case, a linker is preferred, in some embodiments, either at one or both ends of the polypeptide of the present invention. In this way, the polypeptide of the present invention is again part of (or fused to) the AAV capsid domain. In certain embodiments, the positioning of the polypeptide of the present invention is such that the polypeptide of the present invention is at the external surface of the viral capsid once formed. In one embodiment, the invention provides a non-naturally occurring or engineered composition comprising a polypeptide of the present invention associated with a AAV capsid domain of Adeno-Associated Virus (AAV) capsid. Here, associated may mean in some embodiments fused, or in some embodiments bound to, or in some embodiments tethered to. The polypeptide of the present invention may, in some embodiments, be tethered to the VP1, VP2, or VP3 domain. This may be via a connector protein or tethering system such as the biotin-streptavidin system. In one example, a biotinylation sequence (15 amino acids) could therefore be fused to the polypeptide of the present invention. When a fusion of the AAV capsid domain, especially the N-terminus of the AAV capsid domain, with streptavidin is also provided, the two will therefore associate with very high affinity. Thus, in some embodiments, provided is a composition or system comprising a polypeptide of the present invention-biotin fusion and a streptavidin-AAV capsid domain arrangement, such as a fusion. The polypeptide of the present invention-biotin and streptavidin-AAV capsid domain forms a single complex when the two parts are brought together. NLSs may also be incorporated between the polypeptide of the present invention and the biotin; and/or between the streptavidin and the AAV capsid domain.

[0218] As such, provided is a fusion of a polypeptide of the present invention with a connector protein specific for a high affinity ligand for that connector, whereas the AAV VP2 domain is bound to said high affinity ligand. For example, streptavidin may be the connector fused to the polypeptide of the present invention, while biotin may be bound to the AAV VP2 domain. Upon co-localization, the streptavidin will bind to the biotin, thus connecting the polypeptide of the present invention to the AAV VP2 domain. The reverse arrangement is also possible. In some embodiments, a biotinylation sequence (15 amino acids) could therefore be fused to the AAV VP2 domain, especially the N-terminus of the AAV VP2 domain. A fusion of the polypeptide of the present invention with streptavidin is also preferred, in some embodiments. In some embodiments, the biotinylated AAV capsids with streptavidin-polypeptide of the present invention are assembled in vitro. This way the AAV capsids should assemble in a straightforward manner and the polypeptide of the present invention-streptavidin fusion can be added after assembly of the capsid. In other embodiments a biotinylation sequence (15 amino acids) could therefore be fused to the polypeptide of the present invention, together with a fusion of the AAV VP2 domain, especially the N-terminus of the AAV VP2 domain, with streptavidin. For simplicity, a fusion of the polypeptide of the present invention and the AAV VP2 domain is preferred in some embodiments. In some embodiments, the fusion may be to the N-terminal end of the polypeptide of the present invention. In other words, in some embodiments, the AAV and polypeptide of the present invention are associated via fusion. In some embodiments, the AAV and polypeptide of the present invention are associated via fusion including a linker. Suitable linkers are discussed herein but include Gly Ser linkers. Fusion to the N-term of AAV VP2 domain is preferred, in some embodiments. In some embodiments, the polypeptide of the present invention comprises at least one Nuclear Localization Signal (NLS). In a further embodiment, the present invention provides compositions comprising the polypeptide of the present invention and associated AAV VP2 domain or the polynucleotides or vectors described herein. Such compositions and formulations are discussed elsewhere herein.

[0219] An alternative tether may be to fuse or otherwise associate the AAV capsid domain to an adaptor protein which binds to or recognizes to a corresponding RNA sequence or motif. In some embodiments, the adaptor is or comprises a binding protein which recognizes and binds (or is bound by) an RNA sequence specific for said binding protein. In some embodiments, a preferred example is the MS2 (see Konermann et al. Dec 2014, cited infra, incorporated herein by reference) binding protein which recognizes and binds (or is bound by) an RNA sequence specific for the MS2 protein.

[0220] With the AAV capsid domain associated with the adaptor protein, the polypeptide of the present invention may, in some embodiments, be tethered to the adaptor protein of the AAV capsid domain. The polypeptide of the present invention may, in some embodiments, be tethered to the adaptor protein of the AAV capsid domain via the polypeptide of the present invention being in a complex with a modified guide, see Konermann et al. The modified guide is, in some embodiments, a sgRNA. In some embodiments, the modified guide comprises a distinct RNA sequence; see, e.g., International Patent Application No. PCT/US14/70175, incorporated herein by reference. In some embodiments, distinct RNA sequence is an aptamer.

[0221] In certain embodiments, the positioning of the polypeptide of the present invention is such that the polypeptide of the present invention is at the internal surface of the viral capsid once formed. In one embodiment, the invention provides a non-naturally occurring or engineered composition comprising a polypeptide of the present invention associated with an internal surface of an AAV capsid domain. Here again, associated may mean in some embodiments fused, or in some embodiments bound to, or in some embodiments tethered to. The polypeptide of the present invention may, in some embodiments, be tethered to the VP1, VP2, or VP3 domain such that it locates to the internal surface of the viral capsid once formed. This may be via a connector protein or tethering system such as the biotin-streptavidin system as described above and/or elsewhere herein.

### Herpes Simplex Viral Vectors

[0222] In some embodiments, the vector can be a Herpes Simplex Viral (HSV)-based vector or system thereof. HSV systems can include the disabled infections single copy (DISC) viruses, which are composed of a glycoprotein H defective mutant HSV genome. When the defective HSV is propagated in complementing cells, virus particles can be generated that are capable of infecting subsequent cells permanently replicating their own genome but are not capable of producing more infectious particles. See e.g., 2009. Trobridge. Exp. Opin. Biol. Ther. 9:1427-1436, whose techniques and vectors described therein can be modified and adapted for use in the CRISPR-Cas system of the present invention. In some embodiments where an HSV vector or system thereof is utilized, the host cell can be a complementing cell. In some embodiments, HSV vector or system thereof can be capable of producing virus particles capable of delivering a polynucleotide cargo of up to 150 kb. Thus, in some embodiment the polynucleotide(s) of the present invention included in the HSV-based viral vector or system thereof can sum from about 0.001 to about 150 kb. HSV-based vectors and systems thereof have been successfully used in several contexts including various models of neurologic disorders. See e.g., Cockrell et al. 2007. Mol. Biotechnol. 36:184-204; Kafri T. 2004. Mol. Biol. 246:367-390; Balaggan and Ali. 2012. Gene Ther. 19:145-153; Wong et al. 2006. Hum. Gen. Ther. 2002. 17:1-9; Azzouz et al. J. Neruosci. 22L10302-10312; and Betchen and Kaplitt. 2003. Curr. Opin. Neurol. 16:487-493, whose techniques and vectors described therein can be modified and adapted for use to delivery one or more polynucleotides and/or polypeptides of the present invention of the present invention.

### Poxvirus Vectors

[0223] In some embodiments, the vector can be a poxvirus vector or system thereof. In some embodiments, the poxvirus vector can result in cytoplasmic expression of one or more polynucleotides and/or polypeptides of the present invention. In some embodiments, the capacity of a poxvirus vector or system thereof can be about 25 kb or more. In some embodiments, a poxvirus vector or system thereof can include one or more polynucleotides of the present invention described herein.

### Viral Vectors for Delivery to Plants

[0224] The systems and compositions may be delivered to plant cells using viral vehicles. In particular embodiments, the compositions and systems may be introduced in the plant cells using a plant viral vector (e.g., as described in Scholthof et al. 1996, Annu Rev Phytopathol. 1996; 34:299-323). Such viral vector may be a vector from a DNA virus, e.g., geminivirus (e.g., cabbage leaf curl virus, bean yellow dwarf virus, wheat dwarf virus, tomato leaf curl virus, maize streak virus, tobacco leaf curl virus, or tomato golden mosaic virus) or nanovirus (e.g., Faba bean necrotic yellow virus). The viral vector may be a vector from an RNA virus, e.g., tobravirus (e.g., tobacco rattle virus, tobacco mosaic virus), potexvirus (e.g., potato virus X), or hordeivirus (e.g., barley stripe mosaic virus). The replicating genomes of plant viruses may be non-integrative vectors.

Virus Particle Production from Viral Vectors

### Retroviral Production

[0225] In some embodiments, one or more viral vectors and/or system thereof can be delivered to a suitable cell line for production of virus particles containing the polynucleotide or other payload to be delivered to a host cell. Suitable host cells for virus production from viral vectors and systems thereof described herein are known in the art and are commercially available. For example, suitable host cells include HEK 293 cells and its variants (HEK 293T and HEK 293TN cells). In some embodiments, the suitable host cell for virus production from viral vectors and systems thereof described herein can stably express one or more genes involved in packaging (e.g., pol, gag, and/or VSV-G) and/or other supporting genes.

[0226] In some embodiments, after delivery of one or more viral vectors to the suitable host cells for or virus production from viral vectors and systems thereof, the cells are incubated for an appropriate length of time to allow for viral gene expression from the vectors, packaging of the polynucleotide to be delivered (e.g., a viral polynucleotide of the present invention), and virus particle assembly, and secretion of mature virus particles into the culture media. Various other methods and techniques are generally known to those of ordinary skill in the art.

[0227] Mature virus particles can be collected from the culture media by a suitable method. In some embodiments, this can involve centrifugation to concentrate the virus. The titer of the composition containing the collected virus particles can be obtained using a suitable method. Such methods can include transducing a suitable cell line (e.g. NIH 3T3 cells) and determining transduction efficiency, infectivity in that cell line by a suitable method. Suitable methods include PCR-based methods, flow cytometry, and antibiotic selection-based methods. Various other methods and techniques are generally known to those of ordinary skill in the art. The concentration of virus particle can be adjusted as needed. In some embodiments, the resulting composition containing virus particles can contain 1×10¹-1×10²⁰ particles/mL.

[0228] Lentiviruses may be prepared from any lentiviral vector or vector system described herein. In one example embodiment, after cloning pCasES10 (which contains a lentiviral transfer plasmid backbone), HEK293FT at low passage (p=5) can be seeded in a T-75 flask to 50% confluence the day before transfection in DMEM with 10% fetal bovine serum and without antibiotics. After 20 hours, the media can be changed to OptiMEM (serum-free) media and transfection of the lentiviral vectors can done 4 hours later. Cells can be transfected with 10 μg of lentiviral transfer plasmid (pCasES10) and the appropriate packaging plasmids (e.g., 5 μg of pMD2.G (VSV-g pseudotype), and 7.5 ug of psPAX2 (gag/pol/rev/tat)). Transfection can be carried out in 4 mL OptiMEM with a cationic lipid delivery agent (50 uL Lipofectamine 2000 and 100 ul Plus reagent). After 6 hours, the media can be changed to antibiotic-free DMEM with 10% fetal bovine serum. These methods can use serum during cell culture, but serum-free methods are preferred.

[0229] Following transfection and allowing the producing cells (also referred to as packaging cells) to package and produce virus particles with packaged cargo, the lentiviral particles can be purified. In an exemplary embodiment, virus-containing supernatants can be harvested after 48 hours. Collected virus-containing supernatants can first be cleared of debris and filtered through a 0.45 um low protein binding (PVDF) filter. They can then be spun in an ultracentrifuge for 2 hours at 24,000 rpm. The resulting virus-containing pellets can be resuspended in 50 ul of DMEM overnight at 4 degrees C. They can be then aliquoted and used immediately or immediately frozen at −80 degrees C. for storage.

### AAV Particle Production

[0230] There are two main strategies for producing AAV particles from AAV vectors and systems thereof, such as those described herein, which depend on how the adenovirus helper factors are provided (helper v. helper free). In some embodiments, a method of producing AAV particles from AAV vectors and systems thereof can include adenovirus infection into cell lines that stably harbor AAV replication and capsid encoding polynucleotides along with AAV vector containing the polynucleotide to be packaged and delivered by the resulting AAV particle (e.g., one or more viral polynucleotide(s) of the present invention). In some embodiments, a method of producing AAV particles from AAV vectors and systems thereof can be a “helper free” method, which includes co-transfection of an appropriate producing cell line with three vectors (e.g., plasmid vectors): (1) an AAV vector that contains a polynucleotide of interest (e.g., one or more viral polynucleotide(s) of the present invention) between 2 ITRs; (2) a vector that carries the AAV Rep-Cap encoding polynucleotides; and (helper polynucleotides. One of skill in the art will appreciate various methods and variations thereof that are both helper and -helper free and as well as the different advantages of each system.

### Non-Viral Vectors

[0231] In some embodiments, the vector is a non-viral vector or vector system. The term of art “Non-viral vector” and as used herein in this context refers to molecules and/or compositions that are vectors but that are not based on one or more component of a virus or virus genome (excluding any nucleotide to be delivered and/or expressed by the non-viral vector) that can be capable of incorporating polynucleotide(s) of the present invention and delivering said polynucleotide(s) to a cell and/or expressing the polynucleotide in the cell. It will be appreciated that this does not exclude vectors containing a polynucleotide designed to target a virus-based polynucleotide that is to be delivered. For example, if a gRNA to be delivered is directed against a virus component and it is inserted or otherwise coupled to an otherwise non-viral vector or carrier, this would not make said vector a “viral vector”. Non-viral vectors can include, without limitation, naked polynucleotides and polynucleotide (non-viral) based vector and vector systems.

### Naked Polynucleotides

[0232] In some embodiments, one or more polynucleotides of the present invention, e.g., one or more viral polynucleotides, described elsewhere herein can be included in a naked polynucleotide. The term of art “naked polynucleotide” as used herein refers to polynucleotides that are not associated with another molecule (e.g., proteins, lipids, and/or other molecules) that can often help protect it from environmental factors and/or degradation. As used herein, associated with includes, but is not limited to, linked to, adhered to, adsorbed to, enclosed in, enclosed in or within, mixed with, and the like. Naked polynucleotides that include one or more of the polynucleotides of the present invention described herein can be delivered directly to a host cell and optionally expressed therein. The naked polynucleotides can have any suitable two- and three-dimensional configurations. By way of non-limiting examples, naked polynucleotides can be single-stranded molecules, double stranded molecules, circular molecules (e.g., plasmids and artificial chromosomes), molecules that contain portions that are single stranded and portions that are double stranded (e.g. ribozymes), and the like. In some embodiments, the naked polynucleotide contains only the polynucleotide(s) of the present invention. In some embodiments, the naked polynucleotide can contain other nucleic acids and/or polynucleotides in addition to the polynucleotide(s) of the present invention. The naked polynucleotides can include one or more elements of a transposon system. Transposons and system thereof are described in greater detail elsewhere herein.

### Non-Viral Polynucleotide Vectors

[0233] In some embodiments, one or more of the polynucleotides of the present invention, such as a viral polynucleotide of the present invention described elsewhere herein, can be included in a non-viral polynucleotide vector. Suitable non-viral polynucleotide vectors include, but are not limited to, transposon vectors and vector systems, plasmids, bacterial artificial chromosomes, yeast artificial chromosomes, AR(antibiotic resistance)-free plasmids and miniplasmids, circular covalently closed vectors (e.g. minicircles, minivectors, miniknots,), linear covalently closed vectors (“dumbbell shaped”), MIDGE (minimalistic immunologically defined gene expression) vectors, MiLV (micro-linear vector) vectors, Ministrings, mini-intronic plasmids, PSK systems (post-segregationally killing systems), ORT (operator repressor titration) plasmids, and the like. See e.g., Hardee et al. 2017. Genes. 8(2):65.

[0234] In some embodiments, the non-viral polynucleotide vector can have a conditional origin of replication. In some embodiments, the non-viral polynucleotide vector can be an ORT plasmid. In some embodiments, the non-viral polynucleotide vector can have a minimalistic immunologically defined gene expression. In some embodiments, the non-viral polynucleotide vector can have one or more post-segregationally killing system genes. In some embodiments, the non-viral polynucleotide vector is AR-free. In some embodiments, the non-viral polynucleotide vector is a minivector. In some embodiments, the non-viral polynucleotide vector includes a nuclear localization signal. In some embodiments, the non-viral polynucleotide vector can include one or more CpG motifs. In some embodiments, the non-viral polynucleotide vectors can include one or more scaffold/matrix attachment regions (S/MARs). See e.g., Mirkovitch et al. 1984. Cell. 39:223-232, Wong et al. 2015. Adv. Genet. 89:113-152, whose techniques and vectors can be adapted for use in the present invention. S/MARs are AT-rich sequences that play a role in the spatial organization of chromosomes through DNA loop base attachment to the nuclear matrix. S/MARs are often found close to regulatory elements such as promoters, enhancers, and origins of DNA replication. Inclusion of one or S/MARs can facilitate a once-per-cell-cycle replication to maintain the non-viral polynucleotide vector as an episome in daughter cells. In certain embodiments, the S/MAR sequence is located downstream of an actively transcribed polynucleotide (e.g., one or more polynucleotides of the present invention) included in the non-viral polynucleotide vector. In some embodiments, the S/MAR can be a S/MAR from the beta-interferon gene cluster. See e.g., Verghese et al. 2014. Nucleic Acid Res. 42:e53; Xu et al. 2016. Sci. China Life Sci. 59:1024-1033; Jin et al. 2016. 8:702-711; Koirala et al. 2014. Adv. Exp. Med. Biol. 801:703-709; and Nehlsen et al. 2006. Gene Ther. Mol. Biol. 10:233-244, whose techniques and vectors can be adapted for use in the present invention.

[0235] In some embodiments, the non-viral vector is a transposon vector or system thereof. As used herein, “transposon” (also referred to as transposable element) refers to a polynucleotide sequence that is capable of moving form location in a genome to another. There are several classes of transposons. Transposons include retrotransposons and DNA transposons. Retrotransposons require the transcription of the polynucleotide that is moved (or transposed) in order to transpose the polynucleotide to a new genome or polynucleotide. DNA transposons are those that do not require reverse transcription of the polynucleotide that is moved (or transposed) in order to transpose the polynucleotide to a new genome or polynucleotide. In some embodiments, the non-viral polynucleotide vector can be a retrotransposon vector. In some embodiments, the retrotransposon vector includes long terminal repeats. In some embodiments, the retrotransposon vector does not include long terminal repeats. In some embodiments, the non-viral polynucleotide vector can be a DNA transposon vector. DNA transposon vectors can include a polynucleotide sequence encoding a transposase. In some embodiments, the transposon vector is configured as a non-autonomous transposon vector, meaning that the transposition does not occur spontaneously on its own. In some of these embodiments, the transposon vector lacks one or more polynucleotide sequences encoding proteins required for transposition. In some embodiments, the non-autonomous transposon vectors lack one or more Ac elements.

[0236] In some embodiments, a non-viral polynucleotide transposon vector system can include a first polynucleotide vector that contains the polynucleotide(s) of the present invention flanked on the 5′ and 3′ ends by transposon terminal inverted repeats (TIRs) and a second polynucleotide vector that includes a polynucleotide capable of encoding a transposase coupled to a promoter to drive expression of the transposase. When both are expressed in the same cell, the transposase can be expressed from the second vector and can transpose the material between the TIRs on the first vector (e.g., the polynucleotide(s) of the present invention) and integrate it into one or more positions in the host cell's genome. In some embodiments the transposon vector or system thereof can be configured as a gene trap. In some embodiments, the TIRs can be configured to flank a strong splice acceptor site followed by a reporter and/or other gene (e.g., one or more of the polynucleotide(s) of the present invention) and a strong poly A tail. When transposition occurs while using this vector or system thereof, the transposon can insert into an intron of a gene and the inserted reporter or other gene can provoke a mis-splicing process and as a result it in activates the trapped gene.

[0237] Any suitable transposon system can be used. Suitable transposon and systems thereof can include Sleeping Beauty transposon system (Tc1/mariner superfamily) (see e.g., Ivics et al. 1997. Cell. 91(4): 501-510), piggyBac (piggyBac superfamily) (see e.g., Li et al. 2013 110(25): E2279-E2287 and Yusa et al. 2011. PNAS. 108(4): 1531-1536), Tol2 (superfamily hAT), Frog Prince (Tc1/mariner superfamily) (see e.g., Miskey et al. 2003 Nucleic Acid Res. 31(23):6873-6881) and variants thereof.

### Non-Vector Delivery Vehicles

[0238] The delivery vehicles may comprise non-viral vehicles. In general, methods and vehicles capable of delivering nucleic acids and/or proteins may be used for delivering the systems compositions herein. Examples of non-viral vehicles include lipid nanoparticles, cell-penetrating peptides (CPPs), DNA nanoclews, metal nanoparticles, streptolysin O, multifunctional envelope-type nanodevices (MENDs), lipid-coated mesoporous silica particles, and other inorganic nanoparticles.

### Lipid Particles

[0239] The delivery vehicles may comprise lipid particles, e.g., lipid nanoparticles (LNPs) and liposomes. Lipofection is described in e.g., U.S. Pat. Nos. 5,049,386, 4,946,787; and 4,897,355) and lipofection reagents are sold commercially (e.g., Transfectam™ and Lipofectin™). Cationic and neutral lipids that are suitable for efficient receptor-recognition lipofection of polynucleotides include those of Felgner, International Patent Publication Nos. WO 91/17424 and WO 91/16024. The preparation of lipid:nucleic acid complexes, including targeted liposomes such as immunolipid complexes, is well known to one of skill in the art (see, e.g., Crystal, Science 270:404-410 (1995); Blaese et al., Cancer Gene Ther. 2:291-297 (1995); Behr et al., Bioconjugate Chem. 5:382-389 (1994); Remy et al., Bioconjugate Chem. 5:647-654 (1994); Gao et al., Gene Therapy 2:710-722 (1995); Ahmad et al., Cancer Res. 52:4817-4820 (1992); U.S. Pat. Nos. 4,186,183, 4,217,344, 4,235,871, 4,261,975, 4,485,054, 4,501,728, 4,774,085, 4,837,028, and 4,946,787).

### Lipid Nanoparticles (LNPs)

[0240] LNPs may encapsulate nucleic acids within cationic lipid particles (e.g., liposomes), and may be delivered to cells with relative ease. In some examples, lipid nanoparticles do not contain any viral components, which helps minimize safety and immunogenicity concerns. Lipid particles may be used for in vitro, ex vivo, and in vivo deliveries. Lipid particles may be used for various scales of cell populations.

[0241] In some examples, LNPs may be used for delivering DNA molecules (e.g., those comprising polynucleotides of the present invention and/or polypeptides they encode).

[0242] Components in LNPs may comprise cationic lipids 1,2-dilineoyl-3-dimethylammonium-propane (DLinDAP), 1,2-dilinoleyloxy-3-N,N-dimethylaminopropane (DLinDMA), 1,2-dilinoleyloxyketo-N,N-dimethyl-3-aminopropane (DLinK-DMA), 1,2-dilinoleyl-4-(2-dimethylaminoethyl)-[1,3]-dioxolane (DLinKC2-DMA), (3-o-[2″-(methoxypolyethyleneglycol 2000) succinoyl]-1,2-dimyristoyl-sn-glycol (PEG-S-DMG), R-3-[(ro-methoxy-poly(ethylene glycol)2000) carbamoyl]-1,2-dimyristyloxlpropyl-3-amine (PEG-C-DOMG, and any combination thereof. Preparation of LNPs and encapsulation may be adapted from Rosin et al., Molecular Therapy, vol. 19, no. 12, pages 1286-2200, Dec. 2011).

[0243] In some embodiments, an LNP delivery vehicle can be used to deliver a virus particle containing a polynucleotides and/or polypeptides of the present invention. In some embodiments, the virus particle(s) can be adsorbed to the lipid particle, such as through electrostatic interactions, and/or can be attached to the liposomes via a linker.

[0244] In some embodiments, the LNP contains a nucleic acid, wherein the charge ratio of nucleic acid backbone phosphates to cationic lipid nitrogen atoms is about 1:1.5-7 or about 1:4.

[0245] In some embodiments, the LNP also includes a shielding compound, which is removable from the lipid composition under in vivo conditions. In some embodiments, the shielding compound is a biologically inert compound. In some embodiments, the shielding compound does not carry any charge on its surface or on the molecule as such. In some embodiments, the shielding compounds are polyethylenglycoles (PEGs), hydroxyethylglucose (HEG) based polymers, polyhydroxyethyl starch (polyHES) and polypropylene. In some embodiments, the PEG, HEG, polyHES, and a polypropylene weight between about 500 to 10,000 Da or between about 2000 to 5000 Da. In some embodiments, the shielding compound is PEG2000 or PEG5000.

[0246] In some embodiments, the LNP can include one or more helper lipids. In some embodiments, the helper lipid can be a phosphor lipid or a steroid. In some embodiments, the helper lipid is between about 20 mol % to 80 mol % of the total lipid content of the composition. In some embodiments, the helper lipid component is between about 35 mol % to 65 mol % of the total lipid content of the LNP. In some embodiments, the LNP includes lipids at 50 mol % and the helper lipid at 50 mol % of the total lipid content of the LNP.

[0247] Other non-limiting, exemplary LNP delivery vehicles are described in U.S. Patent Publication Nos. US 20160174546, US 20140301951, US 20150105538, US 20150250725, Wang et al., J. Control Release, 2017 Jan. 31. pii: S0168-3659(17)30038-X. doi: 10.1016/j.jconrel.2017.01.037. [Epub ahead of print]; Altmoglu et al., Biomater Sci., 4(12):1773-80, Nov. 15, 2016; Wang et al., PNAS, 113(11):2868-73 Mar. 15, 2016; Wang et al., PloS One, 10(11): e0141860. doi: 10.1371/journal.pone.0141860. eCollection 2015, Nov. 3, 2015; Takeda et al., Neural Regen Res. 10(5):689-90, May 2015; Wang et al., Adv. Healthc Mater., 3(9):1398-403, Sep. 2014; and Wang et al., Agnew Chem Int Ed Engl., 53(11):2893-8, Mar. 10, 2014; James E. Dahlman and Carmen Barnes et al. Nature Nanotechnology (2014) published online 11 May 2014, doi:10.1038/nnano.2014.84; Coelho et al., N Engl J Med 2013; 369:819-29; Aleku et al., Cancer Res., 68(23): 9788-98 (Dec. 1, 2008), Strumberg et al., Int. J. C/in. Pharmacol. Ther., 50(1): 76-8 (Jan. 2012), Schultheis et al., J. C/in. Oncol., 32(36): 4141-48 (Dec. 20, 2014), and Fehring et al., Mol. Ther., 22(4): 811-20 (Apr. 22, 2014); Novobrantseva, Molecular Therapy—Nucleic Acids (2012) 1, e4; doi:10.1038/mtna.2011.3; WO2012135025; US 20140348900; US 20140328759; US 20140308304; WO 2005/105152; WO 2006/069782; WO 2007/121947; US 2015/082080; US 20120251618; 7,982,027; 7,799,565; 8,058,069; 8,283,333; 7,901,708; 7,745,651; 7,803,397; 8,101,741; 8,188,263; 7,915,399; 8,236,943 and 7,838,658 and European Pat. Nos 1766035; 1519714; 1781593 and 1664316;

### Liposomes

[0248] In some embodiments, a lipid particle may be liposome. Liposomes are spherical vesicle structures composed of a uni- or multilamellar lipid bilayer surrounding internal aqueous compartments and a relatively impermeable outer lipophilic phospholipid bilayer. In some embodiments, liposomes are biocompatible, nontoxic, can deliver both hydrophilic and lipophilic drug molecules, protect their cargo from degradation by plasma enzymes, and transport their load across biological membranes and the blood brain barrier (BBB).

[0249] Liposomes can be made from several different types of lipids, e.g., phospholipids. A liposome may comprise natural phospholipids and lipids such as 1,2-distearoryl-sn-glycero-3-phosphatidyl choline (DSPC), sphingomyelin, egg phosphatidylcholines, monosialoganglioside, or any combination thereof.

[0250] Several other additives may be added to liposomes in order to modify their structure and properties. For instance, liposomes may further comprise cholesterol, sphingomyelin, and/or 1,2-dioleoyl-sn-glycero-3-phosphoethanolamine (DOPE), e.g., to increase stability and/or to prevent the leakage of the liposomal inner cargo.

[0251] In some embodiments, a liposome delivery vehicle can be used to deliver a virus particle containing polynucleotides and/or polypeptides of the present invention described elsewhere herein. In some embodiments, the virus particle(s) can be adsorbed to the liposome, such as through electrostatic interactions, and/or can be attached to the liposomes via a linker.

[0252] In some embodiments, the liposome can be a Trojan Horse liposome (also known in the art as Molecular Trojan Horses), see e.g. http://cshprotocols.cshlp.org/content/2010/4/pdb.prot5407.long, the teachings of which can be applied and/or adapted to generated and/or deliver the polynucleotides and/or polypeptides of the present invention described elsewhere herein.

[0253] Other non-limiting, exemplary liposomes can be those as set forth in Wang et al., ACS Synthetic Biology, 1, 403-07 (2012); Wang et al., PNAS, 113(11) 2868-2873 (2016); Spuch and Navarro, Journal of Drug Delivery, vol. 2011, Article ID 469679, 12 pages, 2011. doi:10.1155/2011/469679; WO 2008/042973; U.S. Pat. No. 8,071,082; WO 2014/186366; 20160257951; US20160129120; US 20160244761; 20120251618; WO2013/093648; Lipofectin (a combination of DOTMA and DOPE), Lipofectase, LIPOFECTAMINE® (e.g., LIPOFECTAMINE® 2000, LIPOFECTAMINE® 3000, LIPOFECTAMINE® RNAiMAX, LIPOFECTAMINE® LTX), SAINT-RED (Synvolux Therapeutics, Groningen Netherlands), DOPE, Cytofectin (Gilead Sciences, Foster City, Calif.), and Eufectins (JBL, San Luis Obispo, Calif.).

### Stable Nucleic-Acid-Lipid Particles (SNALPs)

[0254] In some embodiments, the lipid particles may be stable nucleic acid lipid particles (SNALPs). SNALPs may comprise an ionizable lipid (DLinDMA) (e.g., cationic at low pH), a neutral helper lipid, cholesterol, a diffusible polyethylene glycol (PEG)-lipid, or any combination thereof. In some examples, SNALPs may comprise synthetic cholesterol, dipalmitoylphosphatidylcholine, 3-N-[(w-methoxy polyethylene glycol)2000)carbamoyl]-1,2-dimyrestyloxypropylamine, and cationic 1,2-dilinoleyloxy-3-N,Ndimethylaminopropane. In some examples, SNALPs may comprise synthetic cholesterol, 1,2-distearoyl-sn-glycero-3-phosphocholine, PEG-cDMA, and 1,2-dilinoleyloxy-3-(N;N-dimethyl)aminopropane (DLinDMAo).

[0255] Other non-limiting, exemplary SNALPs that can be used to deliver the polynucleotides and/or polypeptides of the present invention described elsewhere herein can be any such SNALPs as described in Morrissey et al., Nature Biotechnology, Vol. 23, No. 8, August 2005, Zimmerman et al., Nature Letters, Vol. 441, 4 May 2006; Geisbert et al., Lancet 2010; 375: 1896-905; Judge, J. Clin. Invest. 119:661-673 (2009); and Semple et al., Nature Niotechnology, Volume 28 Number 2 Feb. 2010, pp. 172-177.

### Other Lipids

[0256] The lipid particles may also comprise one or more other types of lipids, e.g., cationic lipids, such as amino lipid 2,2-dilinoleyl-4-dimethylaminoethyl-[1,3]-dioxolane (DLin-KC2-DMA), DLin-KC2-DMA4, C12-200 and colipids disteroylphosphatidyl choline, cholesterol, and PEG-DMG.

[0257] In some embodiments, the delivery vehicle can be or include a lipidoid, such as any of those set forth in, for example, US 20110293703.

[0258] In some embodiments, the delivery vehicle can be or include an amino lipid, such as any of those set forth in, for example, Jayaraman, Angew. Chem. Int. Ed. 2012, 51, 8529-8533.

[0259] In some embodiments, the delivery vehicle can be or include a lipid envelope, such as any of those set forth in, for example, Korman et al., 2011. Nat. Biotech. 29:154-157.

### Lipoplexes Polyplexes

[0260] In some embodiments, the delivery vehicles comprise lipoplexes and/or polyplexes. Lipoplexes may bind to negatively charged cell membrane and induce endocytosis into the cells. Examples of lipoplexes may be complexes comprising lipid(s) and non-lipid components. Examples of lipoplexes and polyplexes include FuGENE-6 reagent, a non-liposomal solution containing lipids and other components, zwitterionic amino lipids (ZALs), Ca2 [symbol] (e.g., forming DNA/Ca²⁺ microcomplexes), polyethenimine (PEI) (e.g., branched PEI), and poly(L-lysine) (PLL).

### Sugar-Based Particles

[0261] In some embodiments, the delivery vehicle can be a sugar-based particle. In some embodiments, the sugar-based particles can be or include GalNAc, such as any of those described in WO2014118272; US 20020150626; Nair, J K et al., 2014, Journal of the American Chemical Society 136 (49), 16958-16961; Ostergaard et al., Bioconjugate Chem., 2015, 26 (8), pp 1451-1455.

### Cell Penetrating Peptides

[0262] In some embodiments, the delivery vehicles comprise cell penetrating peptides (CPPs). CPPs are short peptides that facilitate cellular uptake of various molecular cargo (e.g., from nanosized particles to small chemical molecules and large fragments of DNA).

[0263] CPPs may be of different sizes, amino acid sequences, and charges. In some examples, CPPs can translocate the plasma membrane and facilitate the delivery of various molecular cargoes to the cytoplasm or an organelle. CPPs may be introduced into cells via different mechanisms, e.g., direct penetration in the membrane, endocytosis-mediated entry, and translocation through the formation of a transitory structure.

[0264] CPPs may have an amino acid composition that either contains a high relative abundance of positively charged amino acids such as lysine or arginine or has sequences that contain an alternating pattern of polar/charged amino acids and non-polar, hydrophobic amino acids. These two types of structures are referred to as polycationic or amphipathic, respectively. A third class of CPPs are the hydrophobic peptides, containing only apolar residues, with low net charge or have hydrophobic amino acid groups that are crucial for cellular uptake. Another type of CPPs is the trans-activating transcriptional activator (Tat) from Human Immunodeficiency Virus 1 (HIV-1). Examples of CPPs include to Penetratin, Tat (48-60), Transportan, and (R-AhX-R4) (Ahx refers to aminohexanoyl), Kaposi fibroblast growth factor (FGF) signal peptide sequence, integrin β3 signal peptide sequence, polyarginine peptide Args sequence, Guanine rich-molecular transporters, and sweet arrow peptide. Examples of CPPs and related applications also include those described in U.S. Pat. No. 8,372,951.

[0265] CPPs can be used for in vitro and ex vivo work quite readily, and extensive optimization for each cargo and cell type is usually required. In some examples, CPPs may be covalently attached to the Cas protein directly, which is then complexed with the gRNA and delivered to cells. In some examples, separate delivery of CPP-Cas and CPP-gRNA to multiple cells may be performed. CPP may also be used to delivery RNPs.

[0266] CPPs may be used to deliver the compositions and systems to plants. In some examples, CPPs may be used to deliver the components to plant protoplasts, which are then regenerated to plant cells and further to plants.

### DNA Nanoclews

[0267] In some embodiments, the delivery vehicles comprise DNA nanoclews. A DNA nanoclew refers to a sphere-like structure of DNA (e.g., with a shape of a ball of yarn). The nanoclew may be synthesized by rolling circle amplification with palindromic sequences that aide in the self-assembly of the structure. The sphere may then be loaded with a payload. An example of DNA nanoclew is described in Sun W et al, J Am Chem Soc. 2014 Oct. 22; 136(42):14722-5; and Sun W et al, Angew Chem Int Ed Engl. 2015 Oct. 5; 54(41):12029-33. DNA nanoclew may have palindromic sequences to be partially complementary to one or more of the polynucleotides of the present invention described elsewhere herein. A DNA nanoclew may be coated, e.g., coated with PEI to induce endosomal escape.

### Metal Nanoparticles

[0268] In some embodiments, the delivery vehicles comprise gold nanoparticles (also referred to as AuNPs or colloidal gold). Gold nanoparticles may form complex with cargos, e.g., polynucleotides and/or polypeptides of the present invention described elsewhere herein. Gold nanoparticles may be coated, e.g., coated in a silicate and an endosomal disruptive polymer, PAsp(DET). Examples of gold nanoparticles include AuraSense Therapeutics' Spherical Nucleic Acid (SNA™) constructs, and those described in Mout R, et al. (2017). ACS Nano 11:2452-8; Lee K, et al. (2017). Nat Biomed Eng 1:889-901. Other metal nanoparticles can also be complexed with cargo(s). Such metal particles include tungsten, palladium, rhodium, platinum, and iridium particles. Other non-limiting, exemplary metal nanoparticles are described in US 20100129793.

iTOP

[0269] In some embodiments, the delivery vehicles comprise iTOP. iTOP refers to a combination of small molecules, drives the highly efficient intracellular delivery of native proteins, independent of any transduction peptide. iTOP may be used for induced transduction by osmocytosis and propanebetaine, using NaCl-mediated hyperosmolality together with a transduction compound (propanebetaine) to trigger macropinocytotic uptake into cells of extracellular macromolecules. Examples of iTOP methods and reagents include those described in D'Astolfo D S, Pagliero R J, Pras A, et al. (2015). Cell 161:674-690.

### Polymer-Based Particles

[0270] In some embodiments, the delivery vehicles may comprise polymer-based particles (e.g., nanoparticles). In some embodiments, the polymer-based particles may mimic a viral mechanism of membrane fusion. The polymer-based particles may be a synthetic copy of Influenza virus machinery and form transfection complexes with various types of nucleic acids (siRNA, miRNA, plasmid DNA or shRNA, mRNA) that cells take up via the endocytosis pathway, a process that involves the formation of an acidic compartment. The low pH in late endosomes acts as a chemical switch that renders the particle surface hydrophobic and facilitates membrane crossing. Once in the cytosol, the particle releases its payload for cellular action. This Active Endosome Escape technology is safe and maximizes transfection efficiency as it is using a natural uptake pathway. In some embodiments, the polymer-based particles may comprise alkylated and carboxyalkylated branched polyethylenimine. In some examples, the polymer-based particles are VIROMER, e.g., VIROMER RNAi, VIROMER RED, VIROMER mRNA, VIROMER CRISPR. Example methods of delivering the polynucleotides and/or polypeptides of the present invention described elsewhere herein include those described in Bawage S S et al., Synthetic mRNA expressed Cas13a mitigates RNA virus infections, www.biorxiv.org/content/10.1101/370460v1.full doi: doi.org/10.1101/370460, Viromer® RED, a powerful tool for transfection of keratinocytes. doi: 10.13140/RG.2.2.16993.61281, Viromer® Transfection—Factbook 2018: technology, product overview, users' data., doi:10.13140/RG.2.2.23912.16642. Other exemplary and non-limiting polymeric particles are described in US 20170079916, US 20160367686, US 20110212179, US 20130302401, 6,007,845, 5,855,913, 5,985,309, 5,543,158, WO2012135025, US 20130252281, US 20130245107, US 20130244279; US 20050019923, and/or 20080267903.

### Streptolvsin O (SLO)

[0271] The delivery vehicles may be streptolysin O (SLO). SLO is a toxin produced by Group A streptococci that works by creating pores in mammalian cell membranes. SLO may act in a reversible manner, which allows for the delivery of proteins (e.g., up to 100 kDa) to the cytosol of cells without compromising overall viability. Examples of SLO include those described in Sierig G, et al. (2003). Infect Immun 71:446-55; Walev I, et al. (2001). Proc Natl Acad Sci USA 98:3185-90; Teng K W, et al. (2017). Elife 6:e25460.

### Multifunctional Envelope-Type Nanodevice (MEND)

[0272] The delivery vehicles may comprise multifunctional envelope-type nanodevices (MENDs). MENDs may comprise condensed plasmid DNA, a PLL core, and a lipid film shell. A MEND may further comprise cell-penetrating peptide (e.g., stearyl octaarginine). The cell penetrating peptide may be in the lipid shell. The lipid envelope may be modified with one or more functional components, e.g., one or more of polyethylene glycol (e.g., to increase vascular circulation time), ligands for targeting of specific tissues/cells, additional cell-penetrating peptides (e.g., for greater cellular delivery), lipids to enhance endosomal escape, and nuclear delivery tags. In some examples, the MEND may be a tetra-lamellar MEND (T-MEND), which may target the cellular nucleus and mitochondria. In certain examples, a MEND may be a PEG-peptide-DOPE-conjugated MEND (PPD-MEND), which may target bladder cancer cells. Examples of MENDs include those described in Kogure K, et al. (2004). J Control Release 98:317-23; Nakamura T, et al. (2012). Acc Chem Res 45:1113-21.

### Lipid-Coated Mesoporous Silica Particles

[0273] The delivery vehicles may comprise lipid-coated mesoporous silica particles. Lipid-coated mesoporous silica particles may comprise a mesoporous silica nanoparticle core and a lipid membrane shell. The silica core may have a large internal surface area, leading to high cargo loading capacities. In some embodiments, pore sizes, pore chemistry, and overall particle sizes may be modified for loading different types of cargos. The lipid coating of the particle may also be modified to maximize cargo loading, increase circulation times, and provide precise targeting and cargo release. Examples of lipid-coated mesoporous silica particles include those described in Du X, et al. (2014). Biomaterials 35:5580-90; Durfee P N, et al. (2016). ACS Nano 10:8325-45.

### Inorganic Nanoparticles

[0274] The delivery vehicles may comprise inorganic nanoparticles. Examples of inorganic nanoparticles include carbon nanotubes (CNTs) (e.g., as described in Bates K and Kostarelos K. (2013). Adv Drug Deliv Rev 65:2023-33.), bare mesoporous silica nanoparticles (MSNPs) (e.g., as described in Luo G F, et al. (2014). Sci Rep 4:6064), and dense silica nanoparticles (SiNPs) (as described in Luo D and Saltzman W M. (2000). Nat Biotechnol 18:893-5).

### Exosomes

[0275] The delivery vehicles may comprise exosomes. Exosomes include membrane bound extracellular vesicles, which can be used to contain and deliver various types of biomolecules, such as proteins, carbohydrates, lipids, and nucleic acids, and complexes thereof (e.g., RNPs). Examples of exosomes include those described in Schroeder A, et al., J Intern Med. 2010 January; 267(1):9-21; El-Andaloussi S, et al., Nat Protoc. 2012 December; 7(12):2112-26; Uno Y, et al., Hum Gene Ther. 2011 June; 22(6):711-9; Zou W, et al., Hum Gene Ther. 2011 April; 22(4):465-75.

[0276] In some examples, the exosome may form a complex (e.g., by binding directly or indirectly) to one or more components of the cargo. In certain examples, a molecule of an exosome may be fused with a first adapter protein and a component of the cargo may be fused with a second adapter protein. The first and the second adapter protein may specifically bind each other, thus associating the cargo with the exosome. Examples of such exosomes include those described in Ye Y, et al., Biomater Sci. 2020 Apr 28. doi: 10.1039/d0bm00427h.

[0277] Other non-limiting, exemplary exosomes include any of those set forth in Alvarez-Erviti et al. 2011, Nat Biotechnol 29: 341; [1401]; El-Andaloussi et al. (Nature Protocols 7:2112-2126(2012); and Wahlgren et al. (Nucleic Acids Research, 2012, Vol. 40, No. 17 e130).

### Spherical Nucleic Acids (SNAs)

[0278] In some embodiments, the delivery vehicle can be a SNA. SNAs are three dimensional nanostructures that can be composed of densely functionalized and highly oriented nucleic acids that can be covalently attached to the surface of spherical nanoparticle cores. The core of the spherical nucleic acid can impart the conjugate with specific chemical and physical properties, and it can act as a scaffold for assembling and orienting the oligonucleotides into a dense spherical arrangement that gives rise to many of their functional properties, distinguishing them from all other forms of matter. In some embodiments, the core is a crosslinked polymer. Non-limiting, exemplary SNAs can be any of those set forth in Cutler et al., J. Am. Chem. Soc. 2011 133:9254-9257, Hao et al., Small. 2011 7:3158-3162, Zhang et al., ACS Nano. 2011 5:6962-6970, Cutler et al., J. Am. Chem. Soc. 2012 134:1376-1391, Young et al., Nano Lett. 2012 12:3867-71, Zheng et al., Proc. Natl. Acad. Sci. USA. 2012 109:11975-80, Mirkin, Nanomedicine 2012 7:635-638 Zhang et al., J. Am. Chem. Soc. 2012 134:16488-1691, Weintraub, Nature 2013 495:S14-S16, Choi et al., Proc. Natl. Acad. Sci. USA. 2013 110(19):7625-7630, Jensen et al., Sci. Transl. Med. 5, 209ra152 (2013) and Mirkin, et al., and Small, 10:186-192.

### Self-Assembling Nanoparticles

[0279] In some embodiments, the delivery vehicle is a self-assembling nanoparticle. The self-assembling nanoparticles can contain one or more polymers. The self-assembling nanoparticles can be PEGylated. Self-assembling nanoparticles are known in the art. Non-limiting, exemplary self-assembling nanoparticles can be any as set forth in Schiffelers et al., Nucleic Acids Research, 2004, Vol. 32, No. 19, Bartlett et al. (PNAS, Sep. 25, 2007, vol. 104, no. 39; and Davis et al., Nature, Vol 464, 15 Apr. 2010.

### Supercharged Proteins

[0280] In some embodiments, the delivery vehicle can be a supercharged protein. As used herein “supercharged proteins” are a class of engineered or naturally occurring proteins with unusually high positive or negative net theoretical charge. Non-limiting, exemplary supercharged proteins can be any of those set forth in Lawrence et al., 2007, Journal of the American Chemical Society 129, 10110-10112.

### Targeted Delivery

[0281] In some embodiments, the delivery vehicle can allow for targeted delivery to a specific cell, tissue, organ, or system. In such embodiments, the delivery vehicle can include one or more targeting moieties that can direct targeted delivery of the cargo(s). In an embodiment, the delivery vehicle comprises a targeting moiety, such as active targeting of a lipid entity of the invention, e.g., lipid particle or nanoparticle or liposome or lipid bilayer of the invention comprising a targeting moiety for active targeting.

[0282] With regard to targeting moieties, mention is made of Deshpande et al., “Current trends in the use of liposomes for tumor targeting,” Nanomedicine (Lond). 8(9), doi:10.2217/nnm.13.118 (2013), and the documents it cites, all of which are incorporated herein by reference and the teachings of which can be applied and/or adapted for targeted delivery of one or more polynucleotides and/or polypeptides of the present invention described elsewhere herein. Mention is also made of International Patent Publication No. WO 2016/027264, and the documents it cites, all of which are incorporated herein by reference, the teachings of which can be applied and/or adapted for targeted delivery of one or more polynucleotides and/or polypeptides of the present invention described elsewhere herein. And mention is made of Lorenzer et al., “Going beyond the liver: Progress and challenges of targeted delivery of siRNA therapeutics,” Journal of Controlled Release, 203: 1-15 (2015), and the documents it cites, all of which are incorporated herein by reference, the teachings of which can be applied and/or adapted for targeted delivery of one or more polynucleotides and/or polypeptides of the present invention described elsewhere herein.

[0283] An actively targeting lipid particle or nanoparticle or liposome or lipid bilayer delivery system (generally as to embodiments of the invention, “lipid entity of the invention” delivery systems) are prepared by conjugating targeting moieties, including small molecule ligands, peptides and monoclonal antibodies, on the lipid or liposomal surface; for example, certain receptors, such as folate and transferrin (Tf) receptors (TfR), are overexpressed on many cancer cells and have been used to make liposomes tumor cell specific. Liposomes that accumulate in the tumor microenvironment can be subsequently endocytosed into the cells by interacting with specific cell surface receptors. To efficiently target liposomes to cells, such as cancer cells, it is useful that the targeting moiety have an affinity for a cell surface receptor and to link the targeting moiety in sufficient quantities to have optimum affinity for the cell surface receptors; and determining these embodiments are within the ambit of the skilled artisan. In the field of active targeting, there are a number of cell-, e.g., tumor-, specific targeting ligands.

[0284] Also, as to active targeting, with regard to targeting cell surface receptors such as cancer cell surface receptors, targeting ligands on liposomes can provide attachment of liposomes to cells, e.g., vascular cells, via a noninternalizing epitope; and this can increase the extracellular concentration of that which is being delivered, thereby increasing the amount delivered to the target cells. A strategy to target cell surface receptors, such as cell surface receptors on cancer cells, such as overexpressed cell surface receptors on cancer cells, is to use receptor-specific ligands or antibodies. Many cancer cell types display upregulation of tumor-specific receptors. For example, TfRs and folate receptors (FRs) are greatly overexpressed by many tumor cell types in response to their increased metabolic demand. Folic acid can be used as a targeting ligand for specialized delivery owing to its ease of conjugation to nanocarriers, its high affinity for FRs and the relatively low frequency of FRs, in normal tissues as compared with their overexpression in activated macrophages and cancer cells, e.g., certain ovarian, breast, lung, colon, kidney and brain tumors. Overexpression of FR on macrophages is an indication of inflammatory diseases, such as psoriasis, Crohn's disease, rheumatoid arthritis and atherosclerosis; accordingly, folate-mediated targeting of the invention can also be used for studying, addressing or treating inflammatory disorders, as well as cancers. Folate-linked lipid particles or nanoparticles or liposomes or lipid bilayers of the invention (“lipid entity of the invention”) deliver their cargo intracellularly through receptor-mediated endocytosis. Intracellular trafficking can be directed to acidic compartments that facilitate cargo release, and, most importantly, release of the cargo can be altered or delayed until it reaches the cytoplasm or vicinity of target organelles. Delivery of cargo using a lipid entity of the invention having a targeting moiety, such as a folate-linked lipid entity of the invention, can be superior to nontargeted lipid entity of the invention. The attachment of folate directly to the lipid head groups may not be favorable for intracellular delivery of folate-conjugated lipid entity of the invention, since they may not bind as efficiently to cells as folate attached to the lipid entity of the invention surface by a spacer, which can enter cancer cells more efficiently. A lipid entity of the invention coupled to folate can be used for the delivery of complexes of lipid, e.g., liposome, e.g., anionic liposome and virus or capsid or envelope or virus outer protein, such as those herein discussed such as adenovirus or AAV. Tf is a monomeric serum glycoprotein of approximately 80 KDa involved in the transport of iron throughout the body. Tf binds to the TfR and translocates into cells via receptor-mediated endocytosis. The expression of TfR can be higher in certain cells, such as tumor cells (as compared with normal cells) and is associated with the increased iron demand in rapidly proliferating cancer cells. Accordingly, the invention comprehends a TfR-targeted lipid entity of the invention, e.g., as to liver cells, liver cancer, breast cells such as breast cancer cells, colon such as colon cancer cells, ovarian cells such as ovarian cancer cells, head, neck and lung cells, such as head, neck and non-small-cell lung cancer cells, and cells of the mouth such as oral tumor cells.

[0285] Also, as to active targeting, a lipid entity of the invention can be multifunctional, i.e., employ more than one targeting moiety such as CPP, along with Tf; a bifunctional system, e.g., a combination of Tf and poly-L-arginine which can provide transport across the endothelium of the blood-brain barrier. EGFR is a tyrosine kinase receptor belonging to the ErbB family of receptors that mediates cell growth, differentiation and repair in cells, especially non-cancerous cells, but EGF is overexpressed in certain cells such as many solid tumors, including colorectal, non-small-cell lung cancer, squamous cell carcinoma of the ovary, kidney, head, pancreas, neck and prostate, and especially breast cancer. The invention comprehends EGFR-targeted monoclonal antibody(ies) linked to a lipid entity of the invention. HER-2 is often overexpressed in patients with breast cancer, and is also associated with lung, bladder, prostate, brain and stomach cancers. HER-2 is encoded by the ERBB2 gene. The invention comprehends a HER-2-targeting lipid entity of the invention, e.g., an anti-HER-2-antibody, or binding fragment thereof, a lipid entity of the invention, a HER-2-targeting-PEGylated lipid entity of the invention (e.g., having an anti-HER-2-antibody or binding fragment thereof), a HER-2-targeting-maleimide-PEG polymer lipid entity of the invention (e.g., having an anti-HER-2-antibody or binding fragment thereof). Upon cellular association, the receptor-antibody complex can be internalized by formation of an endosome for delivery to the cytoplasm.

[0286] With respect to receptor-mediated targeting, the skilled artisan takes into consideration ligand/target affinity and the quantity of receptors on the cell surface, and that PEGylation can act as a barrier against interaction with receptors. The use of antibody-lipid entity of the invention targeting can be advantageous. Multivalent presentation of targeting moieties can also increase the uptake and signaling properties of antibody fragments. In practice of the invention, the skilled person takes into account ligand density (e.g., high ligand densities on a lipid entity of the invention may be advantageous for increased binding to target cells). Preventing early by macrophages can be addressed with a sterically stabilized lipid entity of the invention and linking ligands to the terminus of molecules such as PEG, which is anchored in the lipid entity of the invention (e.g., lipid particle or nanoparticle or liposome or lipid bilayer). The microenvironment of a cell mass, such as a tumor microenvironment, can be targeted; for instance, it may be advantageous to target cell mass vasculature, such as the tumor vasculature microenvironment. Thus, the invention comprehends targeting VEGF. VEGF and its receptors are well-known proangiogenic molecules and are well-characterized targets for antiangiogenic therapy. Many small-molecule inhibitors of receptor tyrosine kinases, such as VEGFRs or basic FGFRs, have been developed as anticancer agents and the invention comprehends coupling any one or more of these peptides to a lipid entity of the invention, e.g., phage IVO peptide(s) (e.g., via or with a PEG terminus), tumor-homing peptide APRPG, such as APRPG-PEG-modified. VCAM, the vascular endothelium, plays a key role in the pathogenesis of inflammation, thrombosis and atherosclerosis. CAMs are involved in inflammatory disorders, including cancer, and are a logical target. E- and P-selectins, VCAM-1 and ICAMs, can be used to target a lipid entity of the invention., e.g., with PEGylation.

[0287] Matrix metalloproteases (MMPs) belong to the family of zinc-dependent endopeptidases. They are involved in tissue remodeling, tumor invasiveness, resistance to apoptosis and metastasis. There are four MMP inhibitors called TIMP1-4, which determine the balance between tumor growth inhibition and metastasis; a protein involved in the angiogenesis of tumor vessels is MT1-MMP, expressed on newly formed vessels and tumor tissues. The proteolytic activity of MT1-MMP cleaves proteins, such as fibronectin, elastin, collagen and laminin, at the plasma membrane and activates soluble MMPs, such as MMP-2, which degrades the matrix. An antibody or fragment thereof such as a Fab′ fragment can be used in the practice of the invention, such as for an antihuman MT1-MMP monoclonal antibody linked to a lipid entity of the invention, e.g., via a spacer such as a PEG spacer. ap-integrins or integrins are a group of transmembrane glycoprotein receptors that mediate attachment between a cell and its surrounding tissues or extracellular matrix.

[0288] Integrins contain two distinct chains (heterodimers) called α- and β-subunits. The tumor tissue-specific expression of integrin receptors can be utilized for targeted delivery in the invention, e.g., whereby the targeting moiety can be an RGD peptide such as a cyclic RGD.

[0289] Aptamers are ssDNA or RNA oligonucleotides that impart high affinity and specific recognition of the target molecules by electrostatic interactions, hydrogen bonding and hydrophobic interactions as opposed to the Watson-Crick base pairing, which is typical for the bonding interactions of oligonucleotides. Aptamers as a targeting moiety can have advantages over antibodies: aptamers can demonstrate higher target antigen recognition as compared with antibodies; aptamers can be more stable and smaller in size as compared with antibodies; aptamers can be easily synthesized and chemically modified for molecular conjugation; and aptamers can be changed in sequence for improved selectivity and can be developed to recognize poorly immunogenic targets. Such moieties as a sgc8 aptamer can be used as a targeting moiety (e.g., via covalent linking to the lipid entity of the invention, e.g., via a spacer, such as a PEG spacer).

[0290] Also, as to active targeting, the invention also comprehends intracellular delivery. Since liposomes follow the endocytic pathway, they are entrapped in the endosomes (pH 6.5-6) and subsequently fuse with lysosomes (pH<5), where they undergo degradation that results in a lower therapeutic potential. The low endosomal pH can be taken advantage of to escape degradation. Fusogenic lipids or peptides, which destabilize the endosomal membrane after the conformational transition/activation at a lowered pH. Amines are protonated at an acidic pH and cause endosomal swelling and rupture by a buffer effect Unsaturated dioleoylphosphatidylethanolamine (DOPE) readily adopts an inverted hexagonal shape at a low pH, which causes fusion of liposomes to the endosomal membrane. This process destabilizes a lipid entity containing DOPE and releases the cargo into the cytoplasm; fusogenic lipid GALA, cholesteryl-GALA and PEG-GALA may show a highly efficient endosomal release; a pore-forming protein listeriolysin O may provide an endosomal escape mechanism; and histidine-rich peptides have the ability to fuse with the endosomal membrane, resulting in pore formation, and can buffer the proton pump causing membrane lysis.

[0291] The invention comprehends a lipid entity of the invention modified with CPP(s), for intracellular delivery that may proceed via energy dependent macropinocytosis followed by endosomal escape. The invention further comprehends organelle-specific targeting. A lipid entity of the invention surface-functionalized with the triphenylphosphonium (TPP) moiety or a lipid entity of the invention with a lipophilic cation, rhodamine 123 can be effective in delivery of cargo to mitochondria. DOPE/sphingomyelin/stearyl-octa-arginine can delivers cargos to the mitochondrial interior via membrane fusion. A lipid entity of the invention surface modified with a lysosomotropic ligand, octadecyl rhodamine B can deliver cargo to lysosomes. Ceramides are useful in inducing lysosomal membrane permeabilization; the invention comprehends intracellular delivery of a lipid entity of the invention having a ceramide. The invention further comprehends a lipid entity of the invention targeting the nucleus, e.g., via a DNA-intercalating moiety. The invention also comprehends multifunctional liposomes for targeting, i.e., attaching more than one functional group to the surface of the lipid entity of the invention, for instance to enhances accumulation in a desired site and/or promotes organelle-specific delivery and/or target a particular type of cell and/or respond to the local stimuli such as temperature (e.g., elevated), pH (e.g., decreased), respond to externally applied stimuli such as a magnetic field, light, energy, heat or ultrasound and/or promote intracellular delivery of the cargo. All of these are considered actively targeting moieties.

[0292] It should be understood that as to each possible targeting or active targeting moiety herein-discussed, there is an embodiment of the invention wherein the delivery system comprises such a targeting or active targeting moiety. Likewise, Table 2 provides exemplary targeting moieties that can be used in the practice of the invention an as to each an embodiment of the invention provides a delivery system that comprises such a targeting moiety.

TABLE 2

| Targeting Moiety | Target Molecule | Target Cell or Tissue |
|---|---|---|
| folate | folate receptor | cancer cells |
| transferrin | transferrin receptor | cancer cells |
| Antibody CC52 | rat CC531 | rat colon adenocarcinoma CC531 |
| anti- HER2 antibody | HER2 | HER2 -overexpressing tumors |
| anti-GD2 | GD2 | neuroblastoma, melanoma |
| anti-EGFR | EGFR | tumor cells overexpressing EGFR |
| pH-dependent fusogenic | | ovarian carcinoma |
| peptide diINF-7 | | |
| anti-VEGFR | VEGF Receptor | tumor vasculature |
| anti-CD19 | CD19 (B cell marker) | leukemia, lymphoma |
| cell-penetrating peptide | | blood-brain barrier |
| cyclic arginine-glycine- | avβ3 | glioblastoma cells, human |
| aspartic acid-tyrosine- | | umbilical vein endothelial cells, |
| cysteine peptide | | tumor angiogenesis |
| (c(RGDyC)-LP) (SEQ | | |
| ID NO: 16305) | | |
| ASSHN peptide | | endothelial progenitor cells; anti- |
| | | cancer |
| PR_b peptide | α₅β₁ integrin | cancer cells |
| AG86 peptide | α₆β₄ integrin | cancer cells |
| KCCYSL (P6.1 | HER-2 receptor | cancer cells |
| peptide) (SEQ ID NO: | | |
| 16306) | | |
| affinity peptide LN | Aminopeptidase N | APN-positive tumor |
| (YEVGHRC) (SEQ ID | (APN/CD13) | |
| NO: 16307 | | |
| synthetic somatostatin | Somatostatin receptor 2 | breast cancer |
| analogue | (SSTR2) | |
| anti-CD20 monoclonal | B-lymphocytes | B cell lymphoma |
| antibody | | |

[0293] Thus, in an embodiment of the delivery system, the targeting moiety comprises a receptor ligand, such as, for example, hyaluronic acid for CD44 receptor, galactose for hepatocytes, or antibody or fragment thereof such as a binding antibody fragment against a desired surface receptor, and as to each of a targeting moiety comprising a receptor ligand, or an antibody or fragment thereof such as a binding fragment thereof, such as against a desired surface receptor, there is an embodiment of the invention wherein the delivery system comprises a targeting moiety comprising a receptor ligand, or an antibody or fragment thereof such as a binding fragment thereof, such as against a desired surface receptor, or hyaluronic acid for CD44 receptor, galactose for hepatocytes (see, e.g., Surace et al, “Lipoplexes targeting the CD44 hyaluronic acid receptor for efficient transfection of breast cancer cells,” J. Mol Pharm 6(4):1062-73; doi: 10.1021/mp800215d (2009); Sonoke et al, “Galactose-modified cationic liposomes as a liver-targeting delivery system for small interfering RNA,” Biol Pharm Bull. 34(8):1338-42 (2011); Torchilin, “Antibody-modified liposomes for cancer chemotherapy,” Expert Opin. Drug Deliv. 5 (9), 1003-1025 (2008); Manjappa et al, “Antibody derivatization and conjugation strategies: application in preparation of stealth immunoliposome to target chemotherapeutics to tumor,” J. Control. Release 150 (1), 2-22 (2011); Sofou S “Antibody-targeted liposomes in cancer therapy and imaging,” Expert Opin. Drug Deliv. 5 (2): 189-204 (2008); Gao J et al, “Antibody-targeted immunoliposomes for cancer treatment,” Mini. Rev. Med. Chem. 13(14): 2026-2035 (2013); Molavi et al, “Anti-CD30 antibody conjugated liposomal doxorubicin with significantly improved therapeutic efficacy against anaplastic large cell lymphoma,” Biomaterials 34(34):8718-25 (2013), each of which and the documents cited therein are hereby incorporated herein by reference), the teachings of which can be applied and/or adapted for targeted delivery of one or more CRISPR-Cas molecules described herein.

[0294] Other exemplary targeting moieties are described elsewhere herein, such as epitope tags and the like.

### Responsive Delivery

[0295] In some embodiments, the delivery vehicle can allow for responsive delivery of the cargo(s), e.g., one or more polynucleotides and/or polypeptides of the present invention described elsewhere herein. Responsive delivery, as used in this context herein, refers to delivery of cargo(s) by the delivery vehicle in response to an external stimuli. Examples of suitable stimuli include, without limitation, an energy (light, heat, cold, and the like), a chemical stimuli (e.g. chemical composition, etc.), and a biologic or physiologic stimuli (e.g. environmental pH, osmolarity, salinity, biologic molecule, etc.). In some embodiments, the targeting moiety can be responsive to an external stimuli and facilitate responsive delivery. In other embodiments, responsiveness is determined by a non-targeting moiety component of the delivery vehicle.

[0296] The delivery vehicle can be stimuli-sensitive, e.g., sensitive to an externally applied stimuli, such as magnetic fields, ultrasound or light; and pH-triggering can also be used, e.g., a labile linkage can be used between a hydrophilic moiety such as PEG and a hydrophobic moiety such as a lipid entity of the invention, which is cleaved only upon exposure to the relatively acidic conditions characteristic of the a particular environment or microenvironment such as an endocytic vacuole or the acidotic tumor mass. pH-sensitive copolymers can also be incorporated in embodiments of the invention can provide shielding; diortho esters, vinyl esters, cysteine-cleavable lipopolymers, double esters and hydrazones are a few examples of pH-sensitive bonds that are quite stable at pH 7.5, but are hydrolyzed relatively rapidly at pH 6 and below, e.g., a terminally alkylated copolymer of N-isopropylacrylamide and methacrylic acid that copolymer facilitates destabilization of a lipid entity of the invention and release in compartments with decreased pH value; or, the invention comprehends ionic polymers for generation of a pH-responsive lipid entity of the invention (e.g., poly(methacrylic acid), poly(diethylaminoethyl methacrylate), poly(acrylamide) and poly(acrylic acid)).

[0297] Temperature-triggered delivery is also within the ambit of the invention. Many pathological areas, such as inflamed tissues and tumors, show a distinctive hyperthermia compared with normal tissues. Utilizing this hyperthermia is an attractive strategy in cancer therapy since hyperthermia is associated with increased tumor permeability and enhanced uptake. This technique involves local heating of the site to increase microvascular pore size and blood flow, which, in turn, can result in an increased extravasation of embodiments of the invention. Temperature-sensitive lipid entity of the invention can be prepared from thermosensitive lipids or polymers with a low critical solution temperature. Above the low critical solution temperature (e.g., at site such as tumor site or inflamed tissue site), the polymer precipitates, disrupting the liposomes to release. Lipids with a specific gel-to-liquid phase transition temperature are used to prepare these lipid entities of the invention; and a lipid for a thermosensitive embodiment can be dipalmitoylphosphatidylcholine. Thermosensitive polymers can also facilitate destabilization followed by release, and a useful thermosensitive polymer is poly (N-isopropylacrylamide). Another temperature triggered system can employ lysolipid temperature-sensitive liposomes.

[0298] The invention also comprehends redox-triggered delivery. The difference in redox potential between normal and inflamed or tumor tissues, and between the intra- and extracellular environments has been exploited for delivery, e.g., GSH is a reducing agent abundant in cells, especially in the cytosol, mitochondria and nucleus. The GSH concentrations in blood and extracellular matrix are just one out of 100 to one out of 1000 of the intracellular concentration, respectively. This high redox potential difference caused by GSH, cysteine and other reducing agents can break the reducible bonds, destabilize a lipid entity of the invention and result in release of payload. The disulfide bond can be used as the cleavable/reversible linker in a lipid entity of the invention, because it causes sensitivity to redox owing to the disulfideto-thiol reduction reaction; a lipid entity of the invention can be made reduction sensitive by using two (e.g., two forms of a disulfide-conjugated multifunctional lipid as cleavage of the disulfide bond (e.g., via tris(2-carboxyethyl)phosphine, dithiothreitol, L-cysteine or GSH), can cause removal of the hydrophilic head group of the conjugate and alter the membrane organization leading to release of payload. Calcein release from reduction-sensitive lipid entity of the invention containing a disulfide conjugate can be more useful than a reduction-insensitive embodiment.

[0299] Enzymes can also be used as a trigger to release payload. Enzymes, including MMPs (e.g., MMP2), phospholipase A2, alkaline phosphatase, transglutaminase or phosphatidylinositol-specific phospholipase C, have been found to be overexpressed in certain tissues, e.g., tumor tissues. In the presence of these enzymes, specially engineered enzyme-sensitive lipid entity of the invention can be disrupted and release the payload. an MMP2-cleavable octapeptide (Gly-Pro-Leu-Gly-Ile-Ala-Gly-Gln) (SEQ ID NO: 16308) can be incorporated into a linker, and can have antibody targeting, e.g., antibody 2C5.

[0300] The invention also comprehends light- or energy-triggered delivery, e.g., the lipid entity of the invention can be light-sensitive, such that light or energy can facilitate structural and conformational changes, which lead to direct interaction of the lipid entity of the invention with the target cells via membrane fusion, photo-isomerism, photofragmentation or photopolymerization; such a moiety therefor can be benzoporphyrin photosensitizer. Ultrasound can be a form of energy to trigger delivery; a lipid entity of the invention with a small quantity of particular gas, including air or perfluorated hydrocarbon can be triggered to release with ultrasound, e.g., low-frequency ultrasound (LFUS). Magnetic delivery: A lipid entity of the invention can be magnetized by incorporation of magnetites, such as Fe3O4 or γ-Fe2O3, e.g., those that are less than 10 nm in size. Targeted delivery can be then by exposure to a magnetic field.

### Cells

[0301] In some embodiments, the present disclosure provides cells and organisms comprising the compositions, such as the polynucleotides, polypeptides, vectors, delivery vehicles, etc. described herein. In some embodiments, the cells are producer cells and are capable of generating virus particles or other delivery vehicles (e.g., exosomes) containing the one or more polynucleotides and/or polypeptides of the present invention. The cells may be in tissue, organ, or isolated cells. Such cells may be of a unique type of cells or a group of different types of cells, such as cultured cell lines, primary cells and proliferative cells. The cells may be prokaryotic cells, lower eukaryotic cells such as yeast, and other eukaryotic cells such as insect cells, plant and mammalian (e.g., human or non-human) cells, as well as cells capable of producing the vector of the invention (e.g., 293, HER96, PERC.6 cells, Vero, HeLa, CEF, duck cell lines, etc.). The cells may include cells which can be or has been the recipient of the vector described herein as well as progeny of such cells. Host cells can be cultured in conventional fermentation bioreactors, flasks, and petri plates. Culturing can be carried out at a temperature, pH and oxygen content appropriate for a given cell. No attempts will be made here to describe in detail the various prokaryote and eukaryotic host cells and methods known for the production of the polypeptides and vectors herein.

### Pharmaceutical Formulations

[0302] Also described herein are pharmaceutical formulations that can contain an amount, effective amount, and/or least effective amount, and/or therapeutically effective amount of one or more compounds, molecules, compositions, vectors, vector systems, cells, or a combination thereof (which are also referred to as the primary active agent or ingredient elsewhere herein) described in greater detail elsewhere herein and a pharmaceutically acceptable carrier or excipient. As used herein, “pharmaceutical formulation” refers to the combination of an active agent, compound, or ingredient with a pharmaceutically acceptable carrier or excipient, making the composition suitable for diagnostic, therapeutic, or preventive use in vitro, in vivo, or ex vivo. As used herein, “pharmaceutically acceptable carrier or excipient” refers to a carrier or excipient that is useful in preparing a pharmaceutical formulation that is generally safe, non-toxic, and is neither biologically or otherwise undesirable, and includes a carrier or excipient that is acceptable for veterinary use as well as human pharmaceutical use. A “pharmaceutically acceptable carrier or excipient” as used in the specification and claims includes both one and more than one such carrier or excipient. When present, the compound can optionally be present in the pharmaceutical formulation as a pharmaceutically acceptable salt. In some embodiments, the pharmaceutical formulation can include, such as an active ingredient, a polynucleotide, polypeptide, vector, delivery vehicle, and/or cell of the present invention described in greater detail elsewhere herein.

[0303] In some embodiments, the active ingredient is present as a pharmaceutically acceptable salt of the active ingredient. As used herein, “pharmaceutically acceptable salt” refers to any acid or base addition salt whose counter-ions are non-toxic to the subject to which they are administered in pharmaceutical doses of the salts. Suitable salts include, hydrobromide, iodide, nitrate, bisulfate, phosphate, isonicotinate, lactate, salicylate, acid citrate, tartrate, oleate, tannate, pantothenate, bitartrate, ascorbate, succinate, maleate, gentisinate, fumarate, gluconate, glucaronate, saccharate, formate, benzoate, glutamate, methanesulfonate, ethanesulfonate, benzenesulfonate, p-toluenesulfonate, camphorsulfonate, napthalenesulfonate, propionate, malonate, mandelate, malate, phthalate, and pamoate.

[0304] The pharmaceutical formulations described herein can be administered to a subject in need thereof via any suitable method or route to a subject in need thereof. Suitable administration routes can include, but are not limited to auricular (otic), buccal, conjunctival, cutaneous, dental, electro-osmosis, endocervical, endosinusial, endotracheal, enteral, epidural, extra-amniotic, extracorporeal, hemodialysis, infiltration, interstitial, intra-abdominal, intra-amniotic, intra-arterial, intra-articular, intrabiliary, intrabronchial, intrabursal, intracardiac, intracartilaginous, intracaudal, intracavernous, intracavitary, intracerebral, intracisternal, intracorneal, intracoronal (dental), intracoronary, intracorporus cavernosum, intradermal, intradiscal, intraductal, intraduodenal, intradural, intraepidermal, intraesophageal, intragastric, intragingival, intraileal, intralesional, intraluminal, intralymphatic, intramedullary, intrameningeal, intramuscular, intraocular, intraovarian, intrapericardial, intraperitoneal, intrapleural, intraprostatic, intrapulmonary, intrasinal, intraspinal, intrasynovial, intratendinous, intratesticular, intrathecal, intrathoracic, intratubular, intratumor, intratympanic, intrauterine, intravascular, intravenous, intravenous bolus, intravenous drip, intraventricular, intravesical, intravitreal, iontophoresis, irrigation, laryngeal, nasal, nasogastric, occlusive dressing technique, ophthalmic, oral, oropharyngeal, other, parenteral, percutaneous, periarticular, peridural, perineural, periodontal, rectal, respiratory (inhalation), retrobulbar, soft tissue, subarachnoid, subconjunctival, subcutaneous, sublingual, submucosal, topical, transdermal, transmucosal, transplacental, transtracheal, transtympanic, ureteral, urethral, and/or vaginal administration, and/or any combination of the above administration routes, which typically depends on the disease to be treated and/or the active ingredient(s).

[0305] Where appropriate, compounds, molecules, compositions, vectors, vector systems, cells, or a combination thereof described in greater detail elsewhere herein can be provided to a subject in need thereof as an ingredient, such as an active ingredient or agent, in a pharmaceutical formulation. As such, also described are pharmaceutical formulations containing one or more of the compounds and salts thereof, or pharmaceutically acceptable salts thereof described herein. Suitable salts include, hydrobromide, iodide, nitrate, bisulfate, phosphate, isonicotinate, lactate, salicylate, acid citrate, tartrate, oleate, tannate, pantothenate, bitartrate, ascorbate, succinate, maleate, gentisinate, fumarate, gluconate, glucaronate, saccharate, formate, benzoate, glutamate, methanesulfonate, ethanesulfonate, benzenesulfonate, p-toluenesulfonate, camphorsulfonate, napthalenesulfonate, propionate, malonate, mandelate, malate, phthalate, and pamoate.

[0306] In some embodiments, the subject in need thereof has or is suspected of having a viral infection or a symptom thereof. As used herein, “agent” refers to any substance, compound, molecule, and the like, which can be biologically active or otherwise can induce a biological and/or physiological effect on a subject to which it is administered to. As used herein, “active agent” or “active ingredient” refers to a substance, compound, or molecule, which is biologically active or otherwise, induces a biological or physiological effect on a subject to which it is administered to. In other words, “active agent” or “active ingredient” refers to a component or components of a composition to which the whole or part of the effect of the composition is attributed. An agent can be a primary active agent, or in other words, the component(s) of a composition to which the whole or part of the effect of the composition is attributed. An agent can be a secondary agent, or in other words, the component(s) of a composition to which an additional part and/or other effect of the composition is attributed.

### Pharmaceutically Acceptable Carriers and Secondary Ingredients and Agents

[0307] The pharmaceutical formulation can include a pharmaceutically acceptable carrier. Suitable pharmaceutically acceptable carriers include, but are not limited to water, salt solutions, alcohols, gum arabic, vegetable oils, benzyl alcohols, polyethylene glycols, gelatin, carbohydrates such as lactose, amylose or starch, magnesium stearate, talc, silicic acid, viscous paraffin, perfume oil, fatty acid esters, hydroxy methylcellulose, and polyvinyl pyrrolidone, which do not deleteriously react with the active composition.

[0308] The pharmaceutical formulations can be sterilized, and if desired, mixed with agents, such as lubricants, preservatives, stabilizers, wetting agents, emulsifiers, salts for influencing osmotic pressure, buffers, coloring, flavoring and/or aromatic substances, and the like which do not deleteriously react with the active compound.

[0309] In some embodiments, the pharmaceutical formulation can also include an effective amount of secondary active agents, including but not limited to, biologic agents or molecules including, but not limited to, e.g., polynucleotides, amino acids, peptides, polypeptides, antibodies, aptamers, ribozymes, hormones, immunomodulators, antipyretics, anxiolytics, antipsychotics, analgesics, antispasmodics, anti-inflammatories, anti-histamines, anti-infectives, chemotherapeutics, and combinations thereof. In some embodiments, the pharmaceutical formulation comprises an effective amount of one or more anti-viral agents. Exemplary antiviral-agents include without limitation, nucleoside analogues with reverse transcriptase activity (e.g., tenofovir, emtricitabine, lamivudine, abacavir, stavudine, didanosine, and zidovudine), nonnucleoside reverse transcriptase inhibitors (e.g., delavirdine, efavirenz, etravirine, nevirapine, and rilpivirine), protease inhibitors (atazanavir, darunavir, indinavir, ritonavir, tipranavir and many others), and miscellaneous agents such as maraviroc, enfuvirtide (fusion inhibitor), and integrase inhibitors (raltegravir, elvitegravir and dolutegravir), emdesivir, molnupiravir, Paxlovid (nirmatrelvir and ritonavir), Tecovirimat, seltamivir (oral), zanamivir (by inhalation) and peramivir (intravenous), baloxavir (oral), valacyclovir, cidofovir, famciclovir, ganciclovir, valganciclovir, foscarnet, simeprevir, paritaprevir, grazoprevir, glecaprevir, sofosbuvir, dasabuvir, daclatasvir, elbasvir, lepidasvir, velpatsvir, ombitasvir, pibrentasvor, Alpha interferon, peginterferon, monoclonal antibodies targeting specific viruses, and any combination thereof.

### Effective Amounts

[0310] In some embodiments, the amount of the primary active agent and/or optional secondary agent can be an effective amount, least effective amount, and/or therapeutically effective amount. As used herein, “effective amount”, “effective concentration”, and/or the like refers to the amount, concentration, etc. of the primary and/or optional secondary agent included in the pharmaceutical formulation that achieve one or more therapeutic effects or desired effect. As used herein, “least effective”, “least effective concentration”, and/or the like amount refers to the lowest amount, concentration, etc. of the primary and/or optional secondary agent that achieves the one or more therapeutic or other desired effects. As used herein, “therapeutically effective amount”, “therapeutically effective concentration” and/or the like refers to the amount, concentration, etc. of the primary and/or optional secondary agent included in the pharmaceutical formulation that achieves one or more therapeutic effects. In some embodiments, the one or more therapeutic effects are inducing an immune response in a subject to which they are delivered, inducing a B- and/or T-cell response in a subject to which it is delivered, treating or preventing a viral infection in a subject to which it is delivered.

[0311] The effective amount, least effective amount, and/or therapeutically effective amount of the primary and optional secondary active agent described elsewhere herein contained in the pharmaceutical formulation can be any non-zero amount ranging from about 0 to 10, 20, 30, 40, 50, 60, 70, 80, 90, 100, 110, 120, 130, 140, 150, 160, 170, 180, 190, 200, 210, 220, 230, 240, 250, 260, 270, 280, 290, 300, 310, 320, 330, 340, 350, 360, 370, 380, 390, 400, 410, 420, 430, 440, 450, 460, 470, 480, 490, 500, 510, 520, 530, 540, 550, 560, 570, 580, 590, 600, 610, 620, 630, 640, 650, 660, 670, 680, 690, 700, 710, 720, 730, 740, 750, 760, 770, 780, 790, 800, 810, 820, 830, 840, 850, 860, 870, 880, 890, 900, 910, 920, 930, 940, 950, 960, 970, 980, 990, 1000 pg, ng, μg, mg, or g or be any numerical value or subrange within any of these ranges.

[0312] In some embodiments, the effective amount, least effective amount, and/or therapeutically effective amount can be an effective concentration, least effective concentration, and/or therapeutically effective concentration, which can each be any non-zero amount ranging from about 0 to 10, 20, 30, 40, 50, 60, 70, 80, 90, 100, 110, 120, 130, 140, 150, 160, 170, 180, 190, 200, 210, 220, 230, 240, 250, 260, 270, 280, 290, 300, 310, 320, 330, 340, 350, 360, 370, 380, 390, 400, 410, 420, 430, 440, 450, 460, 470, 480, 490, 500, 510, 520, 530, 540, 550, 560, 570, 580, 590, 600, 610, 620, 630, 640, 650, 660, 670, 680, 690, 700, 710, 720, 730, 740, 750, 760, 770, 780, 790, 800, 810, 820, 830, 840, 850, 860, 870, 880, 890, 900, 910, 920, 930, 940, 950, 960, 970, 980, 990, 1000 pM, nM, μM, mM, or M or be any numerical value or subrange within any of these ranges.

[0313] In other embodiments, the effective amount, least effective amount, and/or therapeutically effective amount of the primary and optional secondary active agent be any non-zero amount ranging from about 0 to 10, 20, 30, 40, 50, 60, 70, 80, 90, 100, 110, 120, 130, 140, 150, 160, 170, 180, 190, 200, 210, 220, 230, 240, 250, 260, 270, 280, 290, 300, 310, 320, 330, 340, 350, 360, 370, 380, 390, 400, 410, 420, 430, 440, 450, 460, 470, 480, 490, 500, 510, 520, 530, 540, 550, 560, 570, 580, 590, 600, 610, 620, 630, 640, 650, 660, 670, 680, 690, 700, 710, 720, 730, 740, 750, 760, 770, 780, 790, 800, 810, 820, 830, 840, 850, 860, 870, 880, 890, 900, 910, 920, 930, 940, 950, 960, 970, 980, 990, 1000 IU or be any numerical value or subrange within any of these ranges.

[0314] In some embodiments, the primary and/or the optional secondary active agent present in the pharmaceutical formulation can be any non-zero amount ranging from about 0 to 0.001, 0.002, 0.003, 0.004, 0.005, 0.006, 0.007, 0.008, 0.009, 0.01, 0.02, 0.03, 0.04, 0.05, 0.06, 0.07, 0.08, 0.09, 0.1, 0.11, 0.12, 0.13, 0.14, 0.15, 0.16, 0.17, 0.18, 0.19, 0.2, 0.21, 0.22, 0.23, 0.24, 0.25, 0.26, 0.27, 0.28, 0.29, 0.3, 0.31, 0.32, 0.33, 0.34, 0.35, 0.36, 0.37, 0.38, 0.39, 0.4, 0.41, 0.42, 0.43, 0.44, 0.45, 0.46, 0.47, 0.48, 0.49, 0.5, 0.51, 0.52, 0.53, 0.54, 0.55, 0.56, 0.57, 0.58, 0.59, 0.6, 0.61, 0.62, 0.63, 0.64, 0.65, 0.66, 0.67, 0.68, 0.69, 0.7, 0.71, 0.72, 0.73, 0.74, 0.75, 0.76, 0.77, 0.78, 0.79, 0.8, 0.81, 0.82, 0.83, 0.84, 0.85, 0.86, 0.87, 0.88, 0.89, 0.9, 0.91, 0.92, 0.93, 0.94, 0.95, 0.96, 0.97, 0.98, 0.9, to 1, 2, 3, 4, 5, 6, 7, 8, 9, 10, 11, 12, 13, 14, 15, 16, 17, 18, 19, 20, 21, 22, 23, 24, 25, 26, 27, 28, 29, 30, 31, 32, 33, 34, 35, 36, 37, 38, 39, 40, 41, 42, 43, 44, 45, 46, 47, 48, 49, 50, 51, 52, 53, 54, 55, 56, 57, 58, 59, 60, 61, 62, 63, 64, 65, 66, 67, 68, 69, 70, 71, 72, 73, 74, 75, 76, 77, 78, 79, 80, 81, 82, 83, 84, 85, 86, 87, 88, 89, 90, 91, 92, 93, 94, 95, 96, 97, 98, 99, 99.1, 99.2, 99.3, 99.4, 99.5, 99.6, 99.7, 99.8, 99.9% w/w, v/v, or w/v of the pharmaceutical formulation or be any numerical value or subrange within any of these ranges.

[0315] In some embodiments where a cell or cell population is present in the pharmaceutical formulation (e.g., as a primary and/or or secondary active agent), the effective amount of cells can be any amount ranging from about 1 or 2 cells to 1×10¹ cells/mL, 1×10²⁰ cells/mL or more, such as about 1×10¹ cells/mL, 1×10² cells/mL, 1×10³ cells/mL, 1×10⁴ cells/mL, 1×10⁵ cells/mL, 1×10⁶ cells/mL, 1×10⁷ cells/mL, 1×10⁸ cells/mL, 1×10⁹ cells/mL, 1×10¹⁰ cells/mL, 1×10¹¹ cells/mL, 1×10¹² cells/mL, 1×10¹³ cells/mL, 1×10¹⁴ cells/mL, 1×10¹⁵ cells/mL, 1×10¹⁶ cells/mL, 1×10¹⁷ cells/mL, 1×10¹⁸ cells/mL, 1×10¹⁹ cells/mL, to/or about 1×10²⁰/cells/mL or any numerical value or subrange within any of these ranges.

[0316] In some embodiments, the amount or effective amount, particularly where an infective particle is being delivered (e.g., a virus particle having the primary or secondary agent as a cargo), the effective amount of virus particles can be expressed as a titer (plaque forming units per unit of volume) or as a MOI (multiplicity of infection). In some embodiments, the effective amount can be about 1×10¹ particles per pL, nL, μL, mL, or L to 1×10²⁰/particles per pL, nL, μL, mL, or L or more, such as about 1×10¹, 1×10², 1×10³, 1×10⁴, 1×10⁵, 1×10⁶, 1×10⁷, 1×10⁸, 1×10⁹, 1×10¹⁰, 1×10¹¹, 1×10¹², 1×10¹³, 1×10¹⁴, 1×10¹⁵, 1×10¹⁶, 1×10¹⁷, 1×10¹⁸, 1×10¹⁹, to/or about 1×10²⁰ particles per pL, nL, μL, mL, or L. In some embodiments, the effective titer can be about 1×10¹ transforming units per pL, nL, μL, mL, or L to 1×10²⁰/transforming units per pL, nL, μL, mL, or L or more, such as about 1×10¹, 1×10², 1×10³, 1×10⁴, 1×10⁵, 1×10⁶, 1×10⁷, 1×10⁸, 1×10⁹, 1×10¹⁰, 1×10¹¹, 1×10¹², 1×10¹³, 1×10¹⁴, 1×10¹⁵, 1×10¹⁶, 1×10¹⁷, 1×10¹⁸, 1×10¹⁹, to/or about 1×10²⁰ transforming units per pL, nL, μL, mL, or L or any numerical value or subrange within these ranges. In some embodiments, the MOI of the pharmaceutical formulation can range from about 0.1 to 10 or more, such as 0.1, 0.2, 0.3, 0.4, 0.5, 0.6, 0.7, 0.8, 0.9, 1, 1.1, 1.2, 1.3, 1.4, 1.5, 1.6, 1.7, 1.8, 1.9, 2, 2.1, 2.2, 2.3, 2.4, 2.5, 2.6, 2.7, 2.8, 2.9, 3, 3.1, 3.2, 3.3, 3.4, 3.5, 3.6, 3.7, 3.8, 3.9, 4, 4.1, 4.2, 4.3, 4.4, 4.5, 4.6, 4.7, 4.8, 4.9, 5, 5.1, 5.2, 5.3, 5.4, 5.5, 5.6, 5.7, 5.8, 5.9, 6, 6.1, 6.2, 6.3, 6.4, 6.5, 6.6, 6.7, 6.8, 6.9, 7, 7.1, 7.2, 7.3, 7.4, 7.5, 7.6, 7.7, 7.8, 7.9, 8, 8.1, 8.2, 8.3, 8.4, 8.5, 8.6, 8.7, 8.8, 8.9, 9, 9.1, 9.2, 9.3, 9.4, 9.5, 9.6, 9.7, 9.8, 9.9, 10 or more or any numerical value or subrange within these ranges.

[0317] In some embodiments, the amount or effective amount of the one or more of the active agent(s) described herein contained in the pharmaceutical formulation can range from about 1 μg/kg to about 10 mg/kg based upon the bodyweight of the subject in need thereof or average bodyweight of the specific patient population to which the pharmaceutical formulation can be administered.

[0318] In embodiments where there is a secondary agent contained in the pharmaceutical formulation, the effective amount of the secondary active agent will vary depending on the secondary agent, the primary agent, the administration route, subject age, disease, stage of disease, among other things, which will be one of ordinary skill in the art.

[0319] When optionally present in the pharmaceutical formulation, the secondary active agent can be included in the pharmaceutical formulation or can exist as a stand-alone compound or pharmaceutical formulation that can be administered contemporaneously or sequentially with the compound, derivative thereof, or pharmaceutical formulation thereof.

[0320] In some embodiments, the effective amount of the secondary active agent, when optionally present, is any non-zero amount ranging from about 0 to 1, 2, 3, 4, 5, 6, 7, 8, 9, 10, 11, 12, 13, 14, 15, 16, 17, 18, 19, 20, 21, 22, 23, 24, 25, 26, 27, 28, 29, 30, 31, 32, 33, 34, 35, 36, 37, 38, 39, 40, 41, 42, 43, 44, 45, 46, 47, 48, 49, 50, 51, 52, 53, 54, 55, 56, 57, 58, 59, 60, 61, 62, 63, 64, 65, 66, 67, 68, 69, 70, 71, 72, 73, 74, 75, 76, 77, 78, 79, 80, 81, 82, 83, 84, 85, 86, 87, 88, 89, 90, 91, 92, 93, 94, 95, 96, 97, 98, 99, 99.1, 99.2, 99.3, 99.4, 99.5, 99.6, 99.7, 99.8, 99.9% w/w, v/v, or w/v of the total active agents present in the pharmaceutical formulation or any numerical value or subrange within these ranges. In additional embodiments, the effective amount of the secondary active agent is any non-zero amount ranging from about 0 to 1, 2, 3, 4, 5, 6, 7, 8, 9, 10, 11, 12, 13, 14, 15, 16, 17, 18, 19, 20, 21, 22, 23, 24, 25, 26, 27, 28, 29, 30, 31, 32, 33, 34, 35, 36, 37, 38, 39, 40, 41, 42, 43, 44, 45, 46, 47, 48, 49, 50, 51, 52, 53, 54, 55, 56, 57, 58, 59, 60, 61, 62, 63, 64, 65, 66, 67, 68, 69, 70, 71, 72, 73, 74, 75, 76, 77, 78, 79, 80, 81, 82, 83, 84, 85, 86, 87, 88, 89, 90, 91, 92, 93, 94, 95, 96, 97, 98, 99, 99.1, 99.2, 99.3, 99.4, 99.5, 99.6, 99.7, 99.8, 99.9% w/w, v/v, or w/v of the total pharmaceutical formulation or any numerical value or subrange within these ranges.

### Dosage Forms

[0321] In some embodiments, the pharmaceutical formulations described herein can be provided in a dosage form. The dosage form can be administered to a subject in need thereof. The dosage form can be effective generate specific concentration, such as an effective concentration, at a given site in the subject in need thereof. As used herein, “dose,” “unit dose,” or “dosage” can refer to physically discrete units suitable for use in a subject, each unit containing a predetermined quantity of the primary active agent, and optionally present secondary active ingredient, and/or a pharmaceutical formulation thereof calculated to produce the desired response or responses in association with its administration. In some embodiments, the given site is proximal to the administration site. In some embodiments, the given site is distal to the administration site. In some cases, the dosage form contains a greater amount of one or more of the active ingredients present in the pharmaceutical formulation than the final intended amount needed to reach a specific region or location within the subject to account for loss of the active components such as via first and second pass metabolism.

[0322] The dosage forms can be adapted for administration by any appropriate route. Appropriate routes include, but are not limited to, oral (including buccal or sublingual), rectal, intraocular, inhaled, intranasal, topical (including buccal, sublingual, or transdermal), vaginal, parenteral, subcutaneous, intramuscular, intravenous, internasal, and intradermal. Other appropriate routes are described elsewhere herein. Such formulations can be prepared by any method known in the art.

[0323] Dosage forms adapted for oral administration can discrete dosage units such as capsules, pellets or tablets, powders or granules, solutions, or suspensions in aqueous or non-aqueous liquids; edible foams or whips, or in oil-in-water liquid emulsions or water-in-oil liquid emulsions. In some embodiments, the pharmaceutical formulations adapted for oral administration also include one or more agents which flavor, preserve, color, or help disperse the pharmaceutical formulation. Dosage forms prepared for oral administration can also be in the form of a liquid solution that can be delivered as a foam, spray, or liquid solution. The oral dosage form can be administered to a subject in need thereof. Where appropriate, the dosage forms described herein can be microencapsulated.

[0324] The dosage form can also be prepared to prolong or sustain the release of any ingredient. In some embodiments, compounds, molecules, compositions, vectors, vector systems, cells, or a combination thereof described herein can be the ingredient whose release is delayed. In some embodiments the primary active agent is the ingredient whose release is delayed. In some embodiments, an optional secondary agent can be the ingredient whose release is delayed. Suitable methods for delaying the release of an ingredient include, but are not limited to, coating or embedding the ingredients in material in polymers, wax, gels, and the like. Delayed release dosage formulations can be prepared as described in standard references such as “Pharmaceutical dosage form tablets,” eds. Liberman et. al. (New York, Marcel Dekker, Inc., 1989), “Remington—The science and practice of pharmacy”, 20th ed., Lippincott Williams & Wilkins, Baltimore, MD, 2000, and “Pharmaceutical dosage forms and drug delivery systems”, 6th Edition, Ansel et al., (Media, PA: Williams and Wilkins, 1995). These references provide information on excipients, materials, equipment, and processes for preparing tablets and capsules and delayed release dosage forms of tablets and pellets, capsules, and granules. The delayed release can be anywhere from about an hour to about 3 months or more.

[0325] Examples of suitable coating materials include, but are not limited to, cellulose polymers such as cellulose acetate phthalate, hydroxypropyl cellulose, hydroxypropyl methylcellulose, hydroxypropyl methylcellulose phthalate, and hydroxypropyl methylcellulose acetate succinate; polyvinyl acetate phthalate, acrylic acid polymers and copolymers, and methacrylic resins that are commercially available under the trade name EUDRAGIT® (Roth Pharma, Westerstadt, Germany), zein, shellac, and polysaccharides.

[0326] Coatings may be formed with a different ratio of water-soluble polymer, water insoluble polymers, and/or pH dependent polymers, with or without water insoluble/water soluble non-polymeric excipient, to produce the desired release profile. The coating is either performed on the dosage form (matrix or simple) which includes, but is not limited to, tablets (compressed with or without coated beads), capsules (with or without coated beads), beads, particle compositions, “ingredient as is” formulated as, but not limited to, suspension form or as a sprinkle dosage form.

[0327] Where appropriate, the dosage forms described herein can be a liposome. In these embodiments, primary active ingredient(s), and/or optional secondary active ingredient(s), and/or pharmaceutically acceptable salt thereof where appropriate are incorporated into a liposome. In embodiments where the dosage form is a liposome, the pharmaceutical formulation is thus a liposomal formulation. The liposomal formulation can be administered to a subject in need thereof.

[0328] Dosage forms adapted for topical administration can be formulated as ointments, creams, suspensions, lotions, powders, solutions, pastes, gels, sprays, aerosols, or oils. In some embodiments for treatments of the eye or other external tissues, for example the mouth or the skin, the pharmaceutical formulations are applied as a topical ointment or cream. When formulated in an ointment, a primary active ingredient, optional secondary active ingredient, and/or pharmaceutically acceptable salt thereof where appropriate can be formulated with a paraffinic or water-miscible ointment base. In other embodiments, the primary and/or secondary active ingredient can be formulated in a cream with an oil-in-water cream base or a water-in-oil base. Dosage forms adapted for topical administration in the mouth include lozenges, pastilles, and mouth washes.

[0329] Dosage forms adapted for nasal or inhalation administration include aerosols, solutions, suspension drops, gels, or dry powders. In some embodiments, a primary active ingredient, optional secondary active ingredient, and/or pharmaceutically acceptable salt thereof where appropriate can be in a dosage form adapted for inhalation is in a particle-size-reduced form that is obtained or obtainable by micronization. In some embodiments, the particle size of the size reduced (e.g., micronized) compound or salt or solvate thereof, is defined by a D₅₀ value of about 0.5 to about 10 microns as measured by an appropriate method known in the art. Dosage forms adapted for administration by inhalation also include particle dusts or mists. Suitable dosage forms wherein the carrier or excipient is a liquid for administration as a nasal spray or drops include aqueous or oil solutions/suspensions of an active (primary and/or secondary) ingredient, which may be generated by various types of metered dose pressurized aerosols, nebulizers, or insufflators. The nasal/inhalation formulations can be administered to a subject in need thereof.

[0330] In some embodiments, the dosage forms are aerosol formulations suitable for administration by inhalation. In some of these embodiments, the aerosol formulation contains a solution or fine suspension of a primary active ingredient, secondary active ingredient, and/or pharmaceutically acceptable salt thereof where appropriate and a pharmaceutically acceptable aqueous or non-aqueous solvent. Aerosol formulations can be presented in single or multi-dose quantities in sterile form in a sealed container. For some of these embodiments, the sealed container is a single dose or multi-dose nasal or an aerosol dispenser fitted with a metering valve (e.g., metered dose inhaler), which is intended for disposal once the contents of the container have been exhausted.

[0331] Where the aerosol dosage form is contained in an aerosol dispenser, the dispenser contains a suitable propellant under pressure, such as compressed air, carbon dioxide, or an organic propellant, including but not limited to a hydrofluorocarbon. The aerosol formulation dosage forms in other embodiments are contained in a pump-atomizer. The pressurized aerosol formulation can also contain a solution or a suspension of a primary active ingredient, optional secondary active ingredient, and/or pharmaceutically acceptable salt thereof. In further embodiments, the aerosol formulation also contains co-solvents and/or modifiers incorporated to improve, for example, the stability and/or taste and/or fine particle mass characteristics (amount and/or profile) of the formulation. Administration of the aerosol formulation can be once daily or several times daily, for example 2, 3, 4, or 8 times daily, in which 1, 2, 3 or more doses are delivered each time. The aerosol formulations can be administered to a subject in need thereof.

[0332] For some dosage forms suitable and/or adapted for inhaled administration, the pharmaceutical formulation is a dry powder inhalable-formulations. In addition to a primary active agent, optional secondary active ingredient, and/or pharmaceutically acceptable salt thereof where appropriate, such a dosage form can contain a powder base such as lactose, glucose, trehalose, mannitol, and/or starch. In some of these embodiments, a primary active agent, secondary active ingredient, and/or pharmaceutically acceptable salt thereof where appropriate is in a particle-size reduced form. In further embodiments, a performance modifier, such as L-leucine or another amino acid, cellobiose octaacetate, and/or metals salts of stearic acid, such as magnesium or calcium stearate. In some embodiments, the aerosol formulations are arranged so that each metered dose of aerosol contains a predetermined amount of an active ingredient, such as the one or more of the compositions, compounds, vector(s), molecules, cells, and combinations thereof described herein.

[0333] Dosage forms adapted for vaginal administration can be presented as pessaries, tampons, creams, gels, pastes, foams, or spray formulations. Dosage forms adapted for rectal administration include suppositories or enemas. The vaginal formulations can be administered to a subject in need thereof.

[0334] Dosage forms adapted for parenteral administration and/or adapted for injection can include aqueous and/or non-aqueous sterile injection solutions, which can contain antioxidants, buffers, bacteriostats, solutes that render the composition isotonic with the blood of the subject, and aqueous and non-aqueous sterile suspensions, which can include suspending agents and thickening agents. The dosage forms adapted for parenteral administration can be presented in a single-unit dose or multi-unit dose containers, including but not limited to sealed ampoules or vials. The doses can be lyophilized and re-suspended in a sterile carrier to reconstitute the dose prior to administration. Extemporaneous injection solutions and suspensions can be prepared in some embodiments, from sterile powders, granules, and tablets. The parenteral formulations can be administered to a subject in need thereof.

[0335] For some embodiments, the dosage form contains a predetermined amount of a primary active agent, secondary active ingredient, and/or pharmaceutically acceptable salt thereof where appropriate per unit dose. In an embodiment, the predetermined amount of primary active agent, secondary active ingredient, and/or pharmaceutically acceptable salt thereof where appropriate can be an effective amount, a least effect amount, and/or a therapeutically effective amount. In other embodiments, the predetermined amount of a primary active agent, secondary active agent, and/or pharmaceutically acceptable salt thereof where appropriate, can be an appropriate fraction of the effective amount of the active ingredient.

### Co-Therapies and Combination Therapies

[0336] In some embodiments, the pharmaceutical formulation(s) described herein are part of a combination treatment or combination therapy. The combination treatment can include the pharmaceutical formulation described herein and an additional treatment modality. The additional treatment modality can be a chemotherapeutic, a biological therapeutic, surgery, radiation, diet modulation, environmental modulation, a physical activity modulation, and combinations thereof.

[0337] In some embodiments, the co-therapy or combination therapy can additionally include, but not limited to, polynucleotides, amino acids, peptides, polypeptides, antibodies, aptamers, ribozymes, hormones, immunomodulators, antipyretics, anxiolytics, antipsychotics, analgesics, antispasmodics, anti-inflammatories, anti-histamines, anti-infectives, chemotherapeutics, and combinations thereof. In some embodiments, the co-therapy and/or combination therapy comprises an effective amount of one or more anti-viral agents. Exemplary antiviral-agents include without limitation, nucleoside analogues with reverse transcriptase activity (e.g., tenofovir, emtricitabine, lamivudine, abacavir, stavudine, didanosine, and zidovudine), nonnucleoside reverse transcriptase inhibitors (e.g., delavirdine, efavirenz, etravirine, nevirapine, and rilpivirine), protease inhibitors (atazanavir, darunavir, indinavir, ritonavir, tipranavir and many others), and miscellaneous agents such as maraviroc, enfuvirtide (fusion inhibitor), and integrase inhibitors (raltegravir, elvitegravir and dolutegravir), emdesivir, molnupiravir, Paxlovid (nirmatrelvir and ritonavir), Tecovirimat, seltamivir (oral), zanamivir (by inhalation) and peramivir (intravenous), baloxavir (oral), valacyclovir, cidofovir, famciclovir, ganciclovir, valganciclovir, foscarnet, simeprevir, paritaprevir, grazoprevir, glecaprevir, sofosbuvir, dasabuvir, daclatasvir, elbasvir, lepidasvir, velpatsvir, ombitasvir, pibrentasvor, Alpha interferon, peginterferon, monoclonal antibodies targeting specific viruses, and any combination thereof.

### Administration of the Pharmaceutical Formulations

[0338] The pharmaceutical formulations or dosage forms thereof described herein can be administered one or more times hourly, daily, monthly, or yearly (e.g., 1, 2, 3, 4, 5, 6, 7, 8, 9, 10, 11, 12, 13, 14, 15, 16, 17, 18, 19, 20, or more times hourly, daily, monthly, or yearly). In some embodiments, the pharmaceutical formulations or dosage forms thereof described herein can be administered continuously over a period of time ranging from minutes to hours to days. Devices and dosages forms are known in the art and described herein that are effective to provide continuous administration of the pharmaceutical formulations described herein. In some embodiments, the first one or a few initial amount(s) administered can be a higher dose than subsequent doses. This is typically referred to in the art as a loading dose or doses and a maintenance dose, respectively. In some embodiments, the pharmaceutical formulations can be administered such that the doses over time are tapered (increased or decreased) overtime so as to wean a subject gradually off of a pharmaceutical formulation or gradually introduce a subject to the pharmaceutical formulation.

[0339] As previously discussed, the pharmaceutical formulation can contain a predetermined amount of a primary active agent, secondary active agent, and/or pharmaceutically acceptable salt thereof where appropriate. In some of these embodiments, the predetermined amount can be an appropriate fraction of the effective amount of the active ingredient. Such unit doses may therefore be administered once or more than once a day, month, or year (e.g., 1, 2, 3, 4, 5, 6, or more times per day, month, or year). Such pharmaceutical formulations may be prepared by any of the methods well known in the art.

[0340] Where co-therapies or multiple pharmaceutical formulations are to be delivered to a subject, the different therapies or formulations can be administered sequentially or simultaneously. Sequential administration is administration where an appreciable amount of time occurs between administrations, such as more than about 15, 20, 30, 45, 60 minutes or more. The time between administrations in sequential administration can be on the order of hours, days, months, or even years, depending on the active agent present in each administration. Simultaneous administration refers to administration of two or more formulations at the same time or substantially at the same time (e.g., within seconds or just a few minutes apart), where the intent is that the formulations be administered together at the same time.

### Immunogenic Compositions

[0341] Described in certain example embodiments herein are immunogenic compositions comprising a polynucleotide, a vector, polypeptide, delivery vehicle, and/or cell of the present invention as described elsewhere herein. In some embodiments, the pharmaceutical formulation described herein is an immunogenic composition. In certain example embodiments, the polynucleotide and/or the polypeptide of the immunogenic composition is capable of stimulating a B-cell and/or T-cell response in a subject to which it is delivered. In certain example embodiments, the B-cell response comprises antibody production.

mRNA Vaccines

[0342] In some embodiments, the pharmaceutical formulations and/or immunogenic composition described herein are mRNA vaccines. In some embodiments, one or more polynucleotides encoding the one or more polypeptides of the present invention described herein are included in an mRNA vaccine composition. In some embodiments, the polypeptides are immunogenic polypeptides. The mRNA vaccine composition can be administered to a subject in need thereof. In some embodiments, the vaccine is administered to a subject in an effective amount to induce an immune response in the subject.

[0343] Described herein are pharmaceutical compositions that include one or more isolated messenger ribonucleic (mRNA) polynucleotides encoding at least one viral antigenic polypeptide or an immunogenic fragment thereof (e.g., an immunogenic fragment capable of inducing an immune response to the antigenic polypeptide), such as any of those polynucleotides described in greater detail elsewhere herein, where the isolated mRNA is formulated in a lipid nanoparticle. As used herein “antigenic polypeptide” encompasses immunogenic fragments of the antigenic polypeptide (an immunogenic fragment that is induces (or is capable of inducing) an immune response to a virus or virus variant. The mRNA encoding at least one viral antigenic polypeptide or immunogenic fragment thereof can include an open reading frame that encodes the at least one viral antigenic polypeptide or immunogenic fragment thereof. In some embodiments, the open reading frame encodes at least two, at least five, or at least ten viral antigenic polypeptides and/or immunogenic fragments thereof. In some embodiments, the open reading frame encodes at least 100 antigenic polypeptides. In some embodiments, the open reading frame encodes 2-100 viral antigenic polypeptides and/or immunogenic fragments thereof.

[0344] In some embodiments, the pharmaceutical composition comprises a plurality of lipid nanoparticles comprising a cationic lipid, a neutral lipid, a cholesterol, and a PEG lipid, wherein the plurality of lipid nanoparticles optionally has a mean particle size of between 80 nm and 160 nm; and wherein the lipid nanoparticles comprise one or more polynucleotides encoding at least one viral antigenic polypeptide or an immunogenic fragment thereof.

[0345] In some embodiments, the mRNA vaccine is multivalent. In some embodiments, the mRNA of the mRNA vaccine is codon-optimized. In some embodiments, an RNA (e.g., mRNA) vaccine further includes an adjuvant.

[0346] In some embodiments, the isolated mRNA is not self-replicating.

[0347] In some embodiment, the isolated mRNA comprises and/or encodes one or more 5′terminal cap (or cap structure), 3′terminal cap, 5′untranslated region, 3′untranslated region, a tailing region, or any combination thereof.

[0348] In some embodiments, the capping region of the isolated mRNA region may be from 1 to 10, e.g., 2-9, 3-8, 4-7, 1-5, 5-10, or at least 2, or 10 or fewer nucleotides in length. In some embodiments, the cap is absent.

[0349] In some embodiments, a 5′-cap structure is cap0, cap1, ARCA, inosine, N1-methyl-guanosine, 2′-fluoro-guanosine, 7-deaza-guanosine, 8-oxo-guanosine, 2-amino-guanosine, LNA-guanosine, or 2-azido-guanosine.

[0350] In some embodiments, the 5′terminal cap is 7mG(5′)ppp(5′)NlmpNp, m7GpppG cap, N7-methylguanine. In some embodiments, the 3′terminal cap is a 3′-O-methyl-m7GpppG.

[0351] In some embodiments, the 3′-UTR is an alpha-globin 3′-UTR. in some embodiments, the 5′-UTR comprises a Kozak sequence.

[0352] In some embodiments, the tailing sequence may range from absent to 500 nucleotides in length (e.g., at least 60, 70, 80, 90, 120, 140, 160, 180, 200, 250, 300, 350, 400, 450, or 500 nucleotides). In some embodiments, the tailing region is or includes a polyA tail. Where the tailing region is a polyA tail, the length may be determined in units of or as a function of polyA Binding Protein binding. In this embodiment, the polyA tail is long enough to bind at least 4 monomers of PolyA Binding Protein. PolyA Binding Protein monomers bind to stretches of approximately 38 nucleotides. As such, it has been observed that polyA tails of about 80 nucleotides and 160 nucleotides are functional. In some embodiments, the poly-A tail is at least 160 nucleotides in length.

[0353] In some embodiments, the at least one viral antigenic polypeptide linked to or fused to a signal peptide. In some embodiments, the isolated mRNA encoding a viral antigenic polypeptide or immunogenic fragment thereof further includes a polynucleotide sequence encoding a signal peptide. In some embodiments, the signal peptide is selected from: a HuIgGk signal peptide (METPAQLLFLLLLWLPDTTG) (SEQ ID NO: 16309); IgE heavy chain epsilon-1 signal peptide (MDWTWILFLVAAATRVHS) (SEQ ID NO: 16310); Japanese encephalitis PRM signal sequence (MLGSNSGQRVVFTILLLLVAPAYS) (SEQ ID NO: 16311), VSVg protein signal sequence (MKCLLYLAFLFIGVNCA) (SEQ ID NO: 16312) and Japanese encephalitis JEV signal sequence (MWLVSLAIVTACAGA) (SEQ ID NO: 16313). In some embodiments, the signal peptide is fused to the N-terminus of at least one viral antigenic polypeptide. In some embodiments, a signal peptide is fused to the C-terminus of at least one viral antigenic polypeptide.

[0354] In some embodiments, the polynucleotides of the mRNA vaccine composition are structurally modified and/or chemically modified. As used herein, a “structural” modification is one in which two or more linked nucleosides are inserted, deleted, duplicated, inverted or randomized in a polynucleotide without significant chemical modification to the nucleotides themselves. Because chemical bonds will necessarily be broken and reformed to affect a structural modification, structural modifications are of a chemical nature and hence are chemical modifications. However, structural modifications will result in a different sequence of nucleotides. For example, the polynucleotide “ATCG” may be chemically modified to “AT-5meC-G”. The same polynucleotide may be structurally modified from “ATCG” to “ATCCCG”. Here, the dinucleotide “CC” has been inserted, resulting in a structural modification to the polynucleotide.

[0355] In some embodiments, the polynucleotide, e.g., an mRNA of an mRNA vaccine composition described herein comprises at least one chemical modification. In some embodiments, the polynucleotide, e.g., an mRNA of an mRNA vaccine composition does not comprise a chemical or structural modification.

[0356] In some embodiments, the at least one chemical modification is selected from pseudouridine, N1-methylpseudouridine, N1-ethylpseudouridine, 2-thiouridine, 4′-thiouridine, 5-methylcytosine, 5-methyluridine, 2-thio-1-methyl-1-deaza-pseudouridine, 2-thio-1-methyl-pseudouridine, 2-thio-5-aza-uridine, 2-thio-dihydropseudouridine, 2-thio-dihydrouridine, 2-thio-pseudouridine, 4-methoxy-2-thio-pseudouridine, 4-methoxy-pseudouridine, 4-thio-1-methyl-pseudouridine, 4-thio-pseudouridine, 5-aza-uridine, dihydropseudouridine, 5-methoxyuridine and 2′-O-methyl uridine. In some embodiments, the chemical modification is in the 5-position of the uracil. In some embodiments, the chemical modification is a N1-methylpseudouridine. In some embodiments, the chemical modification is a N1-ethylpseudouridine.

[0357] In some embodiments, about 10%, 15%, 20%, 24%, 30%, 35%, 40%, 45%, 50%, 55%, 60%, 65%, 70%, 75%, 80%, 85%, 90%, 95%, to/or about 100% of the uracil in of the SARS-CoV-2 antigenic polypeptide or immunogenic fragment thereof encoding polynucleotide, such in the open reading frame, have a chemical modification, In some embodiments, 100% of the uracil in the open reading frame of the viral antigenic polypeptide or immunogenic fragment thereof encoding polynucleotide have a N1-methyl pseudouridine in the 5-position of the uracil.

[0358] In some embodiments, the mRNA polynucleotide includes a stabilization element. In some embodiments, the stabilization element is a histone stem-loop. In some embodiments, the stabilization element is a nucleic acid sequence having increased GC content relative to wild type sequence.

[0359] In one embodiment, the mRNA polynucleotide may include a sequence encoding a self-cleaving peptide. The self-cleaving peptide may be, but is not limited to, a 2A peptide. As a non-limiting example, the 2A peptide may have the protein sequence: GSGATNFSLLKQAGDVEENPGP (SEQ ID NO: 16314), fragments or variants thereof. In one embodiment, the 2A peptide cleaves between the last glycine and last proline. As another non-limiting example, the polynucleotides of the present invention may include a polynucleotide sequence encoding the 2A peptide having the protein sequence GSGATNFSLLKQAGDVEENPGP (SEQ ID NO: 16314) fragments or variants thereof.

[0360] One such polynucleotide sequence encoding the 2A peptide is GGAAGCGGAGCTACTAACTTCAGCCTGCTGAAGCAGGCTGGAGACGTGGAG GAGAACCCTGGACCT (SEQ ID NO: 16315). The polynucleotide sequence of the 2A peptide may be modified or codon optimized by the methods described herein and/or are known in the art.

[0361] In one embodiment, this sequence may be used to separate the coding region of two or more polypeptides of interest. As a non-limiting example, the sequence encoding the 2A peptide may be between a first coding region A and a second coding region B (A-2Apep-B). The presence of the 2 A peptide would result in the cleavage of one long protein into protein A, protein B and the 2A peptide. Protein A and protein B may be the same or different peptides or polypeptides of interest. In another embodiment, the 2A peptide may be used in the polynucleotides of the present invention to produce two, three, four, five, six, seven, eight, nine, ten or more proteins.

[0362] In some embodiments, the length of an mRNA included in the mRNA vaccine is greater than about 30 nucleotides in length (e.g., at least or greater than about 35, 40, 45, 50, 55, 60, 70, 80, 90, 100, 120, 140, 160, 180, 200, 250, 300, 350, 400, 450, 500, 600, 700, 800, 900, 1,000, 1,100, 1,200, 1,300, 1,400, 1,500, 1,600, 1,700, 1,800, 1,900, 2,000, 2,500, and 3,000, 4,000, 5,000, 6,000, 7,000, 8,000, 9,000, 10,000, 20,000, 30,000, 40,000, 50,000, 60,000, 70,000, 80,000, 90,000, or up to and including 100,000 nucleotides).

[0363] In some embodiments, the length of an mRNA included in the mRNA vaccine includes from about 30 to about 100,000 nucleotides (e.g., from 30 to 50, from 30 to 100, from 30 to 250, from 30 to 500, from 30 to 1,000, from 30 to 1,500, from 30 to 3,000, from 30 to 5,000, from 30 to 7,000, from 30 to 10,000, from 30 to 25,000, from 30 to 50,000, from 30 to 70,000, from 100 to 250, from 100 to 500, from 100 to 1,000, from 100 to 1,500, from 100 to 3,000, from 100 to 5,000, from 100 to 7,000, from 100 to 10,000, from 100 to 25,000, from 100 to 50,000, from 100 to 70,000, from 100 to 100,000, from 500 to 1,000, from 500 to 1,500, from 500 to 2,000, from 500 to 3,000, from 500 to 5,000, from 500 to 7,000, from 500 to 10,000, from 500 to 25,000, from 500 to 50,000, from 500 to 70,000, from 500 to 100,000, from 1,000 to 1,500, from 1,000 to 2,000, from 1,000 to 3,000, from 1,000 to 5,000, from 1,000 to 7,000, from 1,000 to 10,000, from 1,000 to 25,000, from 1,000 to 50,000, from 1,000 to 70,000, from 1,000 to 100,000, from 1,500 to 3,000, from 1,500 to 5,000, from 1,500 to 7,000, from 1,500 to 10,000, from 1,500 to 25,000, from 1,500 to 50,000, from 1,500 to 70,000, from 1,500 to 100,000, from 2,000 to 3,000, from 2,000 to 5,000, from 2,000 to 7,000, from 2,000 to 10,000, from 2,000 to 25,000, from 2,000 to 50,000, from 2,000 to 70,000, and from 2,000 to 100,000).

[0364] In some embodiments, the polynucleotides are linear. In yet another embodiment, the polynucleotides of the present invention that are circular are known as “circular polynucleotides” or “circP.” As used herein, “circular polynucleotides” or “circP” means a single stranded circular polynucleotide which acts substantially like, and has the properties of, an R A. The term “circular” is also meant to encompass any secondary or tertiary configuration of the circP.

[0365] Other RNA modifications for mRNA vaccines and production of mRNA can be as described e.g., U.S. Pat. Nos. 8,278,036, 8,691,966, 8,748,089, 9,750,824, 10,232,055, 10,703,789, 10,702,600, 10,577,403, 10,442,756, 10,266,485, 10,064,959, 9,868,692, 10,064,959, 10,272,150; U.S. Publication Nos. US20130197068, US20170043037, US20130261172, US20200030460, US20150038558, US20190274968, US20180303925, US20200276300; International Patent Application Publication Nos. WO/2018/081638A1, WO/2016/176330A1, which are incorporated herein by reference.

[0366] In some embodiments, the mRNA vaccine includes one or more additional mRNAs that encode a polypeptide adjuvant. In some embodiments, the mRNA vaccine includes one or more additional mRNAs that encode a non-viral antigen, such as an antigen to another disease causing agent.

[0367] In some embodiments, the one or more additional mRNAs that encode a polypeptide adjuvant encode a flagellin polypeptide. In some embodiments, at least one flagellin polypeptide (e.g., encoded flagellin polypeptide) is an immunogenic flagellin fragment. In some embodiments at least one flagellin polypeptide has at least 80%, at least 85%, at least 90%, or at least 95% identity to a flagellin polypeptide having a sequence identified by any one of SEQ ID NO: 54-56 of U.S. Pat. No. 10,272,150.

[0368] In some embodiments, at least one flagellin polypeptide and at least one viral and/or additional antigenic polypeptide are encoded by a single RNA (e.g., mRNA) polynucleotide. In other embodiments, at least one flagellin polypeptide and at least one viral and/or additional antigenic polypeptide are each encoded by a different RNA polynucleotide.

[0369] The isolated mRNA(s) can be made in part or using only in vitro transcription. Methods of making polynucleotides by in vitro transcription are known in the art and are described in U.S. Provisional Patent Application Nos. 61/618,862, 61/681,645, 61/737,130, 61/618,866, 61/681,647, 61/737,134, 61/618,868, 61/681,648, 61/737,135, 61/618,873, 61/681,650, 61/737,147, 61/618,878, 61/681,654, 61/737,152, 61/618,885, 61/681,658, 61/737,155, 61/618,896, 61/668,157, 61/681,661, 61/737,160, 61/618,911, 61/681,667, 61/737,168, 61/618,922, 61/681,675, 61/737,174, 61/618,935, 61/681,687, 61/737,184, 61/618,945, 61/681,696, 61/737,191, 61/618,953, 61/681,704, 61/737,203; International Publication Nos. WO 2013/151666, WO 2013/151668, WO 2013/151663, WO 2013/151669, WO 2013/151670, WO 2013/151664, WO 2013/151665, WO 2013/151736, WO 2013/151672, WO 2013/151671 WO 2013/151667, and WO 2020/205793A1; the contents of each of which are herein incorporated by reference in their entireties. Lipid Nanoparticles

[0370] The isolated mRNAs and other polynucleotides of the mRNa vaccine can be formulated in a lipid nanoparticle. In some embodiments, the lipid nanoparticle is a cationic lipid nanoparticle.

[0371] In some embodiments, the lipid nanoparticle comprises a molar ratio of 20-60% ionizable cationic lipid, 5-25% non-cationic lipid, 25-55% sterol, and 0.5-15% PEG-modified lipid.

[0372] In some embodiments, the cationic lipid is a biodegradable cationic lipid. In some embodiments, the biodegradable cationic lipid comprises an ester linkage. In some embodiments, the biodegradable cationic lipid comprises DLin-DMA with an internal ester, DLin-DMA with a terminal ester, DLin-MC3-DMA with an internal ester, or DLin-MC3-DMA with a terminal ester.

[0373] In some embodiments, a lipid nanoparticle comprises a cationic lipid, a PEG-modified lipid, a sterol and a non-cationic lipid. In some embodiments, a cationic lipid is an ionizable cationic lipid and the non-cationic lipid is a neutral lipid, and the sterol is a cholesterol. In some embodiments, a cationic lipid is selected from the group consisting of 2,2-dilinoleyl-4-dimethylaminoethyl-[1,3]-dioxolane (DLin-KC2-DMA), dilinoleyl-methyl-4-dimethylaminobutyrate (DLin-MC3-DMA), di((Z)-non-2-en-1-yl) 9-((4-(dimethylamino)-butanoyl)oxy)heptadecanedioate (L319), (12Z,15Z)-N,N-dimethyl-2-nonylhenicosa-12,15-dien-1-amine (L608), and N,N-dimethyl-1-[(1S,2R)-2-octylcyclopropyl]heptadecan-8-amine (L530). In some embodiments, the neutral lipid is 1,2-distearoyl-sn-glycero-3-phosphocholine (DSPC), the sterol is cholesterol, and the PEG-modified lipid is 1,2-dimyristoyl-racalycero-3-methoxypolyethylene glycol-2000 (PEG-DMG) or PEG-cDMA.

[0374] In some embodiments, the lipid nanoparticle is any nanoparticle described in U.S. Pat. No. 10,442,756, and/or comprises any compound described in U.S. Pat. No. 10,442,756, including, but not limited to, a nanoparticle according to any one of Formulas (IA) or (II) described therein.

[0375] In some embodiments, the lipid nanoparticle is any nanoparticle described in e.g., U.S. Pat. No. 10,266,485, and/or comprises any compound described in U.S. Pat. No. 10,266,485, including, but not limited to, a nanoparticle according to Formula (II) described therein.

[0376] In some embodiments, the lipid nanoparticle is a nanoparticle described in U.S. Pat. No. 9,868,692, and/or comprises a compound described in e.g., U.S. Pat. No. 9,868,692, including, but not limited to, a nanoparticle according to Formula (I), (1A), (II), (IIa), (IIb), (IIc), (IId), (IIe),

[0377] In some embodiments, a lipid nanoparticle comprises compounds of Formula (I) and/or Formula (II) as described in U.S. patent Ser. No. 10/272,150.

[0378] In some embodiments, the mRNA vaccine is formulated in a lipid nanoparticle that comprises a compound selected from Compounds 3, 18, 20, 25, 26, 29, 30, 60, 108-112 and 122 of U.S. Pat. No. 10,272,150.

[0379] In some embodiments, at least 80% (e.g., 85%, 90%, 95%, 98%, 99%) of the uracil in the open reading frame have a chemical modification, optionally wherein the vaccine is formulated in a lipid nanoparticle (e.g., a lipid nanoparticle comprises a cationic lipid, a PEG-modified lipid, a sterol and a non-cationic lipid).

[0380] In some embodiments, the lipid nanoparticle has a mean diameter of 50-200 nm.

[0381] In some embodiments, a lipid nanoparticle comprises compounds of Formula (I) and/or Formula (II), as discussed below.

[0382] In some embodiments, a lipid nanoparticle comprises Compounds 3, 18, 20, 25, 26, 29, 30, 60, 108-112, or 122 as set forth in U.S. Pat. No. 10,272,150.

[0383] In some embodiments, the lipid nanoparticle has a polydispersity value of less than 0.4 (e.g., less than 0.3, 0.2 or 0.1).

[0384] In some embodiments, a plurality of lipid nanoparticles, such as when contained in a formulation, has a mean PDI of between 0.02 and 0.2.

[0385] In some embodiments, a plurality of lipid nanoparticles, such as when contained in a formulation comprising one or more polynucleotide(s), has a mean lipid to polynucleotide ratio (wt/wt) of between 10 and 20.

[0386] In some embodiments, the lipid nanoparticle has a net neutral charge at a neutral pH value.

Methods of mRNA Vaccination

[0387] The compositions described herein can be used to induce an antigen specific immune response to a virus or a viral variant. Exemplary viruses are described elsewhere herein.

[0388] In some embodiments, the methods of inducing an antigen specific immune response in a subject include administering to the subject any of the RNA (e.g., mRNA) vaccine as provided herein in an amount effective to produce an antigen-specific immune response.

[0389] In some embodiments, an antigen-specific immune response comprises a T cell response and/or a B cell response.

[0390] In some embodiments, a method of producing an antigen-specific immune response comprises administering to a subject a single dose (no booster dose) of a RNA (e.g., mRNA) vaccine of the present disclosure.

[0391] In some embodiments, the RNA (e.g., mRNA) vaccine is a combination vaccine comprising a combination of an mRNA vaccine described herein and at least one other mRNA vaccine. The at least one other mRNA vaccine can be against the same or a different virus or disease-causing agent.

[0392] In some embodiments, a method further comprises administering to the subject a second (booster) dose of an RNA (e.g., mRNA) vaccine. Additional doses of a RNA (e.g., mRNA) vaccine may be administered.

[0393] In some embodiments, the subject exhibits a seroconversion rate of at least 80% (e.g., at least 85%, at least 90%, or at least 95%) following the first dose or the second (booster) dose of the vaccine. Seroconversion is the time period during which a specific antibody develops and becomes detectable in the blood. After seroconversion has occurred, a virus can be detected in blood tests for the antibody. During an infection or immunization, antigens enter the blood, and the immune system begins to produce antibodies in response. Before seroconversion, the antigen itself may or may not be detectable, but antibodies are considered absent. During seroconversion, antibodies are present but not yet detectable. Any time after seroconversion, the antibodies can be detected in the blood, indicating a prior or current infection.

[0394] In some embodiments, an RNA (e.g., mRNA) vaccine described herein is administered to a subject by intradermal, subcutaneous, or intramuscular injection. In some embodiments, the administering step comprises contacting a muscle tissue of the subject with a device suitable for injection of the composition. In some embodiments, the administering step comprises contacting a muscle tissue of the subject with a device suitable for injection of the composition in combination with electroporation.

[0395] In some embodiments, the anti-antigenic polypeptide antibody titer produced in the subject is increased by at least 1 log relative to a control. In some embodiments, the anti-antigenic polypeptide antibody titer produced in the subject is increased by 1-3 log relative to a control.

[0396] In some embodiments, the anti-antigenic polypeptide antibody titer produced in a subject is increased at least 2 times relative to a control. In some embodiments, the anti-antigenic polypeptide antibody titer produced in the subject is increased at least 5 times relative to a control. In some embodiments, the anti-antigenic polypeptide antibody titer produced in the subject is increased at least 10 times relative to a control. In some embodiments, the anti-antigenic polypeptide antibody titer produced in the subject is increased 2-10 times relative to a control.

[0397] In some embodiments, the control is an anti-antigenic polypeptide antibody titer produced in a subject who has not been administered an RNA (e.g., mRNA) vaccine of the present disclosure. In some embodiments, the control is an anti-antigenic polypeptide antibody titer produced in a subject who has been administered a live attenuated or inactivated vaccine against a virus or wherein the control is an anti-antigenic polypeptide antibody titer produced in a subject who has been administered a recombinant or purified viral protein vaccine.

[0398] In some embodiments, the control is an anti-antigenic polypeptide antibody titer produced in a subject who has been administered a virus-like particle (VLP) vaccine comprising structural proteins of the virus.

[0399] The RNA (e.g., mRNA) vaccine of the present disclosure can be administered to a subject in an effective amount (e.g., an amount effective to induce an immune response in the subject).

[0400] In some embodiments, the RNA (e.g., mRNA) vaccine is formulated in an effective amount to produce an antigen specific immune response in a subject.

[0401] In some embodiments, the effective amount is a total dose of 25 g to 1000 g, or 50 g to 1000 g. In some embodiments, the effective amount is a total dose of 100 g. In some embodiments, the effective amount is a dose of 25 g administered to the subject a total of two times. In some embodiments, the effective amount is a dose of 100 g administered to the subject a total of two times. In some embodiments, the effective amount is a dose of 400 g administered to the subject a total of two times. In some embodiments, the effective amount is a dose of 500 g administered to the subject a total of two times.

[0402] In some embodiments, the efficacy (or effectiveness) of an RNA (e.g., mRNA) vaccine is greater than 60%.

[0403] Vaccine efficacy may be assessed using standard analyses (see, e.g., Weinberg et al., J Infect Dis. 2010 Jun. 1; 201(11):1607-10). For example, vaccine efficacy may be measured by double-blind, randomized, clinical controlled trials. Vaccine efficacy may be expressed as a proportionate reduction in disease attack rate (AR) between the unvaccinated (ARU) and vaccinated (ARV) study cohorts and can be calculated from the relative risk (RR) of disease among the vaccinated group with use of the following formulas: Efficacy=(ARU−ARV)/ARU×100; and Efficacy=(1−RR)×100.

[0404] Likewise, vaccine effectiveness may be assessed using standard analyses (see, e.g., Weinberg et al., J Infect Dis. 2010 Jun. 1; 201(11):1607-10). Vaccine effectiveness is an assessment of how a vaccine (which may have already proven to have high vaccine efficacy) reduces disease in a population. This measure can assess the net balance of benefits and adverse effects of a vaccination program, not just the vaccine itself, under natural field conditions rather than in a controlled clinical trial. Vaccine effectiveness is proportional to vaccine efficacy (potency) but is also affected by how well target groups in the population are immunized, as well as by other non-vaccine-related factors that influence the ‘real-world’ outcomes of hospitalizations, ambulatory visits, or costs. For example, a retrospective case control analysis may be used, in which the rates of vaccination among a set of infected cases and appropriate controls are compared. Vaccine effectiveness may be expressed as a rate difference, with use of the odds ratio (OR) for developing infection despite vaccination: Effectiveness=(1−OR)×100.

[0405] In some embodiments, the efficacy (or effectiveness) of an RNA (e.g., mRNA) vaccine is at least 65%, at least 70%, at least 75%, at least 80%, at least 85%, or at least 90%.

[0406] In some embodiments, the vaccine immunizes the subject against one or more viral variants. Exemplary viruses and variants are described elsewhere herein.

[0407] In some embodiments, the subject to which the mRNA vaccine of the present disclosure is administered is about 5 years old or younger. For example, the subject may be between the ages of about 1 year and about 5 years (e.g., about 1, 2, 3, 5 or 5 years), or between the ages of about 6 months and about 1 year (e.g., about 6, 7, 8, 9, 10, 11 or 12 months). In some embodiments, the subject is about 12 months or younger (e.g., 12, 11, 10, 9, 8, 7, 6, 5, 4, 3, 2 months or 1 month). In some embodiments, the subject is about 6 months or younger.

[0408] In some embodiments, the subject to which the mRNA vaccine of the present disclosure is administered was born full term (e.g., about 37-42 weeks). In some embodiments, the subject was born prematurely, for example, at about 36 weeks of gestation or earlier (e.g., about 36, 35, 34, 33, 32, 31, 30, 29, 28, 27, 26 or 25 weeks). For example, the subject may have been born at about 32 weeks of gestation or earlier. In some embodiments, the subject was born prematurely between about 32 weeks and about 36 weeks of gestation. In such subjects, a RNA (e.g., mRNA) vaccine may be administered later in life, for example, at the age of about 6 months to about 5 years, or older.

[0409] In some embodiments, the subject to which the mRNA vaccine of the present disclosure is administered the subject to which the mRNA vaccine of the present disclosure is administered is pregnant (e.g., in the first, second or third trimester) when administered an RNA (e.g., mRNA) vaccine.

[0410] In some embodiments, the subject to which the mRNA vaccine of the present disclosure is administered is a young adult between the ages of about 20 years and about 50 years (e.g., about 20, 25, 30, 35, 40, 45 or 50 years old).

[0411] In some embodiments, the subject to which the mRNA vaccine of the present disclosure is administered is an elderly subject about 60 years old, about 70 years old, or older (e.g., about 60, 65, 70, 75, 80, 85, 90, or about 100 or more years old).

[0412] In some embodiments, the subject to which the mRNA vaccine of the present disclosure is administered ihas a chronic pulmonary disease (e.g., chronic obstructive pulmonary disease (COPD) or asthma). Two forms of COPD include chronic bronchitis, which involves a long-term cough with mucus, and emphysema, which involves damage to the lungs over time. Thus, a subject administered a RNA (e.g., mRNA) vaccine may have chronic bronchitis or emphysema.

[0413] In some embodiments, the subject to which the mRNA vaccine of the present disclosure is administered is immunocompromised (has an impaired immune system, e.g., has an immune disorder or autoimmune disorder).

[0414] In some embodiments, the mRNA vaccine of the present disclosure is delivered to a subject at a dosage of between 10 μg/kg and 400 μg/kg of the nucleic acid vaccine is administered to the subject. In some embodiments the dosage of the RNA polynucleotide is 1-g, 5-10 μg, 10-15 μg, 15-20 μg, 10-25 μg, 20-25 μg, 20-50 μg, 30-50 μg, 40-50 μg, 40-60 μg, 60-80 μg, 60-100 μg, 50-100 μg, 80-120 μg, 40-120 μg, 40-150 μg, 50-150 μg, 50-200 μg, 80-200 μg, 100-200 μg, 120-250 μg, 150-250 μg, 180-280 μg, 200-300 μg, 50-300 μg, 80-300 ag, 100-300 μg, 40-300 μg, 50-350 μg, 100-350 μg, 200-350 μg, 300-350 μg, 320-400 μg, 40-380 μg, 40-100 μg, 100-400 μg, 200-400 μg, or 300-400 μg per dose. In some embodiments, the subject can receive 1, 2, 3, 4, 5, 6, 7, or more doses. After the initial dose (given at day zero) the subject can receive one or more (e.g., 1, 2, 3, 4, 5, 6, 7, 8, 9, 10, or more additional doses, referred to in the art as “booster” doses. The booster doses can follow the initial dose at any suitable time interval such as within days, weeks, months, or even years. In some embodiments, multiple booster doses are needed close in time after the inital dose(such as within 1, 2, 3, or 4 weeks after the initial dose) followed by a larger gap in time (e.g., months or years before subsequent booster doses are needed). In some embodiments, a first dose of the mRNA vaccine is administered to the subject on day zero. In some embodiments, a second dose of the mRNA vaccine ais administered to the subject on day 14, 21, 28, 35, 42, 49, 56, 63, 70, 77, 84 or more days after the first dose. In some embodiments, a third dose of the mRNA vaccine ais administered to the subject on day 14, 21, 28, 35, 42, 49, 56, 63, 70, 77, 84 or more days after the first and/or second dose.

[0415] In some embodiments, the mRNA vaccine confers an antibody titer superior to the criterion for seroprotection for a SARS-CoV-2 variant for an acceptable percentage of human subjects. In some embodiments, the antibody titer produced by the mRNA vaccines of the invention is a neutralizing antibody titer. In some embodiments the neutralizing antibody titer is greater than a protein vaccine. In other embodiments the neutralizing antibody titer produced by the mRNA vaccines of the invention is greater than an adjuvanted protein vaccine. In yet other embodiments the neutralizing antibody titer produced by the mRNA vaccines of the invention is 1,000-10,000, 1,200-10,000, 1,400-10,000, 1,500-10,000, 1,000-5,000, 1,000-4,000, 1,800-10,000, 2000-10,000, 2,000-5,000, 2,000-3,000, 2,000-4,000, 3,000-5,000, 3,000-4,000, or 2,000-2,500. A neutralization titer is typically expressed as the highest serum dilution required to achieve a 50% reduction in the number of plaques.

[0416] In some embodiments, a unit of use vaccine comprises between 10 μg and 400 μg of one or more RNA polynucleotides encoding the SARS-Cov-2 antigenic polypeptide(s) and/or immunogenic fragment(s) thereof and a pharmaceutically acceptable carrier or excipient, formulated for delivery to a human subject. In some embodiments, the vaccine further comprises a cationic lipid nanoparticle.

[0417] Aspects of the invention provide methods of creating, maintaining or restoring antigenic memory to a SARS-CoV-2 variant in an individual or population of individuals comprising administering to said individual or population an mRNA vaccine described herein.

[0418] In some embodiments, the methods of vaccinating a subject comprising administering to the subject a single dosage of between 25 μg/kg and 400 μg/kg of an mRNA vaccine comprising one or more RNA polynucleotides encoding a SARS-CoV-2 antigenic polypeptide and/or an immunogenic fragment thereof in an effective amount to vaccinate the subject.

[0419] In some embodiments, the mRNA vaccines comprising one or more RNA polynucleotides encoding a SARS-CoV-2 antigenic polypeptide and/or an immunogenic fragment thereof, wherein the RNA comprises at least one chemical modification, wherein the vaccine has at least 10 fold less RNA polynucleotide than is required for an unmodified mRNA vaccine to produce an equivalent antibody titer. In some embodiments, the RNA polynucleotide is present in a dosage of 25-100 micrograms.

[0420] In some embodiments, the mRNA vaccine comprises an LNP formulated RNA polynucleotide having an open reading frame comprising no nucleotide modifications (unmodified), the open reading frame one or more RNA polynucleotides encoding a SARS-CoV-2 antigenic polypeptide and/or an immunogenic fragment thereof, wherein the vaccine has at least 10 fold less RNA polynucleotide than is required for an unmodified mRNA vaccine not formulated in a LNP to produce an equivalent antibody titer. In some embodiments, the RNA polynucleotide is present in a dosage of 25-100 micrograms.

[0421] In some embodiments, the mRNA vaccine comprises an LNP formulated RNA polynucleotide having an open reading frame comprising one or more modifications, the open reading frame one or more RNA polynucleotides encoding a SARS-CoV-2 antigenic polypeptide and/or an immunogenic fragment thereof, wherein the vaccine has at least 10 fold less RNA polynucleotide than is required for an unmodified mRNA vaccine not formulated in a LNP to produce an equivalent antibody titer. In some embodiments, the RNA polynucleotide is present in a dosage of 25-100 micrograms.

[0422] In some embodiments, the method includes vaccinating a subject with a combination vaccine including at least two nucleic acid sequences encoding respiratory antigens, wherein at least one encodes a SARS-CoV-2 antigen wherein the dosage for the vaccine is a combined therapeutic dosage wherein the dosage of each individual nucleic acid encoding an antigen is a sub therapeutic dosage. In some embodiments, the combined dosage is 25 micrograms of the RNA polynucleotide in the nucleic acid vaccine administered to the subject. In some embodiments, the combined dosage is 100 micrograms of the RNA polynucleotide in the nucleic acid vaccine administered to the subject. In some embodiments the combined dosage is 50 micrograms of the RNA polynucleotide in the nucleic acid vaccine administered to the subject. In some embodiments, the combined dosage is 75 micrograms of the RNA polynucleotide in the nucleic acid vaccine administered to the subject. In some embodiments, the combined dosage is 150 micrograms of the RNA polynucleotide in the nucleic acid vaccine administered to the subject. In some embodiments, the combined dosage is 400 micrograms of the RNA polynucleotide in the nucleic acid vaccine administered to the subject. In some embodiments, the sub therapeutic dosage of each individual nucleic acid encoding an antigen is 1, 2, 3, 4, 5, 6, 7, 8, 9, 10, 11, 12, 13, 14, 15, 16, 17, 18, 19, or 20 micrograms.

[0423] In some embodiments, vaccines of the invention (e.g., LNP-encapsulated mRNA vaccines) produce prophylactically- and/or therapeutically-efficacious levels, concentrations and/or titers of antigen-specific antibodies in the blood or serum of a vaccinated subject. As defined herein, the term antibody titer refers to the amount of antigen-specific antibody produces in s subject, e.g., a human subject. In exemplary embodiments, antibody titer is expressed as the inverse of the greatest dilution (in a serial dilution) that still gives a positive result. In exemplary embodiments, antibody titer is determined or measured by enzyme-linked immunosorbent assay (ELISA). In exemplary embodiments, antibody titer is determined or measured by neutralization assay, e.g., by microneutralization assay. In certain aspects, antibody titer measurement is expressed as a ratio, such as 1:40, 1:100, etc.

[0424] In some embodiments, an efficacious vaccine produces an antibody titer of greater than 1:40, greater that 1:100, greater than 1:400, greater than 1:1000, greater than 1:2000, greater than 1:3000, greater than 1:4000, greater than 1:500, greater than 1:6000, greater than 1:7500, greater than 1:10000. In exemplary embodiments, the antibody titer is produced or reached by 10 days following vaccination, by 20 days following vaccination, by 30 days following vaccination, by 40 days following vaccination, or by 50 or more days following vaccination. In exemplary embodiments, the titer is produced or reached following a single dose of vaccine administered to the subject. In other embodiments, the titer is produced or reached following multiple doses, e.g., following a first and a second dose (e.g., a booster dose.)

[0425] In some embodiments, antigen-specific antibodies are measured in units of g/ml or are measured in units of IU/L (International Units per liter) or mIU/ml (milli International Units per ml). In exemplary embodiments of the invention, an efficacious vaccine produces >0.5 μg/ml, >0.1 μg/ml, >0.2 μg/ml, >0.35 μg/ml, >0.5 μg/ml, >1 μg/ml, >2 μg/ml, >5 μg/ml or >10 μg/ml. In exemplary embodiments of the invention, an efficacious vaccine produces >10 mIU/ml, >20 mIU/ml, >50 mIU/ml, >100 mIU/ml, >200 mIU/ml, >500 mIU/ml or >1000 mIU/ml. In exemplary embodiments, the antibody level or concentration is produced or reached by 10 days following vaccination, by 20 days following vaccination, by 30 days following vaccination, by 40 days following vaccination, or by 50 or more days following vaccination. In exemplary embodiments, the level or concentration is produced or reached following a single dose of vaccine administered to the subject. In other embodiments, the level or concentration is produced or reached following multiple doses, e.g., following a first and a second dose (e.g., a booster dose.) In exemplary embodiments, antibody level or concentration is determined or measured by enzyme-linked immunosorbent assay (ELISA). In exemplary embodiments, antibody level or concentration is determined or measured by neutralization assay, e.g., by microneutralization assay.

### Methods of Treating and Prophylaxis

[0426] In another aspect, the present disclosure provides methods of treating and or preventing (e.g., immunizing) an infection (e.g., viral infection) in a subject, and/or disease and conditions related to the infection. Generally, the methods may comprise administering a pharmaceutically effective (e.g., therapeutically effective amount or prophylactically effective amount)) amount of the composition herein to a subject, e.g., a subject in need thereof. In some cases, the method comprise administering the composition(s), the polynucleotide(s), and/or the vector(s) herein to a subject. A pharmaceutically effective amount refers to an amount which can elicit a biological, medicinal, or immunological response in a tissue, system, or subject (e.g., animal or human) that can prevent or alleviate one or more of the local or systemic symptoms or features of a disease or condition being treated.

[0427] Described in certain example embodiments herein are methods of inducing a B-cell response and/or T-cell response to a virus in a subject in need thereof, comprising administering, to the subject, the immunogenic composition or the therapeutic composition, or a pharmaceutical formulation thereof of the present invention described elsewhere herein. In certain example embodiments, the B cell response comprises antibody production. Described in certain example embodiments herein are methods of treating a viral infection in a subject in need thereof comprising administering, to the subject in need thereof, the immunogenic composition or the therapeutic composition, or a pharmaceutical formulation thereof of the present invention as described elsewhere herein in combination with an antiviral therapeutic. Described in certain example embodiments herein are methods an infection status of a subject comprising contacting immune cells derived from a subject with the immunogenic composition or a pharmaceutical formulation thereof of the present invention as described elsewhere herein; and detecting cross-reactivity of the immune cells to the immunogenic composition.

[0428] In certain examples, the methods may be used to induce a T cell response and/or antibody response to a virus in a subject. Exemplary viruses are described in greater detail elsewhere herein. In some cases, the methods may comprise administering the polypeptides and antigenic agents, and/or anti-viral therapeutics, or polynucleotides encoding thereof to a subject (e.g., a subject in need thereof).

[0429] Methods of administrating to a subject include, but are not limited to, intradermal, intrathecal, intramuscular, intraperitoneal, intravenous, subcutaneous, intranasal, epidural, by inhalation, and oral routes. The compositions can be administered by any convenient route, for example by infusion or bolus injection, by absorption through epithelial or mucocutaneous linings (for example, oral mucosa, rectal and intestinal mucosa, and the like), ocular, and the like and can be administered together with other biologically-active agents. Administration can be systemic or local. In addition, it may be advantageous to administer the composition into the central nervous system by any suitable route, including intraventricular and intrathecal injection. Pulmonary administration may also be employed by use of an inhaler or nebulizer, and formulation with an aerosolizing agent. It may also be desirable to administer the agent locally to the area in need of treatment and prophylaxis; this may be achieved by, for example, local infusion during surgery, topical application, by injection, by means of a catheter, by means of a suppository, or by means of an implant.

[0430] The term “subject” or “patient” is intended to include mammalian organisms. Examples of subjects/patients include humans and non-human mammals, e.g., non-human primates, dogs, cows, horses, pigs, sheep, goats, cats, mice, rabbits, rats, and transgenic non-human animals. In specific embodiments of the invention, the subject is a human.

[0431] In some cases, the methods comprise administering to a subject the pharmaceutical compositions alone or in concert with other therapeutic agents at appropriate dosages defined by routine testing in order to obtain optimal efficacy while minimizing any potential toxicity. The dosage regimen utilizing a pharmaceutical composition may be selected in accordance with a variety of factors including type, species, age, weight, sex, medical condition of the patient; the severity of the condition to be treated; the route of administration; the renal and hepatic function of the patient; and the particular pharmaceutical composition employed.

[0432] Optimal precision in achieving concentrations of the therapeutic regimen within the range that yields maximum efficacy with minimal toxicity may require a regimen based on the kinetics of the pharmaceutical composition's availability to one or more target sites. Distribution, equilibrium, and elimination of a pharmaceutical composition may be considered when determining the optimal concentration for a treatment regimen. The dosages of a pharmaceutical composition disclosed herein may be adjusted when combined to achieve desired effects. On the other hand, dosages of the pharmaceutical composition and various therapeutic agents may be independently optimized and combined to achieve a synergistic result wherein the pathology is reduced more than it would be if either was used alone.

[0433] In particular, toxicity and therapeutic efficacy of the pharmaceutical composition may be determined by standard pharmaceutical procedures in cell cultures or experimental animals, e.g., for determining the LD₅₀ (the dose lethal to 50% of the population) and the ED₅₀ (the dose therapeutically effective in 50% of the population). The dose ratio between toxic and therapeutic effect is the therapeutic index and it may be expressed as the ratio LD₅₀/ED₅₀. Pharmaceutical compositions exhibiting large therapeutic indices are preferred except when cytotoxicity of the composition is the activity or therapeutic outcome that is desired. Although pharmaceutical compositions that exhibit toxic side effects may be used, a delivery system can target such compositions to the site of affected tissue in order to minimize potential damage to uninfected cells and, thereby, reduce side effects. Generally, the pharmaceutical compositions of the present invention may be administered in a manner that maximizes efficacy and minimizes toxicity.

[0434] Data obtained from cell culture assays and animal studies may be used in formulating a range of dosages for use in humans. The dosages of such compositions lie preferably within a range of circulating concentrations that include the ED₅₀ with little or no toxicity. The dosage may vary within this range depending upon the dosage form employed and the route of administration utilized. For any composition used in the methods of the invention, the therapeutically effective dose may be estimated initially from cell culture assays. A dose may be formulated in animal models to achieve a circulating plasma concentration range that includes the IC50 (the concentration of the test composition that achieves a half-maximal inhibition of symptoms) as determined in cell culture. Such information may be used to accurately determine useful doses in humans. Levels in plasma may be measured, for example, by high performance liquid chromatography.

[0435] The methods may comprise administering a booster agent in addition to the administration of the composition therein. A booster agent may be an extra administration of the composition herein or a different agent. A booster (or booster vaccine) may be given after an earlier administration of the composition. The time of administration between the initial administration of the composition and the booster may be at least 1 minute, at least 5 minutes, at least 10 minutes, at least 20 minutes, at least 30 minutes, at least 40 minutes, at least 50 minutes, at least 1 hour, at least 2 hours, at least 4 hours, at least 8 hours, at least 12 hours, at least 1 day, at least 1 week, at least 2 week, at least 3 week, at least 1 month, at least 2 months, at least 3 months, at least 4 months, at least 5 months, at least 6 months, at least 1 year, at least 5 years, at least 10 years, and any time period in-between.

### Delivery to Cells and Organisms

[0436] The present disclosure also provides delivery systems for introducing the compositions herein to cells, tissues, organs, or organisms. A delivery system may comprise one or more delivery vehicles and/or cargos. Exemplary delivery systems and methods include those described in paragraphs [00117] to [00278] of Feng Zhang et al., (WO2016106236A1), and pages 1241-1251 and Table 1 of Lino C A et al., Delivering CRISPR: a review of the challenges and approaches, DRUG DELIVERY, 2018, VOL. 25, NO. 1, 1234-1257, which are incorporated by reference herein in their entireties.

### Cargos

[0437] The delivery systems may comprise one or more cargos (such as the polynucleotides, polypeptides, vectors, cells etc. of the present invention described elsewhere herein). A cargo may comprise one or more of the following: i) one or more polypeptides herein, ii) one or more polynucleotides encoding the polypeptide(s) or vectors comprising the polynucleotides; (iii) mRNA molecules encoding the one or more polypeptides; iv) cells comprising i), ii) and/or iii). In some examples, a cargo may comprise a plasmid encoding one or more engineered proteins herein.

### Physical Delivery

[0438] In some embodiments, the cargos may be introduced to cells by physical delivery methods. Examples of physical methods include microinjection, electroporation, and hydrodynamic delivery. Both nucleic acid and proteins may be delivered using such methods. For example, the polypeptides and polynucleotides may be prepared in vitro, isolated, (refolded, purified if needed), and introduced to cells.

### Microinjection

[0439] Microinjection of the cargo directly to cells can achieve high efficiency, e.g., above 90% or about 100%. In some embodiments, microinjection may be performed using a microscope and a needle (e.g., with 0.5-5.0 μm in diameter) to pierce a cell membrane and deliver the cargo directly to a target site within the cell. Microinjection may be used for in vitro and ex vivo delivery.

[0440] Polynucleotides and vectors comprising coding sequences for the polypeptides may be microinjected. In some cases, microinjection may be used i) to deliver DNA directly to a cell nucleus, and/or ii) to deliver mRNA (e.g., in vitro transcribed) to a cell nucleus or cytoplasm.

[0441] Microinjection may be used to generate genetically modified animals. For example, gene editing cargos may be injected into zygotes to allow for efficient germline modification. Such approach can yield normal embryos and full-term mouse pups harboring the desired modification(s).

### Electroporation

[0442] In some embodiments, the cargos and/or delivery vehicles may be delivered by electroporation. Electroporation may use pulsed high-voltage electrical currents to transiently open nanometer-sized pores within the cellular membrane of cells suspended in buffer, allowing for components with hydrodynamic diameters of tens of nanometers to flow into the cell. In some cases, electroporation may be used on various cell types and efficiently transfer cargo into cells. Electroporation may be used for in vitro and ex vivo delivery.

[0443] Electroporation may also be used to deliver the cargo to into the nuclei of mammalian cells by applying specific voltage and reagents, e.g., by nucleofection. Such approaches include those described in Wu Y, et al. (2015). Cell Res 25:67-79; Ye L, et al. (2014). Proc Natl Acad Sci USA 111:9591-6; Choi P S, Meyerson M. (2014). Nat Commun 5:3728; Wang J, Quake S R. (2014). Proc Natl Acad Sci 111:13157-62. Electroporation may also be used to deliver the cargo in vivo, e.g., with methods described in Zuckermann M, et al. (2015). Nat Commun 6:7391.

### Hydrodynamic Delivery

[0444] Hydrodynamic delivery may also be used for delivering the cargos, e.g., for in vivo delivery. In some examples, hydrodynamic delivery may be performed by rapidly pushing a large volume (8-10% body weight) solution containing the gene editing cargo into the bloodstream of a subject (e.g., an animal or human), e.g., for mice, via the tail vein. As blood is incompressible, the large bolus of liquid may result in an increase in hydrodynamic pressure that temporarily enhances permeability into endothelial and parenchymal cells, allowing for cargo not normally capable of crossing a cellular membrane to pass into cells. This approach may be used for delivering naked DNA plasmids and proteins. The delivered cargos may be enriched in liver, kidney, lung, muscle, and/or heart.

### Transfection

[0445] The cargos, e.g., nucleic acids, may be introduced to cells by transfection methods for introducing nucleic acids into cells. Examples of transfection methods include calcium phosphate-mediated transfection, cationic transfection, liposome transfection, dendrimer transfection, heat shock transfection, magnetofection, lipofection, impalefection, optical transfection, proprietary agent-enhanced uptake of nucleic acid.

### Delivery Vehicles

[0446] Delivery also include delivery vehicles, which are described in greater detail elsewhere herein.

### Methods of Identifying Viral Polypeptides

[0447] Described herein are high-throughput methods of identifying determining translated genomic sequences, such as translated viral genomic sequences, and/or one or more effects or functions (such as gene expression regulation of other viral sequences and/or mediating B- and/or T-cell responses in a host) of said translated genomic sequences and/or products produced therefrom (e.g., peptides, polypeptides). Such methods include massively parallel ribosome profiling, high-through put antigen presentation profiling, and/or massively parallel reporter assays. See e.g., FIG. 4A-4D and FIG. 24. The identified sequences and/or peptides they encode can be used in compositions, such as pharmaceutical formulations and/or immunogenic compositions described elsewhere herein.

### Massively Parallel Ribosome Profiling (MPRP)

[0448] In some embodiments, one or more open reading frame, such as one or more non-canonical open reading frame, can be identified using a high throughput method of determining translated sequences. As described in the Working Examples herein, Applicant has developed a high throughput assay also referred to herein as “massively parallel ribosome profiling” that can identify from hundreds of genomic sequences, such as viral genomes, translated sequences. See e.g., FIGS. 4-5.

[0449] Described in certain example embodiments herein are high throughput methods of determining translated sequences, comprising expressing a vector as described elsewhere herein or a vector library (such as one that has a short synthetic sequence) as described elsewhere herein in one or more cells under conditions sufficient to produce translation products; obtaining a sample of ribosomes comprising ribosome-protected mRNA fragments (RPFs) from the cells; recovering ribosome footprints consisting essentially of the RPFs from the sample of ribosomes; and determining the sequence of the RPFs thereby identifying translated sequences. Methods of culturing cells under conditions sufficient to produce translation products are generally known in the art. In some embodiments, the cell is a eukaryotic cell. In some embodiments, the cell is a human cell. In some embodiments, the cell is a non-human animal cell. In some embodiments, the cell is a prokaryotic cell.

[0450] In certain example embodiments, determining the sequence of the RPFs comprises nucleotide sequencing. In certain example embodiments, sequencing comprises RNA sequencing. In certain example embodiments, sequencing comprises generating cDNA from the RPFs to form RPF cDNA and DNA sequencing the RPF cDNA. Specific suitable sequencing techniques are generally known in the art and include without limitation any next generation or third generation sequencing technique. See e.g., Hu et al., Hum Immunol. 2021 November; 82(11):801-811. doi: 10.1016/j.humimm.2021.02.012; E. R. Mardis. Annu Rev Genomics Hum Genet. 2008; 9:387-402. doi: 10.1146/annurev.genom.9.081307.164359; McCombie et al., Cold Spring Harb Perspect Med. 2019 Nov. 1; 9(11):a036798. doi: 10.1101/cshperspect.a036798; Gu et al., Annu Rev Pathol. 2019 Jan. 24; 14:319-338. doi: 10.1146/annurev-pathmechdis-012418-012751; Kumar et al., Semin Thromb Hemost. 2019 October; 45(7):661-673. doi: 10.1055/s-0039-1688446; van Dijk et al., Trends Genet. 2018 September; 34(9):666-681. doi: 10.1016/j.tig.2018.05.008; Rothberg and Rothberg. Clin Chem. 2015 July; 61(7):997-8. doi: 10.1373/clinchem.2014.237461; Athanasopoulou et al., Life (Basel). 2021 Dec. 26; 12(1):30. doi: 10.3390/life12010030; Pervez et al., Biomed Res Int. 2022 Sep. 29; 2022:3457806. doi: 10.1155/2022/3457806.

[0451] In certain example embodiments, the method further comprises digesting unprotected mRNA prior to recovering ribosome footprints. In some embodiments, digesting comprises RNase digestion. In some embodiments, the RNase is RNase A, RNase H, RNase III, RNase P, RNase E, RNase L, RNase T, RNase Z, RNase D, RNase P/RP, RNase I, RNase S7, RNase T1, or any combination thereof. In certain example embodiments, the method further comprises removing rRNA from the sample containing ribosomes. In some embodiments, RNAse digestion comprises exposing ribosome bound RNA to an RNase for an amount of time under conditions that allow for activity of the RNase. The ribosomes protect the RNA bound to the ribosome from RNase digestion. In some embodiments, the amount of time ranges from 15 minutes, 30 minutes, 45 minutes, 1, 2, 3, 4, 5, 6, 7, 8, 9, 10, 11, 12, 13, 14, 15, 16, 17, 18, 19, 20, 21, 22, 23, 24, or more hours.

[0452] In some embodiments, the method comprises immobilizing ribosomes complexes on RNA. In some embodiments immobilizing comprises chemical immobilization. Suitable chemicals and methods for immobilizing ribosome complexes are generally known and include without limitation cycloheximide.

[0453] In some embodiments, the method comprises introducing a translation inhibitor to prevent translation of the ribosome bound RNA. In some embodiments, the same effect can be achieved by utilizing translation-incompetent lysis conditions.

[0454] In some embodiments, the method comprises one or more filtration or separation techniques, such as centrifugation/ultracentrifugation, sucrose gradient separation, immunoprecipitation, size separation, liquid chromatography (including high-performance liquid chromatography), or any combination thereof. In some embodiments, ribosome bound RNA is separated from cells, cell components, and/or digested RNA using one or more filtration or separation techniques.

[0455] In some embodiments, the method comprises cell lysis. In some embodiments cell lysis after expressing a vector as described elsewhere herein or a vector library as described elsewhere herein in one or more cells. Methods of cell lysis are generally known in the art. Exemplary methods of cell lysis include, but are not limited to, freeze-thaw methods, sonication, centrifugation, chemical lysis, and/or enzymatic lysis.

[0456] In some embodiments, the method comprises removing the ribosomes from the protected RNA fragments. Any suitable purification method can be used, including but not limited to phenol/chloroform extraction.

[0457] In some embodiments, the method comprises ligating or otherwise adding one or more nucleic acid and/or sequencing adaptors, barcodes, and other nucleic acids to the one or more previously protected RNA fragments. Suitable barcoding techniques and/or sequencing adaptors are generally known. See e.g., Antil et al., Mol Biol Rep. 2023 January; 50(1):761-775. doi: 10.1007/s11033-022-08015-7; Kress and Erickson. Proceedings of the National Academy of Sciences. 105 (8) 2761-2762.

[0458] Recovering ribosome footprints consisting essentially of the RPFs from the sample of ribosomes and determining the sequence of the RPFs thereby identifying translated sequences can include one or more computational analyses. In some embodiments, ORFs are identified in the ribosome footprints using the PRICE algorithm as described in Erhard et al., Nature Methods volume 15, pages 363-366 (2018). Other methods of analysis will be appreciated by those of ordinary skill in the art in view of the description herein. In some embodiments, the ORFs identified can be, without limitation, annotated ORFs, upstream ORFs, upstream overlapping ORFS (uoORFs), internal overlapping ORFs, N-extended ORFs.

[0459] In some embodiments, the massively parallel ribosome profiling method can be coupled with one or more other techniques so as to determine one or more functionalities or effects of the one or more identified sequences. In some embodiments, the cells can be treated with one or more agents or conditions and effect on the translated sequences can be observed using the MPRP assay performed with and without exposure to the agent and/or condition. See e.g., FIGS. 18A-18C, 19, 20. Described in certain example embodiments herein are methods of determining translational regulation comprising determining a first set of translated sequences by a method comprising expressing a pan-genomic library in a first plurality of cells, wherein the pan-genomic library comprises a plurality of synthetic library expression constructs, each comprising a short synthetic polynucleotide and a pair of constant primers flanking the short synthetic polynucleotide, wherein the short synthetic polynucleotide has a sequence corresponding to a region of a genome; obtaining a sample of ribosomes comprising ribosome-protected mRNA fragments (RPFs) from the first plurality of cells; recovering ribosome footprints consisting essentially of the RPFs from the sample of ribosomes; and determining the sequence of the RPFs thereby identifying translated sequences to form the first set of translated sequences; determining a second set of translated sequences by a method comprising expressing the pan-genomic library in a second plurality of cells; applying a stress to the second plurality of cells; obtaining a sample of ribosomes comprising ribosome-protected mRNA fragments (RPFs) from the second plurality of cells; recovering ribosome footprints consisting essentially of the RPFs from the sample of ribosomes; and determining the sequence of the RPFs thereby identifying translated sequences to form the second set of translated sequences, whereby similarities and differences in the sequences of the first and the second set of translated sequences indicates sequences that are translationally regulated or regulate translation. In certain example embodiments herein, expressing a pan-genomic library in a first plurality of cells and expressing a pan-genomic library in a second plurality of cells comprises expressing one or more vectors as described elsewhere herein or a vector library as in any one of the preceding paragraphs or elsewhere herein in the first plurality of cells and the second plurality of cells.

### Exemplary Stresses

[0460] In certain example embodiments, the stress applied to the cells can be a test agent or condition that results in a stress on the cell. In some embodiments, the stress is a small molecule agent, a biologic agent, a chemical agent, a physical stress, a chemical stress, or any combination thereof. In certain example embodiments, the stress is a small molecule agent, a biologic agent, a physical stress, a chemical stress, or any combination thereof. In certain example embodiments, the stress is arsenite. “Small molecule” is a term of art that is generally referred to small molecules ranging from about 0.1 to 1 kDA in size. In some embodiments, the small molecules are biologic molecules such as proteins or nucleic acids. In some embodiments, the small molecules are chemical compounds. Biologic compounds include, but are not limited to, DNA (single and double stranded), RNA (single and double stranded), hybrid DNA:RNA molecules, peptides, polypeptides, amino acids, lipids, and/or any combination thereof. Other exemplary agents include, but are not limited to Drug compounds include, but are not limited to, DNA, RNA, amino acids, peptides, polypeptides, antibodies, aptamers, ribozymes, guide sequences for ribozymes that inhibit translation or transcription of essential tumor proteins and genes, hormones, immunomodulators, antipyretics, anxiolytics, antipsychotics, analgesics, antispasmodics, anti-inflammatories, anti-histamines, anti-infectives, radiation sensitizers, chemotherapeutics.

[0461] Suitable hormones include, but are not limited to, amino-acid derived hormones (e.g. melatonin and thyroxine), small peptide hormones and protein hormones (e.g. thyrotropin-releasing hormone, vasopressin, insulin, growth hormone, luteinizing hormone, follicle-stimulating hormone, and thyroid-stimulating hormone), eicosanoids (e.g. arachidonic acid, lipoxins, and prostaglandins), and steroid hormones (e.g. estradiol, testosterone, tetrahydro testosterone, cortisol).

[0462] Suitable immunomodulators include, but are not limited to, prednisone, azathioprine, 6-MP, cyclosporine, tacrolimus, methotrexate, interleukins (e.g., IL-2, IL-7, and IL-12), cytokines (e.g. interferons (e.g. IFN-α, IFN-β, IFN-ε, IFN-K, IFN-ω, and IFN-γ), granulocyte colony-stimulating factor, and imiquimod), chemokines (e.g. CCL3, CCL26 and CXCL7), cytosine phosphate-guanosine, oligodeoxynucleotides, glucans, antibodies, and aptamers).

[0463] Suitable antipyretics include, but are not limited to, non-steroidal anti-inflammants (e.g. ibuprofen, naproxen, ketoprofen, and nimesulide), aspirin and related salicylates (e.g. choline salicylate, magnesium salicylate, and sodium salicylate), paracetamol/acetaminophen, metamizole, nabumetone, phenazone, and quinine.

[0464] Suitable anxiolytics include, but are not limited to, benzodiazepines (e.g. alprazolam, bromazepam, chlordiazepoxide, clonazepam, clorazepate, diazepam, flurazepam, lorazepam, oxazepam, temazepam, triazolam, and tofisopam), serotenergic antidepressants (e.g. selective serotonin reuptake inhibitors, tricyclic antidepressants, and monoamine oxidase inhibitors), mebicar, afobazole, selank, bromantane, emoxypine, azapirones, barbiturates, hydroxyzine, pregabalin, validol, and beta blockers.

[0465] Suitable antipsychotics include, but are not limited to, benperidol, bromoperidol, droperidol, haloperidol, moperone, pipaperone, timiperone, fluspirilene, penfluridol, pimozide, acepromazine, chlorpromazine, cyamemazine, dizyrazine, fluphenazine, levomepromazine, mesoridazine, perazine, pericyazine, perphenazine, pipotiazine, prochlorperazine, promazine, promethazine, prothipendyl, thioproperazine, thioridazine, trifluoperazine, triflupromazine, chlorprothixene, clopenthixol, flupentixol, tiotixene, zuclopenthixol, clotiapine, loxapine, prothipendyl, carpipramine, clocapramine, molindone, mosapramine, sulpiride, veralipride, amisulpride, amoxapine, aripiprazole, asenapine, clozapine, blonanserin, iloperidone, lurasidone, melperone, nemonapride, olanzapine, paliperidone, perospirone, quetiapine, remoxipride, risperidone, sertindole, trimipramine, ziprasidone, zotepine, alstonie, befeprunox, bitopertin, brexpiprazole, cannabidiol, cariprazine, pimavanserin, pomaglumetad methionil, vabicaserin, xanomeline, and zicronapine.

[0466] Suitable analgesics include, but are not limited to, paracetamol/acetaminophen, nonsteroidal anti-inflammants (e.g. ibuprofen, naproxen, ketoprofen, and nimesulide), COX-2 inhibitors (e.g. rofecoxib, celecoxib, and etoricoxib), opioids (e.g. morphine, codeine, oxycodone, hydrocodone, dihydromorphine, pethidine, buprenorphine), tramadol, norepinephrine, flupiretine, nefopam, orphenadrine, pregabalin, gabapentin, cyclobenzaprine, scopolamine, methadone, ketobemidone, piritramide, and aspirin and related salicylates (e.g. choline salicylate, magnesium salicylate, and sodium salicylate).

[0467] Suitable antispasmodics include, but are not limited to, mebeverine, papverine, cyclobenzaprine, carisoprodol, orphenadrine, tizanidine, metaxalone, methodcarbamol, chlorzoxazone, baclofen, dantrolene, baclofen, tizanidine, and dantrolene. Suitable anti-inflammatories include, but are not limited to, prednisone, non-steroidal anti-inflammants (e.g. ibuprofen, naproxen, ketoprofen, and nimesulide), COX-2 inhibitors (e.g. rofecoxib, celecoxib, and etoricoxib), and immune selective anti-inflammatory derivatives (e.g. submandibular gland peptide-T and its derivatives).

[0468] Suitable anti-histamines include, but are not limited to, H1-receptor antagonists (e.g. acrivastine, azelastine, bilastine, brompheniramine, buclizine, bromodiphenhydramine, carbinoxamine, cetirizine, chlorpromazine, cyclizine, chlorpheniramine, clemastine, cyproheptadine, desloratadine, dexbromapheniramine, dexchlorpheniramine, dimenhydrinate, dimetindene, diphenhydramine, doxylamine, ebasine, embramine, fexofenadine, hydroxyzine, levocetirzine, loratadine, meclozine, mirtazapine, olopatadine, orphenadrine, phenindamine, pheniramine, phenyltoloxamine, promethazine, pyrilamine, quetiapine, rupatadine, tripelennamine, and triprolidine), H2-receptor antagonists (e.g. cimetidine, famotidine, lafutidine, nizatidine, rafitidine, and roxatidine), tritoqualine, catechin, cromoglicate, nedocromil, and p2-adrenergic agonists.

[0469] Suitable anti-infectives include, but are not limited to, amebicides (e.g. nitazoxanide, paromomycin, metronidazole, tinidazole, chloroquine, miltefosine, amphotericin b, and iodoquinol), aminoglycosides (e.g. paromomycin, tobramycin, gentamicin, amikacin, kanamycin, and neomycin), anthelmintics (e.g. pyrantel, mebendazole, ivermectin, praziquantel, abendazole, thiabendazole, oxamniquine), antifungals (e.g. azole antifungals (e.g. itraconazole, fluconazole, posaconazole, ketoconazole, clotrimazole, miconazole, and voriconazole), echinocandins (e.g. caspofungin, anidulafungin, and micafungin), griseofulvin, terbinafine, flucytosine, and polyenes (e.g. nystatin, and amphotericin b), antimalarial agents (e.g. pyrimethamine/sulfadoxine, artemether/lumefantrine, atovaquone/proquanil, quinine, hydroxychloroquine, mefloquine, chloroquine, doxycycline, pyrimethamine, and halofantrine), antituberculosis agents (e.g. aminosalicylates (e.g. aminosalicylic acid), isoniazid/rifampin, isoniazid/pyrazinamide/rifampin, bedaquiline, isoniazid, ethambutol, rifampin, rifabutin, rifapentine, capreomycin, and cycloserine), antivirals (e.g. amantadine, rimantadine, abacavir/lamivudine, emtricitabine/tenofovir, cobicistat/elvitegravir/emtricitabine/tenofovir, efavirenz/emtricitabine/tenofovir, avacavir/lamivudine/zidovudine, lamivudine/zidovudine, emtricitabine/tenofovir, emtricitabine/opinavir/ritonavir/tenofovir, interferon alfa-2v/ribavirin, peginterferon alfa-2b, maraviroc, raltegravir, dolutegravir, enfuvirtide, foscarnet, fomivirsen, oseltamivir, zanamivir, nevirapine, efavirenz, etravirine, rilpivirine, delaviridine, nevirapine, entecavir, lamivudine, adefovir, sofosbuvir, didanosine, tenofovir, avacivr, zidovudine, stavudine, emtricitabine, xalcitabine, telbivudine, simeprevir, boceprevir, telaprevir, lopinavir/ritonavir, fosamprenvir, dranuavir, ritonavir, tipranavir, atazanavir, nelfinavir, amprenavir, indinavir, sawuinavir, ribavirin, valcyclovir, acyclovir, famciclovir, ganciclovir, and valganciclovir), carbapenems (e.g. doripenem, meropenem, ertapenem, and cilastatin/imipenem), cephalosporins (e.g. cefadroxil, cephradine, cefazolin, cephalexin, cefepime, ceflaroline, loracarbef, cefotetan, cefuroxime, cefprozil, loracarbef, cefoxitin, cefaclor, ceftibuten, ceftriaxone, cefotaxime, cefpodoxime, cefdinir, cefixime, cefditoren, cefizoxime, and ceftazidime), glycopeptide antibiotics (e.g. vancomycin, dalbavancin, oritavancin, and telvancin), glycylcyclines (e.g. tigecycline), leprostatics (e.g. clofazimine and thalidomide), lincomycin and derivatives thereof (e.g. clindamycin and lincomycin), macrolides and derivatives thereof (e.g. telithromycin, fidaxomicin, erythromycin, azithromycin, clarithromycin, dirithromycin, and troleandomycin), linezolid, sulfamethoxazole/trimethoprim, rifaximin, chloramphenicol, fosfomycin, metronidazole, aztreonam, bacitracin, penicillins (amoxicillin, ampicillin, bacampicillin, carbenicillin, piperacillin, ticarcillin, amoxicillin/clavulanate, ampicillin/sulbactam, piperacillin/tazobactam, clavulanate/ticarcillin, penicillin, procaine penicillin, oxaxillin, dicloxacillin, and nafcillin), quinolones (e.g. lomefloxacin, norfloxacin, ofloxacin, qatifloxacin, moxifloxacin, ciprofloxacin, levofloxacin, gemifloxacin, moxifloxacin, cinoxacin, nalidixic acid, enoxacin, grepafloxacin, gatifloxacin, trovafloxacin, and sparfloxacin), sulfonamides (e.g. sulfamethoxazole/trimethoprim, sulfasalazine, and sulfasoxazole), tetracyclines (e.g. doxycycline, demeclocycline, minocycline, doxycycline/salicyclic acid, doxycycline/omega-3 polyunsaturated fatty acids, and tetracycline), and urinary anti-infectives (e.g. nitrofurantoin, methenamine, fosfomycin, cinoxacin, nalidixic acid, trimethoprim, and methylene blue).

[0470] Suitable chemotherapeutics include, but are not limited to, paclitaxel, brentuximab vedotin, doxorubicin, 5-FU (fluorouracil), everolimus, pemetrexed, melphalan, pamidronate, anastrozole, exemestane, nelarabine, ofatumumab, bevacizumab, belinostat, tositumomab, carmustine, bleomycin, bosutinib, busulfan, alemtuzumab, irinotecan, vandetanib, bicalutamide, lomustine, daunorubicin, clofarabine, cabozantinib, dactinomycin, ramucirumab, cytarabine, Cytoxan, cyclophosphamide, decitabine, dexamethasone, docetaxel, hydroxyurea, decarbazine, leuprolide, epirubicin, oxaliplatin, asparaginase, estramustine, cetuximab, vismodegib, asparginase Erwinia chrysanthemi, amifostine, etoposide, flutamide, toremifene, fulvestrant, letrozole, degarelix, pralatrexate, methotrexate, floxuridine, obinutuzumab, gemcitabine, afatinib, imatinib mesylatem, carmustine, eribulin, trastuzumab, altretamine, topotecan, ponatinib, idarubicin, ifosfamide, ibrutinib, axitinib, interferon alfa-2a, gefitinib, romidepsin, ixabepilone, ruxolitinib, cabazitaxel, ado-trastuzumab emtansine, carfilzomib, chlorambucil, sargramostim, cladribine, mitotane, vincristine, procarbazine, megestrol, trametinib, mesna, strontium-89 chloride, mechlorethamine, mitomycin, busulfan, gemtuzumab ozogamicin, vinorelbine, filgrastim, pegfilgrastim, sorafenib, nilutamide, pentostatin, tamoxifen, mitoxantrone, pegaspargase, denileukin diftitox, alitretinoin, carboplatin, pertuzumab, cisplatin, pomalidomide, prednisone, aldesleukin, mercaptopurine, zoledronic acid, lenalidomide, rituximab, octretide, dasatinib, regorafenib, histrelin, sunitinib, siltuximab, omacetaxine, thioguanine (tioguanine), dabrafenib, erlotinib, bexarotene, temozolomide, thiotepa, thalidomide, BCG, temsirolimus, bendamustine hydrochloride, triptorelin, aresnic trioxide, lapatinib, valrubicin, panitumumab, vinblastine, bortezomib, tretinoin, azacitidine, pazopanib, teniposide, leucovorin, crizotinib, capecitabine, enzalutamide, ipilimumab, goserelin, vorinostat, idelalisib, ceritinib, abiraterone, epothilone, tafluposide, azathioprine, doxifluridine, vindesine, and all-trans retinoic acid.

[0471] Suitable radiation sensitizers include, but are not limited to, 5-fluorouracil, platinum analogs (e.g. cisplatin, carboplatin, and oxaliplatin), gemcitabine, DNA topoisomerase I-targeting drugs (e.g. camptothecin derivatives (e.g. topotecan and irinotecan)), epidermal growth factor receptor blockade family agents (e.g. cetuximab, gefitinib), farnesyltransferase inhibitors (e.g., L-778-123), COX-2 inhibitors (e.g. rofecoxib, celecoxib, and etoricoxib), bFGF and VEGF targeting agents (e.g. bevazucimab and thalidomide), NBTXR3, Nimoral, trans sodium crocetinate, NVX-108, and combinations thereof. See also e.g., Kvols, L. K., J Nucl Med 2005; 46:187S-190S.

[0472] In some embodiments, the stress is one or more anti-viral agents. Exemplary antiviral-agents include without limitation, nucleoside analogues with reverse transcriptase activity (e.g., tenofovir, emtricitabine, lamivudine, abacavir, stavudine, didanosine, and zidovudine), nonnucleoside reverse transcriptase inhibitors (e.g., delavirdine, efavirenz, etravirine, nevirapine, and rilpivirine), protease inhibitors (atazanavir, darunavir, indinavir, ritonavir, tipranavir and many others), and miscellaneous agents such as maraviroc, enfuvirtide (fusion inhibitor), and integrase inhibitors (raltegravir, elvitegravir and dolutegravir), emdesivir, molnupiravir, Paxlovid (nirmatrelvir and ritonavir), Tecovirimat, seltamivir (oral), zanamivir (by inhalation) and peramivir (intravenous), baloxavir (oral), valacyclovir, cidofovir, famciclovir, ganciclovir, valganciclovir, foscarnet, simeprevir, paritaprevir, grazoprevir, glecaprevir, sofosbuvir, dasabuvir, daclatasvir, elbasvir, lepidasvir, velpatsvir, ombitasvir, pibrentasvor, Alpha interferon, peginterferon, monoclonal antibodies targeting specific viruses, and any combination thereof.

[0473] In some embodiments, the stress condition is applied to the cell during and/or after transduction of a viral particle. The stress condition can be any stress applied to the cell, including but not limited to a thermal stress (e.g., applying hot or cold environmental conditions to the cell), oxygen or other gas depletion or enrichment; a strain, a tension, a pressure, a change in salinity, osmolarity, pH, or other cell culture media condition, and/or the like. Such a stress can be applied continuously or be applied for one or more periods of time. Other stresses will be appreciated by one of ordinary skill in the art in view of the description herein.

### Short Synthetic Sequences

[0474] In certain example embodiments of the MPRP, the short synthetic polynucleotide is about 200 nucleotides. The short synthetic sequence can be that designed or variable sequence included in the pan-genomic library, which is discussed in greater detail elsewhere herein. See e.g., FIGS. 3-6. In certain example embodiments, the short synthetic polynucleotide has a sequence corresponding to a region of a genome. In certain example embodiments, the short synthetic polynucleotide has a sequence corresponding to a region of a human genome, a non-human animal genome, a plant genome, a microbial genome, or a viral genome. In some embodiments, the viral genome is from a virus set for the elsewhere herein, see e.g., section “Exemplary viruses” elsewhere herein. In certain example embodiments, the short synthetic polynucleotide has a sequence corresponding to (a) an annotated region of a genome; (b) an unannotated region of a genome; (c) a mutation; (d) a 5′UTR; (e) a 3′UTR; (f) an open reading frame; or (g) any combination thereof. In certain example embodiments herein, the short synthetic polynucleotide (a) is a sequence according to a sequence in SEQ ID NOS: 1-9890 or SEQ ID NOS: 9891-16277; (b) is a synthetic in silico designed sequence; (d) does not have 100 percent identity to a genome sequence, optionally a human genome, a non-human animal genome, a plant genome, a microbial genome, or a viral genome; (e) is not native to any genome, optionally a human genome, a non-human animal genome, a plant genome, a microbial genome, or a viral genome; or (f) any combination thereof. These are further discussed with respect to the vectors and vector libraries herein.

[0475] The short synthetic sequences can be about 200 nucleotides. In some embodiments, the designed oligos range from about 10 to about 200 oligonucleotides, such as 10, to/or 11, 12, 13, 14, 15, 16, 17, 18, 19, 20, 21, 22, 23, 24, 25, 26, 27, 28, 29, 30, 31, 32, 33, 34, 35, 36, 37, 38, 39, 40, 41, 42, 43, 44, 45, 46, 47, 48, 49, 50, 51, 52, 53, 54, 55, 56, 57, 58, 59, 60, 61, 62, 63, 64, 65, 66, 67, 68, 69, 70, 71, 72, 73, 74, 75, 76, 77, 78, 79, 80, 81, 82, 83, 84, 85, 86, 87, 88, 89, 90, 91, 92, 93, 94, 95, 96, 97, 98, 99, 100, 101, 102, 103, 104, 105, 106, 107, 108, 109, 110, 111, 112, 113, 114, 115, 116, 117, 118, 119, 120, 121, 122, 123, 124, 125, 126, 127, 128, 129, 130, 131, 132, 133, 134,135, 136, 137, 138, 139,140, 141, 142, 143, 144,145, 146, 147, 148, 149, 150, 151, 152, 153, 154, 155, 156, 157, 158, 159, 160, 161, 162, 163, 164, 165, 166, 167, 168, 169, 170, 171, 172, 173, 174, 175, 176, 177, 178, 179, 180, 181, 182, 183, 184, 185, 186, 187, 188, 189, 190, 191, 192, 193, 194, 195, 196, 197, 198, 199, 200 nucleotides. In some embodiments, the short synthetic sequence is 80-100 percent identical (e.g., 80%, to/or 81%, 82%, 83%, 84%, 85%, 86%, 87%, 88%, 89%, 90%, 91%, 92%, 93%, 94%, 95%, 96%, 97%, 98%, 99%, 100% identical) to a polynucleotide set forth in SEQ ID NOS: 1-9890 or SEQ ID NOS: 9891-16277.

### Vectors and Vector Libraries for MPRP

[0476] As shown in FIGS. 3-5, a synthetic oligo library can be prepared and synthesized. Unlike conventional approaches, the short synthetic oligo (also referred to as “designed oligos”) is flanked by two constant primers and is followed by a shifted stop codons and polyA signal (see e.g., FIG. 6). The short synthetic oligos can be about 200 nucleotides. In some embodiments, the short synthetic oligos range from about 10 to about 200 oligonucleotides, such as 10, to/or 11, 12, 13, 14, 15, 16, 17, 18, 19, 20, 21, 22, 23, 24, 25, 26, 27, 28, 29, 30, 31, 32, 33, 34, 35, 36, 37, 38, 39, 40, 41, 42, 43, 44, 45, 46, 47, 48, 49, 50, 51, 52, 53, 54, 55, 56, 57, 58, 59, 60, 61, 62, 63, 64, 65, 66, 67, 68, 69, 70, 71, 72, 73, 74, 75, 76, 77, 78, 79, 80, 81, 82, 83, 84, 85, 86, 87, 88, 89, 90, 91, 92, 93, 94, 95, 96, 97, 98, 99, 100, 101, 102, 103, 104, 105, 106, 107, 108, 109, 110, 111, 112, 113, 114, 115, 116, 117, 118, 119, 120, 121, 122, 123, 124, 125,126, 127, 128, 129, 130, 131, 132, 133, 134, 135, 136, 137,138, 139, 140, 141, 142, 143, 144, 145, 146, 147, 148, 149, 150, 151, 152, 153, 154, 155, 156, 157, 158, 159, 160, 161, 162, 163, 164, 165, 166, 167, 168, 169, 170, 171, 172, 173, 174, 175, 176, 177, 178, 179, 180, 181, 182, 183, 184, 185, 186, 187, 188, 189, 190, 191, 192, 193, 194, 195, 196, 197, 198, 199, 200 nucleotides. The sources of the synthetic oligonucleotides can be annotated genomic sequences, such as (a) an annotated region of a genome; (b) an unannotated region of a genome; (c) a mutation; (d) a 5′UTR; (e) a 3′UTR; (f) an open reading frame; or (g) any combination thereof. In certain example embodiments herein, the short synthetic polynucleotide (a) is a sequence according to a sequence in SEQ ID NOS: 1-9890 or SEQ ID NOS: 9891-16277; (b) is a synthetic in silico designed sequence; (d) does not have 100 percent identity to a genome sequence, optionally a human genome, a non-human animal genome, a plant genome, a microbial genome, or a viral genome; (e) is not native to any genome, optionally a human genome, a non-human animal genome, a plant genome, a microbial genome, or a viral genome; or (f) any combination thereof.

[0477] Described in certain example embodiments herein are vectors comprising a synthetic library expression construct comprising a short synthetic polynucleotide; a pair of constant primers flanking the short synthetic polynucleotide, the pair of constant primers comprising a forward constant primer and a reverse constant primer, wherein the forward constant primer and the reverse constant primer are each independently coupled to the 5′ end or the 3′ end of the short synthetic polynucleotide; a stop codon polynucleotide comprising one or more stop codons, wherein the stop codon polynucleotide is coupled to the constant primer coupled to the 3′ end of the short synthetic polynucleotide such that the constant primer coupled to the 3′ end of the short synthetic polynucleotide is between the multiple stop codon polynucleotide and the short synthetic polynucleotide; a poly A signal, wherein the poly A signal is operably coupled to the short synthetic polynucleotide, the pair of constant primers, and the stop codon polynucleotide; and a promoter, wherein the promoter is operably coupled to the short synthetic polynucleotide, the pair of constant primers, and the stop codon polynucleotide, and the poly A signal. In certain example embodiments, the short synthetic polynucleotide is about 200 nucleotides. In certain example embodiments, the short synthetic polynucleotide has a sequence corresponding to a region of a genome. In certain example embodiments, the short synthetic polynucleotide has a sequence corresponding to a region of a human genome, a non-human animal genome, a plant genome, a microbial genome, or a viral genome. In certain example embodiments, the short synthetic polynucleotide has a sequence corresponding to a (a) an annotated region of a genome; (b) an unannotated region of a genome; (c) a mutation; (d) a 5′UTR; (e) a 3′UTR; (f) an open reading frame; or (g) any combination thereof. In certain example embodiments, the short synthetic polynucleotide (a) is a sequence according to a sequence in SEQ ID NOS: 1-9890 or SEQ ID NOS: 9891-16277; (b) is a synthetic in silico designed sequence; (d) does not have 100 percent identity to a genome sequence, optionally a human genome, a non-human animal genome, a plant genome, a microbial genome, or a viral genome; (e) is not native to any genome, optionally a human genome, a non-human animal genome, a plant genome, a microbial genome, or a viral genome; or (f) any combination thereof.

[0478] In certain example embodiments, the vector comprises two or more synthetic library expression constructs. In certain example embodiments, at least two of the two or more synthetic library expression constructs comprises a different short synthetic polynucleotide. In certain example embodiments, each of the two or more synthetic library expression constructs comprises a different short synthetic polynucleotide. In certain example embodiments, at least two of the two or more synthetic library constructs comprises the same short synthetic polynucleotide. In certain example embodiments, the vector further comprises an additional regulatory element, a reporter gene, an origin of replication, a cloning sites, an internal ribosome entry sites, a transcription termination sequence, an inverted terminal repeat, a long terminal repeats, a trans-activating response elements, a central polypurine tract, a Psi element, a Rev response element, a packaging protein gene, a polymerase gene, an envelope protein gene, a capsid protein gene, a Rep protein gene, a U3 element, a repeat element (R), a unique 5′ element (U5), an untranslated region stabilization element, or any combination thereof. In certain example embodiments, the vector further comprises a Woodchuck hepatitis virus post-transcriptional regulatory element (WPRE), wherein the WPRE is operably coupled to the short synthetic polynucleotide and the pair of constant primers. In certain example embodiments, the vector is a eukaryotic expression vector. In certain example embodiments, the vector is a viral expression vector. In certain example embodiments, the promoter is a constitutive promoter. In certain example embodiments, the promoter is an inducible promoter or a conditional promoter. Exemplary vectors and additional vector components are described in greater detail elsewhere herein.

[0479] Described in certain example embodiments herein are synthetic oligo libraries comprising a plurality of short synthetic oligos optionally flanked by a forward and reverse constant primers. Short synthetic oligos are described in greater detail elsewhere herein. Described in certain example embodiments herein are vector libraries each comprising a plurality of vectors as described elsewhere herein.

[0480] In some embodiments, the synthetic oligo library contains 100, to/or 150, 200, 250, 300, 350, 400, 450, 500, 550, 600, 650, 700, 750, 800, 850, 900, 950, 1000, 1000, 2000, 3000, 4000, 5000, 6000, 7000, 8000, 9000, 10000, 11000, 12000, 13000, 14000, 15000, 16000, 17000, 18000, 19000, 20000, 21000, 22000, 23000, 24000, 25000, 26000, 27000, 28000, 29000, 30000, 31000, 32000, 33000, 34000, 35000, 36000, 37000, 38000, 39000, 40000, 41000, 42000, 43000, 44000, 45000, 46000, 47000, 48000, 49000, 50000, 51000, 52000, 53000, 54000, 55000, 56000, 57000, 58000, 59000, 60000, 61000, 62000, 63000, 64000, 65000, 66000, 67000, 68000, 69000, 70000, 71000, 72000, 73000, 74000, 75000, 76000, 77000, 78000, 79000, 80000, 81000, 82000, 83000, 84000, 85000, 86000, 87000, 88000, 89000, 90000, 91000, 92000, 93000, 94000, 95000, 96000, 97000, 98000, 99000, 100000, 101000, 102000, 103000, 104000, 105000, 106000, 107000, 108000, 109000, 110000, 111000, 112000, 113000, 114000, 115000, 116000, 117000, 118000, 119000, 120000, 121000, 122000, 123000, 124000, 125000, 126000, 127000, 128000, 129000, 130000, 131000, 132000, 133000, 134000, 135000, 136000, 137000, 138000, 139000, 140000, 141000, 142000, 143000, 144000, 145000, 146000, 147000, 148000, 149000, 150000, 151000, 152000, 153000, 154000, 155000, 156000, 157000, 158000, 159000, 160000, 161000, 162000, 163000, 164000, 165000, 166000, 167000, 168000, 169000, 170000, 171000, 172000, 173000, 174000, 175000, 176000, 177000, 178000, 179000, 180000, 181000, 182000, 183000, 184000, 185000, 186000, 187000, 188000, 189000, 190000, 191000, 192000, 193000, 194000, 195000, 196000, 197000, 198000, 199000, 200000, 201000, 202000, 203000, 204000, 205000, 206000, 207000, 208000, 209000, 210000, 211000, 212000, 213000, 214000, 215000, 216000, 217000, 218000, 219000, 220000, 221000, 222000, 223000, 224000, 225000, 226000, 227000, 228000, 229000, 230000, 231000, 232000, 233000, 234000, 235000, 236000, 237000, 238000, 239000, 240000, 241000, 242000, 243000, 244000, 245000, 246000, 247000, 248000, 249000, 250000, 251000, 252000, 253000, 254000, 255000, 256000, 257000, 258000, 259000, 260000, 261000, 262000, 263000, 264000, 265000, 266000, 267000, 268000, 269000, 270000, 271000, 272000, 273000, 274000, 275000, 276000, 277000, 278000, 279000, 280000, 281000, 282000, 283000, 284000, 285000, 286000, 287000, 288000, 289000, 290000, 291000, 292000, 293000, 294000, 295000, 296000, 297000, 298000, 299000, 300000, 301000, 302000, 303000, 304000, 305000, 306000, 307000, 308000, 309000, 310000, 311000, 312000, 313000, 314000, 315000, 316000, 317000, 318000, 319000, 320000, 321000, 322000, 323000, 324000, 325000, 326000, 327000, 328000, 329000, 330000, 331000, 332000, 333000, 334000, 335000, 336000, 337000, 338000, 339000, 340000, 341000, 342000, 343000, 344000, 345000, 346000, 347000, 348000, 349000, 350000, 351000, 352000, 353000, 354000, 355000, 356000, 357000, 358000, 359000, 360000, 361000, 362000, 363000, 364000, 365000, 366000, 367000, 368000, 369000, 370000, 371000, 372000, 373000, 374000, 375000, 376000, 377000, 378000, 379000, 380000, 381000, 382000, 383000, 384000, 385000, 386000, 387000, 388000, 389000, 390000, 391000, 392000, 393000, 394000, 395000, 396000, 397000, 398000, 399000, 400000, 401000, 402000, 403000, 404000, 405000, 406000, 407000, 408000, 409000, 410000, 411000, 412000, 413000, 414000, 415000, 416000, 417000, 418000, 419000, 420000, 421000, 422000, 423000, 424000, 425000, 426000, 427000, 428000, 429000, 430000, 431000, 432000, 433000, 434000, 435000, 436000, 437000, 438000, 439000, 440000, 441000, 442000, 443000, 444000, 445000, 446000, 447000, 448000, 449000, 450000, 451000, 452000, 453000, 454000, 455000, 456000, 457000, 458000, 459000, 460000, 461000, 462000, 463000, 464000, 465000, 466000, 467000, 468000, 469000, 470000, 471000, 472000, 473000, 474000, 475000, 476000, 477000, 478000, 479000, 480000, 481000, 482000, 483000, 484000, 485000, 486000, 487000, 488000, 489000, 490000, 491000, 492000, 493000, 494000, 495000, 496000, 497000, 498000, 499000, 500000, 501000, 502000, 503000, 504000, 505000, 506000, 507000, 508000, 509000, 510000, 511000, 512000, 513000, 514000, 515000, 516000, 517000, 518000, 519000, 520000, 521000, 522000, 523000, 524000, 525000, 526000, 527000, 528000, 529000, 530000, 531000, 532000, 533000, 534000, 535000, 536000, 537000, 538000, 539000, 540000, 541000, 542000, 543000, 544000, 545000, 546000, 547000, 548000, 549000, 550000, 551000, 552000, 553000, 554000, 555000, 556000, 557000, 558000, 559000, 560000, 561000, 562000, 563000, 564000, 565000, 566000, 567000, 568000, 569000, 570000, 571000, 572000, 573000, 574000, 575000, 576000, 577000, 578000, 579000, 580000, 581000, 582000, 583000, 584000, 585000, 586000, 587000, 588000, 589000, 590000, 591000, 592000, 593000, 594000, 595000, 596000, 597000, 598000, 599000, 600000, 601000, 602000, 603000, 604000, 605000, 606000, 607000, 608000, 609000, 610000, 611000, 612000, 613000, 614000, 615000, 616000, 617000, 618000, 619000, 620000, 621000, 622000, 623000, 624000, 625000, 626000, 627000, 628000, 629000, 630000, 631000, 632000, 633000, 634000, 635000, 636000, 637000, 638000, 639000, 640000, 641000, 642000, 643000, 644000, 645000, 646000, 647000, 648000, 649000, 650000, 651000, 652000, 653000, 654000, 655000, 656000, 657000, 658000, 659000, 660000, 661000, 662000, 663000, 664000, 665000, 666000, 667000, 668000, 669000, 670000, 671000, 672000, 673000, 674000, 675000, 676000, 677000, 678000, 679000, 680000, 681000, 682000, 683000, 684000, 685000, 686000, 687000, 688000, 689000, 690000, 691000, 692000, 693000, 694000, 695000, 696000, 697000, 698000, 699000, 700000, 701000, 702000, 703000, 704000, 705000, 706000, 707000, 708000, 709000, 710000, 711000, 712000, 713000, 714000, 715000, 716000, 717000, 718000, 719000, 720000, 721000, 722000, 723000, 724000, 725000, 726000, 727000, 728000, 729000, 730000, 731000, 732000, 733000, 734000, 735000, 736000, 737000, 738000, 739000, 740000, 741000, 742000, 743000, 744000, 745000, 746000, 747000, 748000, 749000, 750000, 751000, 752000, 753000, 754000, 755000, 756000, 757000, 758000, 759000, 760000, 761000, 762000, 763000, 764000, 765000, 766000, 767000, 768000, 769000, 770000, 771000, 772000, 773000, 774000, 775000, 776000, 777000, 778000, 779000, 780000, 781000, 782000, 783000, 784000, 785000, 786000, 787000, 788000, 789000, 790000, 791000, 792000, 793000, 794000, 795000, 796000, 797000, 798000, 799000, 800000, 801000, 802000, 803000, 804000, 805000, 806000, 807000, 808000, 809000, 810000, 811000, 812000, 813000, 814000, 815000, 816000, 817000, 818000, 819000, 820000, 821000, 822000, 823000, 824000, 825000, 826000, 827000, 828000, 829000, 830000, 831000, 832000, 833000, 834000, 835000, 836000, 837000, 838000, 839000, 840000, 841000, 842000, 843000, 844000, 845000, 846000, 847000, 848000, 849000, 850000, 851000, 852000, 853000, 854000, 855000, 856000, 857000, 858000, 859000, 860000, 861000, 862000, 863000, 864000, 865000, 866000, 867000, 868000, 869000, 870000, 871000, 872000, 873000, 874000, 875000, 876000, 877000, 878000, 879000, 880000, 881000, 882000, 883000, 884000, 885000, 886000, 887000, 888000, 889000, 890000, 891000, 892000, 893000, 894000, 895000, 896000, 897000, 898000, 899000, 900000, 901000, 902000, 903000, 904000, 905000, 906000, 907000, 908000, 909000, 910000, 911000, 912000, 913000, 914000, 915000, 916000, 917000, 918000, 919000, 920000, 921000, 922000, 923000, 924000, 925000, 926000, 927000, 928000, 929000, 930000, 931000, 932000, 933000, 934000, 935000, 936000, 937000, 938000, 939000, 940000, 941000, 942000, 943000, 944000, 945000, 946000, 947000, 948000, 949000, 950000, 951000, 952000, 953000, 954000, 955000, 956000, 957000, 958000, 959000, 960000, 961000, 962000, 963000, 964000, 965000, 966000, 967000, 968000, 969000, 970000, 971000, 972000, 973000, 974000, 975000, 976000, 977000, 978000, 979000, 980000, 981000, 982000, 983000, 984000, 985000, 986000, 987000, 988000, 989000, 990000, 991000, 992000, 993000, 994000, 995000, 996000, 997000, 998000, 999000, 1000000, or more synthetic oligonucleotide sequences.

[0481] In some embodiments, the vector library comprises 100, to/or 150, 200, 250, 300, 350, 400, 450, 500, 550, 600, 650, 700, 750, 800, 850, 900, 950, 1000, 1000, 2000, 3000, 4000, 5000, 6000, 7000, 8000, 9000, 10000, 11000, 12000, 13000, 14000, 15000, 16000, 17000, 18000, 19000, 20000, 21000, 22000, 23000, 24000, 25000, 26000, 27000, 28000, 29000, 30000, 31000, 32000, 33000, 34000, 35000, 36000, 37000, 38000, 39000, 40000, 41000, 42000, 43000, 44000, 45000, 46000, 47000, 48000, 49000, 50000, 51000, 52000, 53000, 54000, 55000, 56000, 57000, 58000, 59000, 60000, 61000, 62000, 63000, 64000, 65000, 66000, 67000, 68000, 69000, 70000, 71000, 72000, 73000, 74000, 75000, 76000, 77000, 78000, 79000, 80000, 81000, 82000, 83000, 84000, 85000, 86000, 87000, 88000, 89000, 90000, 91000, 92000, 93000, 94000, 95000, 96000, 97000, 98000, 99000, 100000, 101000, 102000, 103000, 104000, 105000, 106000, 107000, 108000, 109000, 110000, 111000, 112000, 113000, 114000, 115000, 116000, 117000, 118000, 119000, 120000, 121000, 122000, 123000, 124000, 125000, 126000, 127000, 128000, 129000, 130000, 131000, 132000, 133000, 134000, 135000, 136000, 137000, 138000, 139000, 140000, 141000, 142000, 143000, 144000, 145000, 146000, 147000, 148000, 149000, 150000, 151000, 152000, 153000, 154000, 155000, 156000, 157000, 158000, 159000, 160000, 161000, 162000, 163000, 164000, 165000, 166000, 167000, 168000, 169000, 170000, 171000, 172000, 173000, 174000, 175000, 176000, 177000, 178000, 179000, 180000, 181000, 182000, 183000, 184000, 185000, 186000, 187000, 188000, 189000, 190000, 191000, 192000, 193000, 194000, 195000, 196000, 197000, 198000, 199000, 200000, 201000, 202000, 203000, 204000, 205000, 206000, 207000, 208000, 209000, 210000, 211000, 212000, 213000, 214000, 215000, 216000, 217000, 218000, 219000, 220000, 221000, 222000, 223000, 224000, 225000, 226000, 227000, 228000, 229000, 230000, 231000, 232000, 233000, 234000, 235000, 236000, 237000, 238000, 239000, 240000, 241000, 242000, 243000, 244000, 245000, 246000, 247000, 248000, 249000, 250000, 251000, 252000, 253000, 254000, 255000, 256000, 257000, 258000, 259000, 260000, 261000, 262000, 263000, 264000, 265000, 266000, 267000, 268000, 269000, 270000, 271000, 272000, 273000, 274000, 275000, 276000, 277000, 278000, 279000, 280000, 281000, 282000, 283000, 284000, 285000, 286000, 287000, 288000, 289000, 290000, 291000, 292000, 293000, 294000, 295000, 296000, 297000, 298000, 299000, 300000, 301000, 302000, 303000, 304000, 305000, 306000, 307000, 308000, 309000, 310000, 311000, 312000, 313000, 314000, 315000, 316000, 317000, 318000, 319000, 320000, 321000, 322000, 323000, 324000, 325000, 326000, 327000, 328000, 329000, 330000, 331000, 332000, 333000, 334000, 335000, 336000, 337000, 338000, 339000, 340000, 341000, 342000, 343000, 344000, 345000, 346000, 347000, 348000, 349000, 350000, 351000, 352000, 353000, 354000, 355000, 356000, 357000, 358000, 359000, 360000, 361000, 362000, 363000, 364000, 365000, 366000, 367000, 368000, 369000, 370000, 371000, 372000, 373000, 374000, 375000, 376000, 377000, 378000, 379000, 380000, 381000, 382000, 383000, 384000, 385000, 386000, 387000, 388000, 389000, 390000, 391000, 392000, 393000, 394000, 395000, 396000, 397000, 398000, 399000, 400000, 401000, 402000, 403000, 404000, 405000, 406000, 407000, 408000, 409000, 410000, 411000, 412000, 413000, 414000, 415000, 416000, 417000, 418000, 419000, 420000, 421000, 422000, 423000, 424000, 425000, 426000, 427000, 428000, 429000, 430000, 431000, 432000, 433000, 434000, 435000, 436000, 437000, 438000, 439000, 440000, 441000, 442000, 443000, 444000, 445000, 446000, 447000, 448000, 449000, 450000, 451000, 452000, 453000, 454000, 455000, 456000, 457000, 458000, 459000, 460000, 461000, 462000, 463000, 464000, 465000, 466000, 467000, 468000, 469000, 470000, 471000, 472000, 473000, 474000, 475000, 476000, 477000, 478000, 479000, 480000, 481000, 482000, 483000, 484000, 485000, 486000, 487000, 488000, 489000, 490000, 491000, 492000, 493000, 494000, 495000, 496000, 497000, 498000, 499000, 500000, 501000, 502000, 503000, 504000, 505000, 506000, 507000, 508000, 509000, 510000, 511000, 512000, 513000, 514000, 515000, 516000, 517000, 518000, 519000, 520000, 521000, 522000, 523000, 524000, 525000, 526000, 527000, 528000, 529000, 530000, 531000, 532000, 533000, 534000, 535000, 536000, 537000, 538000, 539000, 540000, 541000, 542000, 543000, 544000, 545000, 546000, 547000, 548000, 549000, 550000, 551000, 552000, 553000, 554000, 555000, 556000, 557000, 558000, 559000, 560000, 561000, 562000, 563000, 564000, 565000, 566000, 567000, 568000, 569000, 570000, 571000, 572000, 573000, 574000, 575000, 576000, 577000, 578000, 579000, 580000, 581000, 582000, 583000, 584000, 585000, 586000, 587000, 588000, 589000, 590000, 591000, 592000, 593000, 594000, 595000, 596000, 597000, 598000, 599000, 600000, 601000, 602000, 603000, 604000, 605000, 606000, 607000, 608000, 609000, 610000, 611000, 612000, 613000, 614000, 615000, 616000, 617000, 618000, 619000, 620000, 621000, 622000, 623000, 624000, 625000, 626000, 627000, 628000, 629000, 630000, 631000, 632000, 633000, 634000, 635000, 636000, 637000, 638000, 639000, 640000, 641000, 642000, 643000, 644000, 645000, 646000, 647000, 648000, 649000, 650000, 651000, 652000, 653000, 654000, 655000, 656000, 657000, 658000, 659000, 660000, 661000, 662000, 663000, 664000, 665000, 666000, 667000, 668000, 669000, 670000, 671000, 672000, 673000, 674000, 675000, 676000, 677000, 678000, 679000, 680000, 681000, 682000, 683000, 684000, 685000, 686000, 687000, 688000, 689000, 690000, 691000, 692000, 693000, 694000, 695000, 696000, 697000, 698000, 699000, 700000, 701000, 702000, 703000, 704000, 705000, 706000, 707000, 708000, 709000, 710000, 711000, 712000, 713000, 714000, 715000, 716000, 717000, 718000, 719000, 720000, 721000, 722000, 723000, 724000, 725000, 726000, 727000, 728000, 729000, 730000, 731000, 732000, 733000, 734000, 735000, 736000, 737000, 738000, 739000, 740000, 741000, 742000, 743000, 744000, 745000, 746000, 747000, 748000, 749000, 750000, 751000, 752000, 753000, 754000, 755000, 756000, 757000, 758000, 759000, 760000, 761000, 762000, 763000, 764000, 765000, 766000, 767000, 768000, 769000, 770000, 771000, 772000, 773000, 774000, 775000, 776000, 777000, 778000, 779000, 780000, 781000, 782000, 783000, 784000, 785000, 786000, 787000, 788000, 789000, 790000, 791000, 792000, 793000, 794000, 795000, 796000, 797000, 798000, 799000, 800000, 801000, 802000, 803000, 804000, 805000, 806000, 807000, 808000, 809000, 810000, 811000, 812000, 813000, 814000, 815000, 816000, 817000, 818000, 819000, 820000, 821000, 822000, 823000, 824000, 825000, 826000, 827000, 828000, 829000, 830000, 831000, 832000, 833000, 834000, 835000, 836000, 837000, 838000, 839000, 840000, 841000, 842000, 843000, 844000, 845000, 846000, 847000, 848000, 849000, 850000, 851000, 852000, 853000, 854000, 855000, 856000, 857000, 858000, 859000, 860000, 861000, 862000, 863000, 864000, 865000, 866000, 867000, 868000, 869000, 870000, 871000, 872000, 873000, 874000, 875000, 876000, 877000, 878000, 879000, 880000, 881000, 882000, 883000, 884000, 885000, 886000, 887000, 888000, 889000, 890000, 891000, 892000, 893000, 894000, 895000, 896000, 897000, 898000, 899000, 900000, 901000, 902000, 903000, 904000, 905000, 906000, 907000, 908000, 909000, 910000, 911000, 912000, 913000, 914000, 915000, 916000, 917000, 918000, 919000, 920000, 921000, 922000, 923000, 924000, 925000, 926000, 927000, 928000, 929000, 930000, 931000, 932000, 933000, 934000, 935000, 936000, 937000, 938000, 939000, 940000, 941000, 942000, 943000, 944000, 945000, 946000, 947000, 948000, 949000, 950000, 951000, 952000, 953000, 954000, 955000, 956000, 957000, 958000, 959000, 960000, 961000, 962000, 963000, 964000, 965000, 966000, 967000, 968000, 969000, 970000, 971000, 972000, 973000, 974000, 975000, 976000, 977000, 978000, 979000, 980000, 981000, 982000, 983000, 984000, 985000, 986000, 987000, 988000, 989000, 990000, 991000, 992000, 993000, 994000, 995000, 996000, 997000, 998000, 999000, 1000000, or more vectors.

[0482] In certain example embodiments of the vector library, at least two vectors of the plurality of vectors comprises different short synthetic oligos. In certain example embodiments of the vector library, at least two vectors of the plurality of vectors comprises the same synthetic oligos. In certain example embodiments of the vector library, all the vectors of the plurality of vectors comprise different short synthetic oligos.

[0483] In certain example embodiments of the synthetic oligo library, at least two synthetic oligos of the plurality of synthetic oligos are different. In certain example embodiments of the synthetic oligo library, are the same synthetic oligos. In certain example embodiments of the synthetic oligo library, all synthetic oligo of the plurality of vectors comprise different short synthetic oligos.

### Cells and Delivery Vehicles

[0484] Described in certain example embodiments herein are cells comprising a synthetic oligo, synthetic oligo library, vector, or vector library as described elsewhere herein. In certain example embodiments, the cell is a eukaryotic cell or a prokaryotic cell. In some embodiments, the cell is capable of producing viral or other particles containing a synthetic oligo, synthetic oligo library, vector, or vector library. Exemplary cells and delivery vehicles are described in greater detail elsewhere herein and can be used in context with a synthetic oligo, synthetic oligo library, vector, or vector library described herein.

### Massively Parallel Antigen Presentation

[0485] In some embodiments, the short synthetic oligos and/or any viral sequences, such as ORFs, identified using a method herein can be further analyzed for their ability to be presented in associate with a MHCI or MHCII molecule. See e.g., FIG. 4A-4D. Generally, a library is expressed in associate with a MHCI and/or MHC II molecule. This is followed by MHCI or MHCII immune precipitation. Peptides associated with the MHCI or MHCII are then analyzed using a suitable mass spectrometry or other appropriate protein analysis technique to identify immunogenic peptides. MHCs are described in greater detail elsewhere herein. Such an approach is further detailed in US 2022/0088180, which is incorporated by reference as if expressed in its entirety herein. Thus, described in certain example embodiments herein are methods of massively parallel antigen profiling comprising delivering to and expressing in a plurality of cells a pan-genomic library or a polynucleotide as in any one of the preceding paragraphs or as described elsewhere herein, wherein the pan-genomic library comprises a plurality of synthetic library expression constructs, each comprising a short synthetic polynucleotide and a pair of constant primers flanking the short synthetic polynucleotide, wherein the short synthetic polynucleotide has a sequence corresponding to a region of a genome; and determining the antigens presented by the cells. In certain example embodiments, delivery comprises infecting the plurality of cells with viral particles comprising the pan-genomic library or a polynucleotide as in any one of the preceding paragraphs or as described elsewhere herein. In certain example embodiments, determining the antigens comprises protein sequencing, mass spectrometry, Raman spectroscopy, immunodetection, chromatography, centrifugation, isoelectric focusing, or any combination thereof. In certain example embodiments, determining the antigens comprises isolating MHC complexes from the cells and detecting peptides loaded in the MHC, wherein the MHC is optionally an HLA, such as an HLAI or HLAII. In certain example embodiments, the method further comprises evaluating an immune response to the antigens presented. Such approaches are further detailed in e.g., US 2022/0088180.

[0486] Synthetic oligo and vector libraries are further described elsewhere herein, such as in connection with the MPRP assay previously described. Such libraries can be used in connection with the massively parallel antigen presentation assay described herein. In some embodiments, a subset of sequences can be used in the massively parallel antigen presentation assay described herein. In some embodiments, the subset are ORFs that are identified by the MPRP assay or massively parallel reporter assay described elsewhere herein.

### Massively Parallel Reporter Assay

[0487] Also described herein are massively parallel reporter assays that rely on dual optically active reporter proteins to allow for determining oligo expression post infection. A general exemplary assay methodology is set forth in e.g., FIG. 24. Thus, described in certain example embodiments herein are methods comprising: (a) transducing one or more cells with one or more viral particles or a pan-viral engineered viral particle library comprising an optically active reporter construct as described herein and allowing for genomic integration and expression of the optically active reporter construct in the one or more cells; (b) selecting cells for genomic integration of the optically active reporter construct via sorting by detecting an optical signal produced from the first optically active protein and selecting cells that produce the optical signal from the second optically active protein; (c) sorting selected cells from (b) into expression bins, wherein sorting selected cells from (b) comprises detecting an optical signal produced by the first optically active protein; (d) sequencing one or more nucleic acids of the sorted selected cells by expression bin; and (e) computing an expression score for each test polynucleotide by expression bin.

[0488] In some embodiments, the first and second optically active proteins are fluorescent proteins or luminescent proteins. Exemplary fluorescent and luminescent proteins include, without limitation, green fluorescent protein (GFP), cyan fluorescent protein (CFP), yellow fluorescent protein (YFP), red fluorescent protein (RFP), near infrared fluorescent proteins, luciferase, and variants thereof, such as those with modified optical properties. See also e.g., Chudakov et la., Physiol Rev. 2010 July; 90(3):1103-63. doi: 10.1152/physrev.00038.2009; Lukyanov, K. A., Biochem Biophys Res Commun. 2022 Dec. 10; 633:29-32. doi: 10.1016/j.bbrc.2022.08.089; Karasev et al., Biochemistry (Mosc). 2019 January; 84(Suppl 1):S32-S50. doi: 10.1134/S0006297919140037, any of which can be adapted for use with the present invention. In some embodiments, sorting and/or selecting cells is done via fluorescence activated cell sorting (FACS). Techniques and methods of FACS are generally known in the art (see e.g., Lanier et al., J Immunol. 2014 Sep. 1; 193(5):2043-4. doi: 10.4049/jimmunol.1401725; Schoendube et al., Int J Mol Sci. 2015 Jul. 24; 16(8):16897-919. doi: 10.3390/ijms160816897; Manohar et al., Bioanalysis. 2021 February; 13(3):181-198. doi: 10.4155/bio-2020-0267; McKinnon, M. K., Curr Protoc Immunol. 2018 Feb. 21; 120:5.1.1-5.1.11. doi: 10.1002/cpim.40; Robinson, J. P., Biotechniques. 2022 April; 72(4):159-169. doi: 10.2144/btn-2022-0005; Ibrahim et al., Adv Biochem Eng Biotechnol. 2007; 106:19-39. doi: 10.1007/10_2007_073; and Montante and Brinkman. Int J Lab Hematol. 2019 May; 41 Suppl 1:56-62. doi: 10.1111/ijlh.13016).

[0489] In certain example embodiments, sequencing comprises DNA sequencing, RNA sequencing, or both. In certain example embodiments, sequencing comprises genomic DNA sequencing. In certain example embodiments, sequencing comprises next generation sequencing or third generation sequencing. In certain example embodiments, sequencing comprises deep sequencing. In certain example embodiments, sequencing comprises single cell sequencing. Exemplary sequencing methods are generally known in the art. See, e.g., Hu et al., Hum Immunol. 2021 November; 82(11):801-811. doi: 10.1016/j.humimm.2021.02.012; E. R. Mardis. Annu Rev Genomics Hum Genet. 2008; 9:387-402. doi: 10.1 146/annurev.genom.9.081307.164359; McCombie et al., Cold Spring Harb Perspect Med. 2019 Nov. 1; 9(11):a036798. doi: 10.1101/cshperspect.a036798; Gu et al., Annu Rev Pathol. 2019 Jan. 24; 14:319-338. doi: 10.1146/annurev-pathmechdis-012418-012751; Kumar et al., Semin Thromb Hemost. 2019 October; 45(7):661-673. doi: 10.1055/s-0039-1688446; van Dijk et al., Trends Genet. 2018 September; 34(9):666-681. doi: 10.1016/j.tig.2018.05.008; Rothberg and Rothberg. Clin Chem. 2015 July; 61(7):997-8. doi: 10.1373/clinchem.2014.237461; Athanasopoulou et al., Life (Basel). 2021 Dec. 26; 12(1):30. doi: 10.3390/life12010030; Pervez et al., Biomed Res Int. 2022 Sep. 29; 2022:3457806. doi: 10.1155/2022/3457806; Kalisky, T., Blainey, P. & Quake, S. R. Genomic Analysis at the Single-Cell Level. Annual review of genetics 45, 431-445, (2011); Kalisky, T. & Quake, S. R. Single-cell genomics. Nature Methods 8, 311-314 (2011); Islam, S. et al. Characterization of the single-cell transcriptional landscape by highly multiplex RNA-seq. Genome Research, (2011); Tang, F. et al. RNA-Seq analysis to capture the transcriptome landscape of a single cell. Nature Protocols 5, 516-535, (2010); Tang, F. et al. mRNA-Seq whole-transcriptome analysis of a single cell. Nature Methods 6, 377-382, (2009); Ramskold, D. et al. Full-length mRNA-Seq from single-cell levels of RNA and individual circulating tumor cells. Nature Biotechnology 30, 777-782, (2012); and Hashimshony, T., Wagner, F., Sher, N. & Yanai, I. CEL-Seq: Single-Cell RNA-Seq by Multiplexed Linear Amplification. Cell Reports, Cell Reports, Volume 2, Issue 3, p666-673, 2012; Picelli, S. et al., 2014, “Full-length RNA-seq from single cells using Smart-seq2” Nature protocols 9, 171-181, doi:10.1038/nprot.2014.006; Macosko et al., 2015, “Highly Parallel Genome-wide Expression Profiling of Individual Cells Using Nanoliter Droplets” Cell 161, 1202-1214; International patent application number PCT/US2015/049178, published as WO2016/040476 on Mar. 17, 2016; Klein et al., 2015, “Droplet Barcoding for Single-Cell Transcriptomics Applied to Embryonic Stem Cells” Cell 161, 1187-1201; International patent application number PCT/US2016/027734, published as WO2016168584A1 on Oct. 20, 2016; Zheng, et al., 2016, “Haplotyping germline and cancer genomes with high-throughput linked-read sequencing” Nature Biotechnology 34, 303-311; Zheng, et al., 2017, “Massively parallel digital transcriptional profiling of single cells” Nat. Commun. 8, 14049 doi: 10.1038/ncomms14049; International patent publication number WO2014210353A2; Zilionis, et al., 2017, “Single-cell barcoding and sequencing using droplet microfluidics” Nat Protoc. January; 12(1):44-73; Cao et al., 2017, “Comprehensive single cell transcriptional profiling of a multicellular organism by combinatorial indexing” bioRxiv preprint first posted online Feb. 2, 2017, doi: dx.doi.org/10.1101/104844; Rosenberg et al., 2017, “Scaling single cell transcriptomics through split pool barcoding” bioRxiv preprint first posted online Feb. 2, 2017, doi: dx.doi.org/10.1101/105163; Rosenberg et al., “Single-cell profiling of the developing mouse brain and spinal cord with split-pool barcoding” Science 15 Mar. 2018; Vitak, et al., “Sequencing thousands of single-cell genomes with combinatorial indexing” Nature Methods, 14(3):302-308, 2017; Cao, et al., Comprehensive single-cell transcriptional profiling of a multicellular organism. Science, 357(6352):661-667, 2017; Gierahn et al., “Seq-Well: portable, low-cost RNA sequencing of single cells at high throughput” Nature Methods 14, 395-398 (2017); and Hughes, et al., “Highly Efficient, Massively-Parallel Single-Cell RNA-Seq Reveals Cellular States and Molecular Features of Human Skin Pathology” bioRxiv 689273; doi: doi.org/10.1101/689273; Swiech et al., 2014, “In vivo interrogation of gene function in the mammalian brain using CRISPR-Cas9” Nature Biotechnology Vol. 33, pp. 102-106; Habib et al., 2016, “Div-Seq: Single-nucleus RNA-Seq reveals dynamics of rare adult newborn neurons” Science, Vol. 353, Issue 6302, pp. 925-928; Habib et al., 2017, “Massively parallel single-nucleus RNA-seq with DroNc-seq” Nat Methods. 2017 October; 14(10):955-958; International patent application number PCT/US2016/059239, published as WO2017164936 on Sep. 28, 2017; International patent application number PCT/US2018/060860, published as WO/2019/094984 on May 16, 2019; International patent application number PCT/US2019/055894, published as WO/2020/077236 on Apr. 16, 2020; and Drokhlyansky, et al., “The enteric nervous system of the human and mouse colon at a single-cell resolution,” bioRxiv 746743; doi: doi.org/10.1101/746743; Buenrostro, et al., Transposition of native chromatin for fast and sensitive epigenomic profiling of open chromatin, DNA-binding proteins and nucleosome position. Nature methods 2013; 10 (12): 1213-1218; Buenrostro et al., Single-cell chromatin accessibility reveals principles of regulatory variation. Nature 523, 486-490 (2015); Cusanovich, D. A., Daza, R., Adey, A., Pliner, H., Christiansen, L., Gunderson, K. L., Steemers, F. J., Trapnell, C. & Shendure, J. Multiplex single-cell profiling of chromatin accessibility by combinatorial cellular indexing. Science. 2015 May 22; 348(6237):910-4. doi: 10.1126/science.aab1601. Epub 2015 May 7; US20160208323A1; US20160060691A1; and WO2017156336A1) and others set forth elsewhere herein.

### Screening Test Agents

[0490] The MPRP can be used to screen test agents and/or conditions for their effect on expression of the one or more polynucleotides, such as any of those in synthetic oligo, vector, viral particle, or pan viral library described herein. Generally, the method can include performing the MPRP in the presence and absence of the test agent or condition and comparing the outputs.

[0491] Described in certain example embodiments herein are methods of screening test agents and/or conditions comprising (a) transducing a first set of one or more cells with one or more viral particles or a pan-viral engineered viral particle library having an optically active reporter construct as described in any one of the preceding claims and elsewhere herein and allowing for genomic integration and expression of the optically active reporter construct in the one or more cells; (b) transducing a second set of the one or more cells with the one or more viral particles or a pan-viral engineered viral particle library having an optically active reporter construct as in any one of the preceding paragraphs or elsewhere herein and allowing for genomic integration and expression of the optically active reporter construct in the one or more cells, wherein the second set of one or more cells comprises the same one or more cells as the first set of one or more cells, and wherein the one or more viral particles or the pan-viral engineered viral particle library used to transduce the second set of one or more cells is the same as the one or more viral particles or the pan-viral engineered viral particle library used to transduce the first set of one or more cells; (c) exposing the second set of one or more cells to one or more test agents and/or conditions; (d) selecting cells in each of the first set of one or more cells and second set of one or more cells for genomic integration of the optically active reporter construct via sorting by detecting an optical signal produced from the first optically active protein and selecting cells that produce the optical signal from the second optically active protein; (e) sorting selected cells from (d) into expression bins, wherein sorting selected cells from (d) comprises detecting an optical signal produced by the first optically active protein; (f) sequencing one or more nucleic acids of the sorted selected cells by expression bin; (g) computing an expression score for each test polynucleotide by expression bin; and (h) comparing expression scores for each test polynucleotide between the first and second set of cells to determine an effect of the test agent and/or condition. In certain example embodiments, sequencing comprises DNA sequencing, RNA sequencing, or both. In certain example embodiments, sequencing comprises genomic DNA sequencing. In certain example embodiments, sequencing comprises next generation sequencing or third generation sequencing. In certain example embodiments, sequencing comprises deep sequencing. In certain example embodiments, sequencing comprises single cell sequencing. These and other techniques are described in greater detail elsewhere herein.

### Exemplary Test Agents and Conditions

[0492] In certain example embodiments, the test agent or condition is a small molecule agent, a biologic agent, a chemical agent, a physical stress, a chemical stress, or any combination thereof “Small molecule” is a term of art that is generally referred to small molecules ranging from about 0.1 to 1 kDA in size. In some embodiments, the small molecules are biologic molecules such as proteins or nucleic acids. In some embodiments, the small molecules are chemical compounds. Biologic compounds include, but are not limited to, DNA (single and double stranded), RNA (single and double stranded), hybrid DNA:RNA molecules, peptides, polypeptides, amino acids, lipids, and/or any combination thereof. Other exemplary agents include, but are not limited to Drug compounds include, but are not limited to, DNA, RNA, amino acids, peptides, polypeptides, antibodies, aptamers, ribozymes, guide sequences for ribozymes that inhibit translation or transcription of essential tumor proteins and genes, hormones, immunomodulators, antipyretics, anxiolytics, antipsychotics, analgesics, antispasmodics, anti-inflammatories, anti-histamines, anti-infectives, radiation sensitizers, chemotherapeutics.

[0493] Suitable hormones include, but are not limited to, amino-acid derived hormones (e.g. melatonin and thyroxine), small peptide hormones and protein hormones (e.g. thyrotropin-releasing hormone, vasopressin, insulin, growth hormone, luteinizing hormone, follicle-stimulating hormone, and thyroid-stimulating hormone), eicosanoids (e.g. arachidonic acid, lipoxins, and prostaglandins), and steroid hormones (e.g. estradiol, testosterone, tetrahydro testosterone, cortisol).

[0494] Suitable immunomodulators include, but are not limited to, prednisone, azathioprine, 6-MP, cyclosporine, tacrolimus, methotrexate, interleukins (e.g., IL-2, IL-7, and IL-12), cytokines (e.g. interferons (e.g. IFN-α, IFN-β, IFN-ε, IFN-K, IFN-ω, and IFN-γ), granulocyte colony-stimulating factor, and imiquimod), chemokines (e.g. CCL3, CCL26 and CXCL7), cytosine phosphate-guanosine, oligodeoxynucleotides, glucans, antibodies, and aptamers).

[0495] Suitable antipyretics include, but are not limited to, non-steroidal anti-inflammants (e.g. ibuprofen, naproxen, ketoprofen, and nimesulide), aspirin and related salicylates (e.g. choline salicylate, magnesium salicylate, and sodium salicylate), paracetamol/acetaminophen, metamizole, nabumetone, phenazone, and quinine.

[0496] Suitable anxiolytics include, but are not limited to, benzodiazepines (e.g. alprazolam, bromazepam, chlordiazepoxide, clonazepam, clorazepate, diazepam, flurazepam, lorazepam, oxazepam, temazepam, triazolam, and tofisopam), serotenergic antidepressants (e.g. selective serotonin reuptake inhibitors, tricyclic antidepressants, and monoamine oxidase inhibitors), mebicar, afobazole, selank, bromantane, emoxypine, azapirones, barbiturates, hydroxyzine, pregabalin, validol, and beta blockers.

[0497] Suitable antipsychotics include, but are not limited to, benperidol, bromoperidol, droperidol, haloperidol, moperone, pipaperone, timiperone, fluspirilene, penfluridol, pimozide, acepromazine, chlorpromazine, cyamemazine, dizyrazine, fluphenazine, levomepromazine, mesoridazine, perazine, pericyazine, perphenazine, pipotiazine, prochlorperazine, promazine, promethazine, prothipendyl, thioproperazine, thioridazine, trifluoperazine, triflupromazine, chlorprothixene, clopenthixol, flupentixol, tiotixene, zuclopenthixol, clotiapine, loxapine, prothipendyl, carpipramine, clocapramine, molindone, mosapramine, sulpiride, veralipride, amisulpride, amoxapine, aripiprazole, asenapine, clozapine, blonanserin, iloperidone, lurasidone, melperone, nemonapride, olanzapine, paliperidone, perospirone, quetiapine, remoxipride, risperidone, sertindole, trimipramine, ziprasidone, zotepine, alstonie, befeprunox, bitopertin, brexpiprazole, cannabidiol, cariprazine, pimavanserin, pomaglumetad methionil, vabicaserin, xanomeline, and zicronapine.

[0498] Suitable analgesics include, but are not limited to, paracetamol/acetaminophen, nonsteroidal anti-inflammants (e.g. ibuprofen, naproxen, ketoprofen, and nimesulide), COX-2 inhibitors (e.g. rofecoxib, celecoxib, and etoricoxib), opioids (e.g. morphine, codeine, oxycodone, hydrocodone, dihydromorphine, pethidine, buprenorphine), tramadol, norepinephrine, flupiretine, nefopam, orphenadrine, pregabalin, gabapentin, cyclobenzaprine, scopolamine, methadone, ketobemidone, piritramide, and aspirin and related salicylates (e.g. choline salicylate, magnesium salicylate, and sodium salicylate).

[0499] Suitable antispasmodics include, but are not limited to, mebeverine, papverine, cyclobenzaprine, carisoprodol, orphenadrine, tizanidine, metaxalone, methodcarbamol, chlorzoxazone, baclofen, dantrolene, baclofen, tizanidine, and dantrolene. Suitable anti-inflammatories include, but are not limited to, prednisone, non-steroidal anti-inflammants (e.g. ibuprofen, naproxen, ketoprofen, and nimesulide), COX-2 inhibitors (e.g. rofecoxib, celecoxib, and etoricoxib), and immune selective anti-inflammatory derivatives (e.g. submandibular gland peptide-T and its derivatives).

[0500] Suitable anti-histamines include, but are not limited to, H1-receptor antagonists (e.g. acrivastine, azelastine, bilastine, brompheniramine, buclizine, bromodiphenhydramine, carbinoxamine, cetirizine, chlorpromazine, cyclizine, chlorpheniramine, clemastine, cyproheptadine, desloratadine, dexbromapheniramine, dexchlorpheniramine, dimenhydrinate, dimetindene, diphenhydramine, doxylamine, ebasine, embramine, fexofenadine, hydroxyzine, levocetirzine, loratadine, meclozine, mirtazapine, olopatadine, orphenadrine, phenindamine, pheniramine, phenyltoloxamine, promethazine, pyrilamine, quetiapine, rupatadine, tripelennamine, and triprolidine), H2-receptor antagonists (e.g. cimetidine, famotidine, lafutidine, nizatidine, rafitidine, and roxatidine), tritoqualine, catechin, cromoglicate, nedocromil, and p2-adrenergic agonists.

[0501] Suitable anti-infectives include, but are not limited to, amebicides (e.g. nitazoxanide, paromomycin, metronidazole, tinidazole, chloroquine, miltefosine, amphotericin b, and iodoquinol), aminoglycosides (e.g. paromomycin, tobramycin, gentamicin, amikacin, kanamycin, and neomycin), anthelmintics (e.g. pyrantel, mebendazole, ivermectin, praziquantel, abendazole, thiabendazole, oxamniquine), antifungals (e.g. azole antifungals (e.g. itraconazole, fluconazole, posaconazole, ketoconazole, clotrimazole, miconazole, and voriconazole), echinocandins (e.g. caspofungin, anidulafungin, and micafungin), griseofulvin, terbinafine, flucytosine, and polyenes (e.g. nystatin, and amphotericin b), antimalarial agents (e.g. pyrimethamine/sulfadoxine, artemether/lumefantrine, atovaquone/proquanil, quinine, hydroxychloroquine, mefloquine, chloroquine, doxycycline, pyrimethamine, and halofantrine), antituberculosis agents (e.g. aminosalicylates (e.g. aminosalicylic acid), isoniazid/rifampin, isoniazid/pyrazinamide/rifampin, bedaquiline, isoniazid, ethambutol, rifampin, rifabutin, rifapentine, capreomycin, and cycloserine), antivirals (e.g. amantadine, rimantadine, abacavir/lamivudine, emtricitabine/tenofovir, cobicistat/elvitegravir/emtricitabine/tenofovir, efavirenz/emtricitabine/tenofovir, avacavir/lamivudine/zidovudine, lamivudine/zidovudine, emtricitabine/tenofovir, emtricitabine/opinavir/ritonavir/tenofovir, interferon alfa-2v/ribavirin, peginterferon alfa-2b, maraviroc, raltegravir, dolutegravir, enfuvirtide, foscarnet, fomivirsen, oseltamivir, zanamivir, nevirapine, efavirenz, etravirine, rilpivirine, delaviridine, nevirapine, entecavir, lamivudine, adefovir, sofosbuvir, didanosine, tenofovir, avacivr, zidovudine, stavudine, emtricitabine, xalcitabine, telbivudine, simeprevir, boceprevir, telaprevir, lopinavir/ritonavir, fosamprenvir, dranuavir, ritonavir, tipranavir, atazanavir, nelfinavir, amprenavir, indinavir, sawuinavir, ribavirin, valcyclovir, acyclovir, famciclovir, ganciclovir, and valganciclovir), carbapenems (e.g. doripenem, meropenem, ertapenem, and cilastatin/imipenem), cephalosporins (e.g. cefadroxil, cephradine, cefazolin, cephalexin, cefepime, ceflaroline, loracarbef, cefotetan, cefuroxime, cefprozil, loracarbef, cefoxitin, cefaclor, ceftibuten, ceftriaxone, cefotaxime, cefpodoxime, cefdinir, cefixime, cefditoren, cefizoxime, and ceftazidime), glycopeptide antibiotics (e.g. vancomycin, dalbavancin, oritavancin, and telvancin), glycylcyclines (e.g. tigecycline), leprostatics (e.g. clofazimine and thalidomide), lincomycin and derivatives thereof (e.g. clindamycin and lincomycin), macrolides and derivatives thereof (e.g. telithromycin, fidaxomicin, erythromycin, azithromycin, clarithromycin, dirithromycin, and troleandomycin), linezolid, sulfamethoxazole/trimethoprim, rifaximin, chloramphenicol, fosfomycin, metronidazole, aztreonam, bacitracin, penicillins (amoxicillin, ampicillin, bacampicillin, carbenicillin, piperacillin, ticarcillin, amoxicillin/clavulanate, ampicillin/sulbactam, piperacillin/tazobactam, clavulanate/ticarcillin, penicillin, procaine penicillin, oxaxillin, dicloxacillin, and nafcillin), quinolones (e.g. lomefloxacin, norfloxacin, ofloxacin, qatifloxacin, moxifloxacin, ciprofloxacin, levofloxacin, gemifloxacin, moxifloxacin, cinoxacin, nalidixic acid, enoxacin, grepafloxacin, gatifloxacin, trovafloxacin, and sparfloxacin), sulfonamides (e.g. sulfamethoxazole/trimethoprim, sulfasalazine, and sulfasoxazole), tetracyclines (e.g. doxycycline, demeclocycline, minocycline, doxycycline/salicyclic acid, doxycycline/omega-3 polyunsaturated fatty acids, and tetracycline), and urinary anti-infectives (e.g. nitrofurantoin, methenamine, fosfomycin, cinoxacin, nalidixic acid, trimethoprim, and methylene blue).

[0502] Suitable chemotherapeutics include, but are not limited to, paclitaxel, brentuximab vedotin, doxorubicin, 5-FU (fluorouracil), everolimus, pemetrexed, melphalan, pamidronate, anastrozole, exemestane, nelarabine, ofatumumab, bevacizumab, belinostat, tositumomab, carmustine, bleomycin, bosutinib, busulfan, alemtuzumab, irinotecan, vandetanib, bicalutamide, lomustine, daunorubicin, clofarabine, cabozantinib, dactinomycin, ramucirumab, cytarabine, Cytoxan, cyclophosphamide, decitabine, dexamethasone, docetaxel, hydroxyurea, decarbazine, leuprolide, epirubicin, oxaliplatin, asparaginase, estramustine, cetuximab, vismodegib, asparginase Erwinia chrysanthemi, amifostine, etoposide, flutamide, toremifene, fulvestrant, letrozole, degarelix, pralatrexate, methotrexate, floxuridine, obinutuzumab, gemcitabine, afatinib, imatinib mesylatem, carmustine, eribulin, trastuzumab, altretamine, topotecan, ponatinib, idarubicin, ifosfamide, ibrutinib, axitinib, interferon alfa-2a, gefitinib, romidepsin, ixabepilone, ruxolitinib, cabazitaxel, ado-trastuzumab emtansine, carfilzomib, chlorambucil, sargramostim, cladribine, mitotane, vincristine, procarbazine, megestrol, trametinib, mesna, strontium-89 chloride, mechlorethamine, mitomycin, busulfan, gemtuzumab ozogamicin, vinorelbine, filgrastim, pegfilgrastim, sorafenib, nilutamide, pentostatin, tamoxifen, mitoxantrone, pegaspargase, denileukin diftitox, alitretinoin, carboplatin, pertuzumab, cisplatin, pomalidomide, prednisone, aldesleukin, mercaptopurine, zoledronic acid, lenalidomide, rituximab, octretide, dasatinib, regorafenib, histrelin, sunitinib, siltuximab, omacetaxine, thioguanine (tioguanine), dabrafenib, erlotinib, bexarotene, temozolomide, thiotepa, thalidomide, BCG, temsirolimus, bendamustine hydrochloride, triptorelin, aresnic trioxide, lapatinib, valrubicin, panitumumab, vinblastine, bortezomib, tretinoin, azacitidine, pazopanib, teniposide, leucovorin, crizotinib, capecitabine, enzalutamide, ipilimumab, goserelin, vorinostat, idelalisib, ceritinib, abiraterone, epothilone, tafluposide, azathioprine, doxifluridine, vindesine, and all-trans retinoic acid.

[0503] Suitable radiation sensitizers include, but are not limited to, 5-fluorouracil, platinum analogs (e.g. cisplatin, carboplatin, and oxaliplatin), gemcitabine, DNA topoisomerase I-targeting drugs (e.g. camptothecin derivatives (e.g. topotecan and irinotecan)), epidermal growth factor receptor blockade family agents (e.g. cetuximab, gefitinib), farnesyltransferase inhibitors (e.g., L-778-123), COX-2 inhibitors (e.g. rofecoxib, celecoxib, and etoricoxib), bFGF and VEGF targeting agents (e.g. bevazucimab and thalidomide), NBTXR3, Nimoral, trans sodium crocetinate, NVX-108, and combinations thereof. See also e.g., Kvols, L. K., J Nucl Med 2005; 46:187S-190S.

[0504] In some embodiments, the test agent comprises one or more anti-viral agents. Exemplary antiviral-agents include without limitation, nucleoside analogues with reverse transcriptase activity (e.g., tenofovir, emtricitabine, lamivudine, abacavir, stavudine, didanosine, and zidovudine), nonnucleoside reverse transcriptase inhibitors (e.g., delavirdine, efavirenz, etravirine, nevirapine, and rilpivirine), protease inhibitors (atazanavir, darunavir, indinavir, ritonavir, tipranavir and many others), and miscellaneous agents such as maraviroc, enfuvirtide (fusion inhibitor), and integrase inhibitors (raltegravir, elvitegravir and dolutegravir), emdesivir, molnupiravir, Paxlovid (nirmatrelvir and ritonavir), Tecovirimat, seltamivir (oral), zanamivir (by inhalation) and peramivir (intravenous), baloxavir (oral), valacyclovir, cidofovir, famciclovir, ganciclovir, valganciclovir, foscarnet, simeprevir, paritaprevir, grazoprevir, glecaprevir, sofosbuvir, dasabuvir, daclatasvir, elbasvir, lepidasvir, velpatsvir, ombitasvir, pibrentasvor, Alpha interferon, peginterferon, monoclonal antibodies targeting specific viruses, and any combination thereof.

[0505] In some embodiments, the test condition is applied to the cell during and/or after transduction of a viral particle. The test condition can be any stress applied to the cell, including but not limited to a thermal stress (e.g., applying hot or cold environmental conditions to the cell), oxygen or other gas depletion or enrichment; a strain, a tension, a pressure, a change in salinity, osmolarity, pH, or other cell culture media condition, and/or the like. Such a stress can be applied continuously or be applied for one or more periods of time. Other stresses will be appreciated by one of ordinary skill in the art in view of the description herein.

### Vector and Viral Libraries for the MPRP

[0506] The MPRP utilizes vectors that include an optically active reporter constructs. See e.g., FIGS. 21, 22, and 29. Thus, described in certain example embodiments herein are vectors comprising an optically active reporter construct comprising a test polynucleotide; a first optically active protein encoding polynucleotide, wherein the first optically active protein encoding polynucleotide is operatively coupled in-frame with the test polynucleotide; a second optically active protein encoding polynucleotide, wherein the second optically active protein is a different optically active protein that the first optically active protein; a promoter, wherein the test polynucleotide, the first optically active protein encoding polynucleotide, and the second optically active protein encoding polynucleotide are operatively coupled to the promoter; and an internal ribosomal entry site (IRES), wherein the IRES is between the first optically active protein encoding polynucleotide and the second optically active protein encoding polynucleotide.

[0507] In certain example embodiments, the method further comprises one or more additional regulatory elements, one or more additional reporters, viral replication elements and/or encoding polynucleotides, viral packaging elements and/or encoding polynucleotides, viral envelope protein encoding polynucleotides, long-terminal repeats, viral poly or any combination thereof. In certain example embodiments, the promoter is a constitutive promoter or an inducible promoter. In certain example embodiments, the method further comprises one or more untranslated regions (UTRs), wherein the one or more untranslated regions are operatively coupled at the 5′ and/or 3′ end of the test polynucleotide and/or the first optically active protein encoding polynucleotide. In certain example embodiments, the one or more untranslated regions comprise or consist of 5′ UTRs, 3′ UTRs, or both.

[0508] In certain example embodiments, the test polynucleotide comprises or consists of a short synthetic polynucleotide. In certain example embodiments, the short synthetic polynucleotide is about 200 nucleotides. In certain example embodiments, the short synthetic polynucleotide is about 10 to about 200 nucleotides.

[0509] In certain example embodiments, the short synthetic polynucleotide has a sequence corresponding to a region of a genome. In certain example embodiments, the short synthetic polynucleotide has a sequence corresponding to a region of a human genome, a non-human animal genome, a plant genome, a microbial genome, or a viral genome. In certain example embodiments, the short synthetic polynucleotide has a sequence corresponding to (a) an annotated region of a genome; (b) an unannotated region of a genome; (c) a mutation; (d) a 5′UTR; (e) a 3′UTR; (f) an open reading frame; or (g) any combination thereof. In certain example embodiments, the short synthetic polynucleotide (a) is a sequence according to a sequence in SEQ ID NOS: 1-9890 or SEQ ID NOS: 9891-16277; (b) is a synthetic in silico designed sequence; (d) does not have 100 percent identity to a genome sequence, optionally a human genome, a non-human animal genome, a plant genome, a microbial genome, or a viral genome; (e) is not native to a genome, optionally a human genome, a non-human animal genome, a plant genome, a microbial genome, or a viral genome; or (f) any combination thereof. In certain example embodiments, the vector is a viral vector, optionally a retroviral vector, lentiviral vector, adenoviral vector, or adeno-associated viral vector.

[0510] Described in certain example embodiments, are vector systems comprising a vector comprising an optically active reporter construct as described herein, and optionally one or more a viral envelope protein vectors, one or more viral packaging vectors, or any combination thereof. In certain example embodiments, the vectors or vector systems are capable of producing viral particles comprising the optically active reporter construct. In some embodiments, the system is delivered to a plurality of cells.

[0511] As previously described the MPRP utilizes a viral or pan-viral library to transduce cells. The viral or pan-viral library comprises a plurality viral particles that contain optically active reporter constructs to be evaluated. Such reporter constructs are as previously described. Described in certain example embodiments, is an optically active reporter construct library, optionally a pan-genome or pan-viral genomic optically active reporter construct library comprising a plurality of vectors each comprising an optically active reporter construct as in any described herein, wherein at least two test polynucleotides are different or the same. In certain example embodiments, each test polynucleotide is different. In certain example embodiments, the test polynucleotides in each of the vectors of the plurality of vectors comprises or consists of a short synthetic polynucleotide.

[0512] In certain example embodiments, the test polynucleotide comprises or consists of a short synthetic polynucleotide. In certain example embodiments, the short synthetic polynucleotide is about 200 nucleotides. In certain example embodiments, the short synthetic polynucleotide is about 10 to about 200 nucleotides. In certain example embodiments, the short synthetic polynucleotide has a sequence corresponding to a region of a genome. In certain example embodiments, the short synthetic polynucleotide has a sequence corresponding to a region of a human genome, a non-human animal genome, a plant genome, a microbial genome, or a viral genome. In certain example embodiments, the short synthetic polynucleotide has a sequence corresponding to (a) an annotated region of a genome; (b) an unannotated region of a genome; (c) a mutation; (d) a 5′UTR; (e) a 3′UTR; (f) an open reading frame; or (g) any combination thereof. In certain example embodiments, the short synthetic polynucleotide (a) is a sequence according to a sequence in SEQ ID NOS: 1-9890 or SEQ ID NOS: 9891-16277; (b) is a synthetic in silico designed sequence; (d) does not have 100 percent identity to a genome sequence, optionally a human genome, a non-human animal genome, a plant genome, a microbial genome, or a viral genome; (e) is not native to a genome, optionally a human genome, a non-human animal genome, a plant genome, a microbial genome, or a viral genome; or (f) any combination thereof. In certain example embodiments, the vector is a viral vector, optionally a retroviral vector, lentiviral vector, adenoviral vector, or adeno-associated viral vector.

[0513] In some embodiments, the viral library or viral particle library (e.g. pan viral library or pan viral particle library) contains 100, to/or 150, 200, 250, 300, 350, 400, 450, 500, 550, 600, 650, 700, 750, 800, 850, 900, 950, 1000, 1000, 2000, 3000, 4000, 5000, 6000, 7000, 8000, 9000, 10000, 11000, 12000, 13000, 14000, 15000, 16000, 17000, 18000, 19000, 20000, 21000, 22000, 23000, 24000, 25000, 26000, 27000, 28000, 29000, 30000, 31000, 32000, 33000, 34000, 35000, 36000, 37000, 38000, 39000, 40000, 41000, 42000, 43000, 44000, 45000, 46000, 47000, 48000, 49000, 50000, 51000, 52000, 53000, 54000, 55000, 56000, 57000, 58000, 59000, 60000, 61000, 62000, 63000, 64000, 65000, 66000, 67000, 68000, 69000, 70000, 71000, 72000, 73000, 74000, 75000, 76000, 77000, 78000, 79000, 80000, 81000, 82000, 83000, 84000, 85000, 86000, 87000, 88000, 89000, 90000, 91000, 92000, 93000, 94000, 95000, 96000, 97000, 98000, 99000, 100000, 101000, 102000, 103000, 104000, 105000, 106000, 107000, 108000, 109000, 110000, 111000, 112000, 113000, 114000, 115000, 116000, 117000, 118000, 119000, 120000, 121000, 122000, 123000, 124000, 125000, 126000, 127000, 128000, 129000, 130000, 131000, 132000, 133000, 134000, 135000, 136000, 137000, 138000, 139000, 140000, 141000, 142000, 143000, 144000, 145000, 146000, 147000, 148000, 149000, 150000, 151000, 152000, 153000, 154000, 155000, 156000, 157000, 158000, 159000, 160000, 161000, 162000, 163000, 164000, 165000, 166000, 167000, 168000, 169000, 170000, 171000, 172000, 173000, 174000, 175000, 176000, 177000, 178000, 179000, 180000, 181000, 182000, 183000, 184000, 185000, 186000, 187000, 188000, 189000, 190000, 191000, 192000, 193000, 194000, 195000, 196000, 197000, 198000, 199000, 200000, 201000, 202000, 203000, 204000, 205000, 206000, 207000, 208000, 209000, 210000, 211000, 212000, 213000, 214000, 215000, 216000, 217000, 218000, 219000, 220000, 221000, 222000, 223000, 224000, 225000, 226000, 227000, 228000, 229000, 230000, 231000, 232000, 233000, 234000, 235000, 236000, 237000, 238000, 239000, 240000, 241000, 242000, 243000, 244000, 245000, 246000, 247000, 248000, 249000, 250000, 251000, 252000, 253000, 254000, 255000, 256000, 257000, 258000, 259000, 260000, 261000, 262000, 263000, 264000, 265000, 266000, 267000, 268000, 269000, 270000, 271000, 272000, 273000, 274000, 275000, 276000, 277000, 278000, 279000, 280000, 281000, 282000, 283000, 284000, 285000, 286000, 287000, 288000, 289000, 290000, 291000, 292000, 293000, 294000, 295000, 296000, 297000, 298000, 299000, 300000, 301000, 302000, 303000, 304000, 305000, 306000, 307000, 308000, 309000, 310000, 311000, 312000, 313000, 314000, 315000, 316000, 317000, 318000, 319000, 320000, 321000, 322000, 323000, 324000, 325000, 326000, 327000, 328000, 329000, 330000, 331000, 332000, 333000, 334000, 335000, 336000, 337000, 338000, 339000, 340000, 341000, 342000, 343000, 344000, 345000, 346000, 347000, 348000, 349000, 350000, 351000, 352000, 353000, 354000, 355000, 356000, 357000, 358000, 359000, 360000, 361000, 362000, 363000, 364000, 365000, 366000, 367000, 368000, 369000, 370000, 371000, 372000, 373000, 374000, 375000, 376000, 377000, 378000, 379000, 380000, 381000, 382000, 383000, 384000, 385000, 386000, 387000, 388000, 389000, 390000, 391000, 392000, 393000, 394000, 395000, 396000, 397000, 398000, 399000, 400000, 401000, 402000, 403000, 404000, 405000, 406000, 407000, 408000, 409000, 410000, 411000, 412000, 413000, 414000, 415000, 416000, 417000, 418000, 419000, 420000, 421000, 422000, 423000, 424000, 425000, 426000, 427000, 428000, 429000, 430000, 431000, 432000, 433000, 434000, 435000, 436000, 437000, 438000, 439000, 440000, 441000, 442000, 443000, 444000, 445000, 446000, 447000, 448000, 449000, 450000, 451000, 452000, 453000, 454000, 455000, 456000, 457000, 458000, 459000, 460000, 461000, 462000, 463000, 464000, 465000, 466000, 467000, 468000, 469000, 470000, 471000, 472000, 473000, 474000, 475000, 476000, 477000, 478000, 479000, 480000, 481000, 482000, 483000, 484000, 485000, 486000, 487000, 488000, 489000, 490000, 491000, 492000, 493000, 494000, 495000, 496000, 497000, 498000, 499000, 500000, 501000, 502000, 503000, 504000, 505000, 506000, 507000, 508000, 509000, 510000, 511000, 512000, 513000, 514000, 515000, 516000, 517000, 518000, 519000, 520000, 521000, 522000, 523000, 524000, 525000, 526000, 527000, 528000, 529000, 530000, 531000, 532000, 533000, 534000, 535000, 536000, 537000, 538000, 539000, 540000, 541000, 542000, 543000, 544000, 545000, 546000, 547000, 548000, 549000, 550000, 551000, 552000, 553000, 554000, 555000, 556000, 557000, 558000, 559000, 560000, 561000, 562000, 563000, 564000, 565000, 566000, 567000, 568000, 569000, 570000, 571000, 572000, 573000, 574000, 575000, 576000, 577000, 578000, 579000, 580000, 581000, 582000, 583000, 584000, 585000, 586000, 587000, 588000, 589000, 590000, 591000, 592000, 593000, 594000, 595000, 596000, 597000, 598000, 599000, 600000, 601000, 602000, 603000, 604000, 605000, 606000, 607000, 608000, 609000, 610000, 611000, 612000, 613000, 614000, 615000, 616000, 617000, 618000, 619000, 620000, 621000, 622000, 623000, 624000, 625000, 626000, 627000, 628000, 629000, 630000, 631000, 632000, 633000, 634000, 635000, 636000, 637000, 638000, 639000, 640000, 641000, 642000, 643000, 644000, 645000, 646000, 647000, 648000, 649000, 650000, 651000, 652000, 653000, 654000, 655000, 656000, 657000, 658000, 659000, 660000, 661000, 662000, 663000, 664000, 665000, 666000, 667000, 668000, 669000, 670000, 671000, 672000, 673000, 674000, 675000, 676000, 677000, 678000, 679000, 680000, 681000, 682000, 683000, 684000, 685000, 686000, 687000, 688000, 689000, 690000, 691000, 692000, 693000, 694000, 695000, 696000, 697000, 698000, 699000, 700000, 701000, 702000, 703000, 704000, 705000, 706000, 707000, 708000, 709000, 710000, 711000, 712000, 713000, 714000, 715000, 716000, 717000, 718000, 719000, 720000, 721000, 722000, 723000, 724000, 725000, 726000, 727000, 728000, 729000, 730000, 731000, 732000, 733000, 734000, 735000, 736000, 737000, 738000, 739000, 740000, 741000, 742000, 743000, 744000, 745000, 746000, 747000, 748000, 749000, 750000, 751000, 752000, 753000, 754000, 755000, 756000, 757000, 758000, 759000, 760000, 761000, 762000, 763000, 764000, 765000, 766000, 767000, 768000, 769000, 770000, 771000, 772000, 773000, 774000, 775000, 776000, 777000, 778000, 779000, 780000, 781000, 782000, 783000, 784000, 785000, 786000, 787000, 788000, 789000, 790000, 791000, 792000, 793000, 794000, 795000, 796000, 797000, 798000, 799000, 800000, 801000, 802000, 803000, 804000, 805000, 806000, 807000, 808000, 809000, 810000, 811000, 812000, 813000, 814000, 815000, 816000, 817000, 818000, 819000, 820000, 821000, 822000, 823000, 824000, 825000, 826000, 827000, 828000, 829000, 830000, 831000, 832000, 833000, 834000, 835000, 836000, 837000, 838000, 839000, 840000, 841000, 842000, 843000, 844000, 845000, 846000, 847000, 848000, 849000, 850000, 851000, 852000, 853000, 854000, 855000, 856000, 857000, 858000, 859000, 860000, 861000, 862000, 863000, 864000, 865000, 866000, 867000, 868000, 869000, 870000, 871000, 872000, 873000, 874000, 875000, 876000, 877000, 878000, 879000, 880000, 881000, 882000, 883000, 884000, 885000, 886000, 887000, 888000, 889000, 890000, 891000, 892000, 893000, 894000, 895000, 896000, 897000, 898000, 899000, 900000, 901000, 902000, 903000, 904000, 905000, 906000, 907000, 908000, 909000, 910000, 911000, 912000, 913000, 914000, 915000, 916000, 917000, 918000, 919000, 920000, 921000, 922000, 923000, 924000, 925000, 926000, 927000, 928000, 929000, 930000, 931000, 932000, 933000, 934000, 935000, 936000, 937000, 938000, 939000, 940000, 941000, 942000, 943000, 944000, 945000, 946000, 947000, 948000, 949000, 950000, 951000, 952000, 953000, 954000, 955000, 956000, 957000, 958000, 959000, 960000, 961000, 962000, 963000, 964000, 965000, 966000, 967000, 968000, 969000, 970000, 971000, 972000, 973000, 974000, 975000, 976000, 977000, 978000, 979000, 980000, 981000, 982000, 983000, 984000, 985000, 986000, 987000, 988000, 989000, 990000, 991000, 992000, 993000, 994000, 995000, 996000, 997000, 998000, 999000, 1000000, or more viral particles.

[0514] Additionally described herein are viral particles that contain the optically active reporter construct. Described in certain example embodiments herein are engineered viral particles each comprising a cargo comprising an optically active reporter construct, wherein the optically active reporter construct cargo comprises a test polynucleotide; a first optically active protein encoding polynucleotide, wherein the first optically active protein encoding polynucleotide is operatively coupled in-frame with the test polynucleotide; a second optically active protein encoding polynucleotide, wherein the second optically active protein is a different optically active protein that the first optically active protein; a promoter, wherein the test polynucleotide, the first optically active protein encoding polynucleotide, and the second optically active protein encoding polynucleotide are operatively coupled to the promoter; and an internal ribosomal entry site (IRES), wherein the IRES is between the first optically active protein encoding polynucleotide and the second optically active protein encoding polynucleotide. In certain example embodiments, the promoter is a constitutive promoter or an inducible promoter. In certain example embodiments, the optically active reporter construct further comprises one or more untranslated regions (UTRs), wherein the one or more untranslated regions are operatively coupled at the 5′ and/or 3′ end of the test polynucleotide and/or the first optically active protein encoding polynucleotide. In certain example embodiments, the one or more untranslated regions comprise or consist of 5′ UTRs, 3′ UTRs, or both. In certain example embodiments, the test polynucleotide comprises or consists of a short synthetic polynucleotide. In certain example embodiments, the short synthetic polynucleotide is about 200 nucleotides. In certain example embodiments, the short synthetic polynucleotide has a sequence corresponding to a region of a genome. In certain example embodiments, the short synthetic polynucleotide has a sequence corresponding to a region of a human genome, a non-human animal genome, a plant genome, a microbial genome, or a viral genome. In certain example embodiments, the short synthetic polynucleotide has a sequence corresponding to a) an annotated region of a genome; (b) an unannotated region of a genome; (c) a mutation; (d) a 5′UTR; (e) a 3′UTR; (f) an open reading frame; or (g) any combination thereof.

[0515] In some embodiments, the short synthetic polynucleotide has a sequence corresponding to (a) an annotated region of a genome; (b) an unannotated region of a genome; (c) a mutation; (d) a 5′UTR; (e) a 3′UTR; (f) an open reading frame; or (g) any combination thereof. In certain example embodiments, the short synthetic polynucleotide (a) is a sequence according to a sequence in SEQ ID NOS: 1-9890 or SEQ ID NOS: 9891-16277; (b) is a synthetic in silico designed sequence; (d) does not have 100 percent identity to a genome sequence, optionally a human genome, a non-human animal genome, a plant genome, a microbial genome, or a viral genome; (e) is not native to a genome, optionally a human genome, a non-human animal genome, a plant genome, a microbial genome, or a viral genome; or (f) any combination thereof. In certain example embodiments, the engineered viral particle is a viral particle, optionally a retroviral viral particle, lentiviral viral particle, adenoviral viral particle, or adeno-associated viral particle.

[0516] Additional vectors and vector elements are described in greater detail elsewhere herein. Methods of producing viral particles are generally known in the art and described in greater detail elsewhere herein.

[0517] Further embodiments are illustrated in the following Examples, which are given for illustrative purposes only and are not intended to limit the scope of the invention.

### EXAMPLES

[0518] Now having described the embodiments of the present disclosure, in general, the following Examples describe some additional embodiments of the present disclosure. While embodiments of the present disclosure are described in connection with the following examples and the corresponding text and figures, there is no intent to limit embodiments of the present disclosure to this description. On the contrary, the intent is to cover all alternatives, modifications, and equivalents included within the spirit and scope of embodiments of the present disclosure. The following examples are put forth so as to provide those of ordinary skill in the art with a complete disclosure and description of how to perform the methods and use the probes disclosed and claimed herein. Efforts have been made to ensure accuracy with respect to numbers (e.g., amounts, temperature, etc.), but some errors and deviations should be accounted for. Unless indicated otherwise, parts are parts by weight, temperature is in ° C., and pressure is at or near atmospheric. Standard temperature and pressure are defined as 20° C. and 1 atmosphere.

### Example 1—Massively Parallel Ribosome Profiling

[0519] Viruses contained condensed genomes that has evolved to encode multiple functions that allow the virus to e.g., replicate in a host by producing infectious virions in a host and/or vector and/or evading the host immune response. The landscape of translated regions is unknown for most viruses. Even less characterized and understood is what, if any, additional functions these translated regions have, particularly non-canonical translated regions (e.g., non-canonical ORFs). Among these are alternative reading frames (ARFs), upstream open reading frames (uORFs), short open reading frames (sORFs) and defective ribosomal products (DRiPs). Decoding the complete set of viral proteins, including non-canonical ORFs, is essential to understand the biology of viruses. These sources vastly increase the availability of viral peptides for presentation and immune evasion and imply an important role for translational regulation in this process. Applicant and others have shown that viral non-canonical ORFs play a critical role in antigen presentation to cytotoxic T cells, modulating virus infection, and regulating virions production. However, the landscape of translated regions remains largely unknown for many viruses (see e.g., FIG. 46), as traditional studies investigate only a few peptides at a time, we have not achieved a comprehensive view of the collection of immunogenic peptides in each virus and, in turn, the causal effect of viral mutations on immunogenicity.

[0520] Mapping the translatome can expand the understanding of the viral life cycle and immune response, which can lead to improved strategies to prevent and treat viral infection as well as better engineer viruses for various commercial and clinical applications. Mapping can uncover new viral proteins, such as those translated from non-canonical ORFS, uncovering alternative gene expression regulation mechanisms, and new epitopes that are involved in T-cell and/or B-cell responses. This can in turn lead to improved understanding of T-cell and B-cell targets, which can be translated into new compositions, such as vaccines, for prevention and treatment of infection and disease. Indeed, such translated regions may be sources for MHC-I antigen presentation (see e.g., FIG. 1 and Fetten et al., J Immunol 1991; Yang et al., J Immunol 2016; Mayrand et al., J Immunol 1998; Cardinaud et al., J Exp Med (2004) 199 (8): 1053-1063; Ho et al., J Immunol 2006; Maness et al., J Exp Med. 2007; Bansal et al., J Exp Med. 2010; Neefjes et al., Nature Reviews Immunology volume 11, pages 823-836 (2011); Ingolia et al., Cell Reports 2014; Anton and Yewdell. J Leukoc Biol 2014 April; 95(4):551-62; Starck et al., Science. 2016 Jan. 29; 351(6272):aad3867. doi: 10.1126/science.aad3867; and Starck and Shastri. Immunol Rev. 2016 July; 272(1):8-16. doi: 10.1111/imr.12434). Other approaches to understanding non-canonical viral ORFs have already demonstrated the value in mapping non-canonical viral ORFs. For example, Weingarten-Gabbay et al., (Cell. 2021 Jul. 22; 184(15): 3962-3980.e17) used mass spectrometry (MS)-based HLA-I immunopeptidomics to map HLA-I immunopeptidome of SARS-CoV-2 and uncovered non-canonical ORFs that produced previously uncharacterized SARS-CoV-2 peptides involved in mediating the T-cell response during infection.

[0521] Ribosome profiling is a method of taking genome-wide measurements of translated regions of the genome. See e.g., Ingolia et al., Science. 2009 Apr. 10; 324(5924):218-23. doi: 10.1126/science.1168978 and Brar and Weissman. Nat Rev Mol Cell Biol. 2015 November; 16(11):651-64.doi: 10.1038/nrm4069. Traditional ribosome profiling has limitations. For example, only one virus can be profiled in a single experiment, some viruses cannot be cultured in a lab and some require stringent safety precautions (e.g., require BSL 3 or 4), and provide a limited capacity to infer causal effect of emerging mutations. Many other high-throughput methods for systematic evaluation of gene expression regulation have been generated, such as for discovering internal ribosome entry sites (see e.g., Weingarten-Gabbay et al., Science. 2016 Jan. 15; 351(6270):aad4939; Weingarten-Gabbay and Segal. RNA Biol. 2016 Oct. 2; 13(10):927-933. doi: 10.1080/15476286.2016.1212802; Gritsenko A A, Weingarten-Gabbay S, Elias-Kirma S, Nir R, de Ridder D, Segal E (2017) Sequence features of viral and human Internal Ribosome Entry Sites predictive of their activity. PLoS Comput Biol 13(9): e1005734. https://doi.org/10.1371/journal.pcbi.1005734; Weingarten-Gabbay et al., Oncogene. 2014 Jan. 30; 33(5):611-8. doi: 10.1038/onc.2012.626) and for systemic interrogation of human core promoters (see e.g., Weingarten-Gabbay et al., Genome Res. 2019 February; 29(2):171-183; Weingarten-Gabbay and Segal. Hum Genet. 2014 June; 133(6):701-11. doi: 10.1007/s00439-013-1413-1; and Slutskin et al., Nat Commun. 2018 Feb. 6; 9(1):529. doi: 10.1038/s41467-018-02980-z).

[0522] This Example describes and demonstrates massively parallel ribosome profiling (MPRP) for detecting and mapping translated regions of genomes, including, but not limited to, non-canonical ORFs, from e.g., viruses. See e.g., FIG. 4A-4D, which shows a general schematic for high-throughput methods of measuring antigen translation and presentation using a designed synthetic oligo library. Here, Applicant developed Massively Parallel Ribosome Profiling (MPRP) to quantitatively measure the translation of tens of thousands of viral sequences in one experiment. Using this method, Applicant exposed 7,387 ORFs in 679 viruses pathogenic to humans. Applicant uncovered 328 of upstream ORFs (uORFs) in the 5′UTR of viral genes that negatively regulate the translation of the main coding sequence (CDS) on the same transcript. This approach employs a synthetic designed oligo library, which includes oligonucleotides (“oligos”) that represent native genomes of hundreds of different viruses. See e.g., FIGS. 3 and 31. This can provide an unbiased screen of fragments from different regions of the viral genome. This can allow for functional assays of viruses that would normally require stringent safety protocols. Further this can allow for causal testing of effects of the translated regions and mutations thereof (such as CTL-escape mutations) and an understanding of viral heterogenicity by e.g., allowing for comparison of viral quasispecies. FIGS. 5, 32, 40, 43-44 shows a more detailed schematic for massively parallel ribosome profiling. A synthetic designed oligo construct is used to synthesize a synthetic designed oligo library. The library is expressed in cells. Ribosome protected fragments are sequenced and sequencing reads are mapped to identify open reading frames (ORFs) present in the expressed synthetic oligo library. As summarized in FIG. 41, this MPRP assay can be coupled with additional techniques to further evaluate functionality of the uncovered translated regions, such as in antigen presentation or gene expression regulation.

[0523] Other approaches that rely on tailing whole transcripts with 200 nt oligos can result in false positive discovery of internal ORFs (FIG. 42). In contrast, the constructs for generating the synthetic oligo library for the MPRP assay includes two constant primers flanking a variable region that is the synthetic oligonucleotide that corresponds to a region of a viral genome. This was followed by multiple shifted stop codons. For this Example, the following 3 stop codons were included: #1 TAG; #2 TGA; #3 TAA. The construct is driven by a promoter. See e.g., FIG. 6. The construct can also include other elements such as WPRE and poly A signal.

[0524] FIG. 7A-7B shows design and measurement of a ~5,000 oligo library towards previously reported viral ORFs to demonstrate accuracy of detection of ORFS using the massively parallel ribosome profiling approach of FIG. 5. Reported ORFs were used to validate the MPRP assay. To further validate the assay and to demonstrate its use for evaluating the effect of mutations, the reported start codon for the reported ORFs evaluated were mutated in the synthetic oligonucleotide and the MPRP assay was performed. As shown in FIG. 8, a reduction in ribosome occupancy is obtained when the reported start codon is mutated in the synthetic oligo. Periodicity in ORFs encoded from synthetic oligos was also determined (FIG. 9A-9B).

[0525] A pan viral library of 15,000 oligos for the discovery of upstream ORFs (uORFs) and short ORFs was designed. See e.g., FIG. 10. The MPRP assay allowed for reproducible and specific measurements of ribosome footprints (FIG. 11).

[0526] After generating the ribosome footprints, the MPRP assay utilizes a computational pipeline to infer ORFs from the ribosome footprints. See e.g., FIG. 12. This Example utilized the PRICE algorithm (Erhard et al., Nat Methods. 2018 May; 15(5):363-366. doi: 10.1038/nmeth.4631).

[0527] The performance of the synthetic library was evaluated using a predefined set of viral ORFs from ribosome profiling experiments (FIGS. 33-35). As a proof of concept, the MPRP assay accurately detected annotated coding sequences (FIGS. 13, 14, and 15A-15B). Measurements from a pan-viral library composed of 4,274 genes from 679 human viruses were used to uncover ~7,387 viral ORFs (FIGS. 16, 36). Ribosome density measurements were obtained across thousands of annotated viral coding sequences and their 5′ untranslated region (UTR) (FIG. 17). Researching HLA-I peptidome of HCMV uncovers peptides from non-canonical ORFs detected by the pan-viral library (FIG. 47).

[0528] MPRP of the pan-viral library successfully detected annotated ORFs of human Coronaviruses (FIG. 37). MPRP on the pan-viral library detects internal out-of-frame ORFs in the nucleocapsid region of SARS-CoV-1 and HCoV-HKU1 (FIG. 39). MPRP detected the translation of ORF9b in the SARFS-Cov-1 genome (FIG. 38). Although ORF9b is conserved in SARS-CoV-1 it is missing from SARS-CoV2 genomic annotations (FIG. 45).

### Example 2—Gene Expression Regulation by Non-Canonical ORFs

[0529] The MPRP assay can be coupled with one or more other techniques to provide further insight into the function of translated regions of viral genomes at scale. Applicants coupled the MPRP assay with inducement of a stress (e.g., via eIF2alpha phosphorylation) to evaluate the uncovered ORFs, such as upstream ORFs and small/short ORFs, on gene expression regulation (see e.g., Khitun et al. Mol. Omics 2019, 15, 108). Upon eIF2alpha phosphorylation induced by arsenite treatment, a sensor of viral infection that attenuates cellular translation, Applicant observed a shift in ribosome occupancy toward the main CDS suggesting that these uORFs facilitate dynamic regulation of viral gene expression in response to environmental changes.

[0530] Upstream open reading frames (uORFs) are major gene expression regulatory elements in eukaryotes (see e.g., Barbosa et al., PLoS Genet. 2013 August; 9(8): e1003529) and have also been documented in viruses (see e.g., Shabman et al., PLoS Pathog. 2013 January; 9(1): e1003147). Small open reading frames encode small polypeptides (e.g., 100 amino acids or fewer) and mediate various physiological functions in humans and animals (see e.g., Couso and Patraquim. Nature Reviews Molecular Cell Biology volume 18, pages 575-589 (2017)). Similarly, viral short ORFs have been characterized. See e.g., Finkel et al., Proteomics. 2018 May; 18(10): 1700255). Ribosome footprints from the MPRP assay were compared with and without the stress to determine effect on gene regulation. FIG. 18A-18C shows discovery of hundreds of viral uORFs that negatively regulated the translation of the main coding sequence. FIGS. 19-20 shows that ribosomes are transitioned from the detected uORFs to the main coding sequences in response to eIF2alpha phosphorylation.

### Example 3—Massively Parallel Reporter Assay

[0531] An optically active massively parallel reporter assay was developed for quantitative measurement of translation of ORFs. FIG. 21 shows exemplary optically active constructs for quantitative measurement of translation of viral ORFs. A an ORF, e.g., a viral ORF (CDS) was fused to a first optically active protein (e.g., a first fluorescent protein). This was followed by an IRES and subsequently a second optically active protein (e.g., a second fluorescent protein that fluoresces at a different wavelength than the first optically active protein). The second optically active protein serves as a control. FIG. 22 shows quantitative measurement of viral ORFs translation using an optically active reporter constructs. The reporter construct can have at least two different optically active polypeptides. FIG. 23A-23B demonstrate computationally inferring RFP (e.g., first optically active protein) expression of individual oligos from their representation in sorted expression bins. FIG. 24 shows development of a Massively Parallel Reporter Assay for quantitative translation measurements of 15,000 viral sequences. FIG. 25 demonstrates the use of constant expression of one of the at least two different optically active proteins of the construct of FIG. 22 to control for multiplicity of infection (MOI). FIG. 26 shows that uniform coverage of sequencing reads across library oligos was achieved. A weighted average for each oligo was computed from reads distribution across expression bins (FIG. 27). Applicant assessed the accuracy of the pooled expression measurements (FIG. 28). Applicant further demonstrated operation of the MPRA by using it to detect annotated viral ORFs (FIG. 29). This revealed that translation of viral ORFs is lower in genes with upstream ORFs in their 5′ UTRs (FIG. 30).

### Example 4—Pan-Viral ORFs Discovery Using Massively Parallel Ribosome Profiling

### Introduction

[0532] Despite remarkable advances in sequencing viral genomes, functional annotations of these genomes have lagged behind, hindering our understanding of the mechanisms by which viruses propagate and interact with the immune system. One important area of exploration is the translatome—the entire collection of viral mRNA sequences being translated into proteins. Beyond the annotated canonical ORFs, viral genomes encode non-canonical ORFs that do not fulfill the classical definition of ORFs, i.e. do not start with an ATG codon and/or are shorter than 100 amino acids (aa). These non-canonical ORFs and the resulting microproteins have been shown to play a critical role in modulating viral infection (Lulla et al. 2019; Ogden et al. 2019; Lulla and Firth 2020), regulating the expression of canonical viral proteins (A. Chen, Kao, and Brown 2005; Gould and Easton 2005; Shabman et al. 2013), and contributing to the immune response to viruses (Bansal et al. 2010; Ingolia et al. 2014; Yang et al. 2016; Weingarten-Gabbay et al. 2021). However, the deviation from classical ORF features challenges their detection computationally and relies mostly on experimental measurements. Thus, for decades of research this “hidden” source of proteins has remained mostly unknown.

[0533] The development of ribosome profiling over the past decade has transformed our ability to detect translated regions across genomes (Ingolia et al. 2009). Ribosome profiling (Ribo-seq) utilizes deep sequencing of ribosome-bound mRNA fragments to determine ribosome occupancy, indicating translated regions at single nucleotide resolution. Quickly adapted to different organisms, ribosome profiling uncovered a striking number of non-canonical ORFs in mammalian cells, yeast, bacteria and viruses including upstream ORFs (uORFs) in 5′UTRs, short ORFs in non-coding RNAs and overlapping internal ORFs in annotated coding sequence (iORFs) (Ingolia, Lareau, and Weissman 2011; Ingolia, Hussmann, and Weissman 2019).

[0534] Although the function of most of the non-canonical ORFs remain unknown, the translated polypeptides contribute to the collection of viral antigens that are presented on the surface of infected cells. When viruses infect cells, their proteins are processed and displayed on the cell surface by the class I human leukocyte antigen complex (HLA-I). These peptides in turn activate cytotoxic CD8+ T cells that eliminate the infected cell. While the majority of T cell studies focus on canonical proteins, there is growing appreciation of the contribution of non-canonical ORFs to HLA-I presentation (Starck and Shastri 2016; Holly and Yewdell 2023). Applicant recently showed that peptides derived from non-canonical ORFs in the SARS-CoV-2 genome are enriched on the HLA-I complex in infected cells (Weingarten-Gabbay et al. 2021) and contribute to HLA-II presentation (Weingarten-Gabbay et al. 2023). Notably, some of the non-canonical peptides elicited stronger CD8+ T cell responses in a humanized mouse model and COVID-19 patients than canonical peptides, including a few of the most immunodominant T cell epitopes reported to date. Our findings join others in the field, portraying non-canonical ORFs as an important source for antigen presentation in viral infection, uninfected cells, and cancer (J. Chen et al. 2020; Hickman et al. 2018; Ingolia et al. 2014; Maness et al. 2010; Ouspenskaia et al. 2022; Ruiz Cuevas et al. 2021; Yang et al. 2016). Thus, exposing non-canonical ORFs is poised to provide new targets for vaccine design and deepen our understanding of the interaction between viruses and the immune system.

[0535] In addition to being a rich source of microproteins, non-canonical ORFs also act as cis-regulatory sequences that determine the expression levels of canonical viral proteins. The translation of uORFs from a start codon in the 5′UTR attenuates the translation of the main ORF because reinitiation after stop codon is generally inefficient (Hinnebusch, Ivanov, and Sonenberg 2016). In addition, the presence of ribosomes on the uORF can create a “roadblock”, precluding scanning pre-initiation complexes (PICs) from initiating at the main ORF. The translation of uORFs is a dynamic process that changes in response to cellular stress, including viral infection, through the phosphorylation of eIF2alpha, a key translation initiation factor. Upon eIF2alpha phosphorylation, scanning PICs are more likely to “miss” the start codon of uORFs through leaky scanning and initiate translation at the main ORFs. uORFs were shown to regulate the expression of canonical viral proteins in Ebola virus, Hepatitis B virus (HBV), and Respiratory Syncytial Virus (RSV)(A. Chen, Kao, and Brown 2005; Gould and Easton 2005; Shabman et al. 2013). Exposing uORFs in viruses can enhance our understanding of the mechanisms by which viruses determine the expression of proteins in infected cells and along the viral life cycle.

[0536] Although undoubtedly important, the landscape of translated regions is still unknown for the majority of viruses. Ribosome profiling has been successfully employed to profile a handful of viruses; however, it is still limited in throughput with respect to the number of viruses that can be tested. Each virus requires a unique culturing system, exhibiting selective tropism to cells and growing conditions. Thus, each virus should be profiled in isolation, limiting the number of viruses that can be assayed in each experiment. In addition, researching highly pathogenic viruses necessitates high-containment facilities and strict safety protocols that challenge the execution of ribosome profiling within biosafety level 3 or 4 (BSL3/4) laboratories. Moreover, some viruses cannot be cultured in the laboratory, making it impossible to profile their translation in-vitro. Finally, since viruses are a moving target, their genome changes constantly, a method that will evaluate many variants in parallel can be beneficial.

[0537] Creating a platform for the discovery of ORFs across many viral genomes, independent of their culturing conditions and biosafety level, would transform our knowledge of viruses' translatomes and is poised to expose new biology. In this study, Applicant leveraged the power of a fully designed oligo synthesis library(Weingarten-Gabbay et al. 2016, 2019; Seo et al. 2023) and combined it with ribosome profiling to perform pan-viral ORF discovery. Applicant measured the translation of 20,170 synthetic sequences from 679 viral genomes in two human cell lines, resulting in the identification of thousands of new ORFs. Applicant estimated ORF discovery using the annotated CDSs in these genomes and non-canonical ORFs that were identified in traditional ribosome profiling of infected cells. Applicant then examined the function of the new ORFs that Applicant detected in two processes: HLA-I antigen presentation and uORF-mediated translation regulation of canonical viral proteins.

### Results

### Developing Massively Parallel Ribosome Profiling to Identity ORFs in 679 Viral Genomes

[0538] To measure ribosome occupancy and infer translated regions across hundreds of human viruses, Applicant developed Massively Parallel Ribosome Profiling (MPRP) (FIG. 48A). Instead of infecting cells with individual viruses, Applicant used oligonucleotides library synthesis technology to encapsulate thousands of viral sequences in a single pooled experiment. Each oligo contained 200 nt of viral sequence, flanked by constant primers. Applicant amplified the library using the constant primers and cloned it into an overexpression plasmid downstream of a CMV promoter and upstream of a Woodchuck Hepatitis Virus (WHV) Posttranscriptional Regulatory Element (WPRE) used to further enhance expression. To monitor the translation of ORFs in the designed oligos, Applicant excluded ATG start codons on the plasmid and the constant primer sequence upstream to the cloned oligo. Since the designed sequence is limited to 200 nt, some oligos contain the beginning of a viral ORF but not the end. Applicant ensured translation termination in the absence of the endogenous stop codon by inserting stop codons in all three potential reading frames on the plasmid, downstream of the cloned oligo. Applicant transfected the pooled library plasmid into HEK293T human embryonic kidney cells or A549 human lung cells. Applicant then performed a modified protocol of ribosome profiling on library-transfected cells (McGlincy and Ingolia 2017) (see methods) after treating cells with either cycloheximide (CHX) to inhibit elongating ribosomes across the entire ORF, or lactimidomycin (LTM) to specifically inhibit initiating ribosomes at the start codon. Applicant then mapped deep sequencing reads representing ribosome footprints to the synthetic library and identified ORFs using PRICE, a computational method for the detection of canonical and non-canonical ORFs in ribosome profiling experiments (Erhard et al. 2018) (see methods).

[0539] Applicant initially verified that our experimental system captures the translation of an ORF embedded within a synthetic oligo. Applicant performed ribosome profiling on cells that were transiently transfected with a full-length Green Fluorescent Protein (GFP) (FIG. 48A) and observed the expected ribosome footprints on the GFP CDS (FIG. 48B). Applicant then swapped the full-length GFP with the first 170 nt of the reporter that resembled the length of a synthetic oligo in the library. Although the cloned sequence contained only part of the original ORF and did not harbor the GFP stop codon, Applicant detected ribosome footprints on the truncated GFP regions, with successful termination in one of the three stop codons that Applicant added to the plasmid (FIG. 48C). Interestingly, Applicant observed unexpected ribosome footprints on the WPRE region. These footprints accounted for a large fraction of the sequencing reads in the MPRP experiment because they originated from a constant region of the overexpressed plasmid and. To remove WPRE-derived footprints prior to sample sequencing, Applicant implemented a home-made ribosomal RNA (rRNA) depletion step and appended WPRE-targeting probes in addition to the rRNAs probes (see methods).

[0540] Applicant designed a pilot library of 5,170 oligos to estimate viral ORF discovery using MPRP. This library contained 716 ORFs that were identified in HCMV-infected cells by traditional ribosome profiling (Stern-Ginossar et al. 2012) (FIG. 48B). Each oligo was composed of 60 nt upstream of the start codon and 140 nt downstream of the start codon. In addition, for each ORF, Applicant also designed a mutated oligo in which Applicant replaced the reported start codon with GCC. To evaluate de novo discovery of ORFs, Applicant tiled the entire genome of 16 viruses, and 30 mRNAs annotated in the genomic datasets of HCMV and HSV-1 (NC_006273.2 and JN555585.1, respectively) (FIG. 49A). When examining the number of ribosome footprints across oligos from different regions of the mRNA transcripts, Applicant observed the expected low occupancy in the 5′UTR and enrichment of ribosomes at the start codon (FIG. 49B). However, Applicant also observed high occupancy along the CDS. Since 200 nt-long oligos in the CDS region do not contain the original mRNA start codon, ribosomes in these oligos represent independent translation initiation from an alternative start codon. However, in the context of the full transcript, these start codons are preceded by multiple start codons, making it unlikely that the ribosome will initiate at this position. Applicant reasoned that MPRP has higher accuracy at the beginning of annotated CDSs and 5′UTRs, which better mimic the native genomic context. Thus, Applicant decided to focus on these regions for the design of the pan-viral library.

[0541] Applicant designed a pan-viral library of 15,000 oligos to screen for novel ORFs in the 5′UTRs and the beginning of the CDS of 3,976 genes in 679 viral genomes. For each gene Applicant designs three oligos: a wild type oligo containing 60 nt of the 5′UTR and 140 nt of the CDS, a mutated oligo in which the annotated start codon was mutated to GCC, and a farther upstream oligo in the 5′UTR region, starting −260 nt relative to the CDS start codon (FIG. 48B). Applicant performed MPRP measurements on the pan-viral library and uncovered 5,381 viral ORFs including 4,208 non-canonical ORFs (uORFs, iORFs, N-extended isoforms, and N-truncated isoforms) (SEQ ID NO: 9891-16277). See also e.g., Weingarten-Gabbay et al., 2023. bioRxiv https://doi.org/10.1101/2023.09.26.55964, which is incorporated by reference herein, particularly at Table S1.

[0542] To gauge the reproducibility of the MPRP measurements, Applicant compared ribosomes occupancy on the synthetic oligos in different experiments. Measurements of the pilot and the pan-viral libraries were consistent between biological replicates in HEK293T cells (R=0.81 and R=0.92, respectively, FIG. 55 and FIG. 48C). Applicant also found high agreement between ribosome occupancies on the pan-viral library in HEK293T and A549 cells (R=0.89, FIG. 48D). A small number of oligos had higher occupancy in HEK293T than A549 cells; closer examination of these outliers reveal shared sequences with the adenoviral E1A/B genes and the SV40 large T-antigen that are endogenously expressed by HEK293T cells (Tan et al. 2021). Thus, the elevated occupancies likely stem from cross-mapping of endogenous ribosome footprints to the synthetic library. Finally, Applicant designed a set of 1,033 oligos with identical sequences in the two libraries and found good agreement between oligos that were independently synthesized, cloned and measured using MPRP (R=0.79, FIG. 48E). Altogether, these data indicate that MPRP produces reproducible ribosome occupancy measurements on thousands of viral sequences.

### Estimating ORF Discovery Using Annotated Viral Coding Sequences

[0543] To estimate the detection of viral ORFs when expressed from a synthetic library, Applicant examined the distribution of ribosome footprints across oligos representing the annotated CDSs (FIG. 48B). Applicant performed metagene analysis for all the CDSs from each family by computing the average ribosome footprints in each position relative to the annotated start codon (FIG. 49A). As expected, Applicant found enrichment of ribosome footprints in the CDS region with higher density at the beginning of the sequence that is often observed in ribosome profiling measurements (FIG. 49A-49B). Since ribosome profiling provides single nucleotide resolution of ribosome footprints, it can be used to infer the reading frame in which the ribosome is translating an mRNA sequence. Applicant found the expected tri-nucleotides periodicity, indicating translation in the correct reading frame of the annotated CDSs. These two features were observed in the majority of the 21 families, indicating a robust identification of annotated CDSs in MPRP across different viruses (FIG. 56).

[0544] Applicant next confirmed that the detected enrichment of ribosomes in the CDS region resulted from translation initiation at the annotated start codon. Applicant examined ribosome footprints in the presence of an LTM inhibitor, which specifically inhibits initiating 80S complexes with an empty E-site. Applicant found a clear enrichment in the annotated start codon for 19 of the 21 viral families tested (FIG. 57). Applicant also used reverse genetics to test the contribution of the annotated start codon sequence to CDS translation in the MPRP. Applicant designed oligos with identical sequence to 3,777 annotated CDSs in which Applicant mutated the three nucleotides of the start codon to GCC. When comparing ribosome footprints in the region flanking the annotated start codon, Applicant found a substantial reduction in the number of footprints in the mutated oligos (FIG. 49C). It should be noted that since the size of the ribosome footprint is ~29 nt, footprints that do not span the region of three mutated nucleotides are mapped to both the mutated and wt oligo, resulting in similar ribosome occupancy profile downstream of the first few codons (outside the highlighted region in FIG. 49C). Applicant then performed pairwise comparison of the number of ribosome footprints for each viral CDS in the wt and mutated oligo. Here too, Applicant found significant reduction in the number of ribosome footprints on the mutated oligos (p<10⁻²⁸⁸, FIG. 49D).

[0545] Applicant used the annotated CDSs to evaluate the performances of the computational pipeline that Applicant used to infer ORFs in the MPRP experiment. When running PRICE, Applicant did not indicate which viral oligos contain annotated CDSs in order to evaluate their discovery in an unbiased fashion. Rather, Applicant used endogenous ribosome footprints from annotated human CDSs to train PRICE and learn essential parameters of the ribosome footprints in the experiment (see methods). PRICE has successfully captured 1,136 of 3,976 viral CDSs (28%) initiating at the annotated start codon (false discovery rate 0.05, FIG. 49E). Applicant also found high agreement between ribosome occupancy on PRICE-detected CDSs in the two biological replicates (R=0.93, FIG. 49F). Together, Applicant shows that MPRP successfully identifies translation initiation and elongation of ribosomes on annotated CDSs across multiple viral families.

### Comparing ORF Detection in MPRP and Ribosome Profiling of HCMV-Infected Cells

[0546] In addition to annotated CDSs, Applicant also estimated the discovery of ORFs by comparing MPRP to traditional ribosome profiling done in the context of native viral infection. As part of the design of the pilot library, Applicant included oligos representing the sequence of 716 ORFs that were identified in HCMV-infected cells by ribosome profiling (Stern-Ginossar et al. 2012), termed here “Ribo-seq ORF” (FIG. 48B).

[0547] Similar to the annotated viral CDS, Applicant found clear enrichment of ribosome footprints along the reported Ribo-seq ORFs with tri-nucleotide periodicity indicating translation in the correct reading frame. Importantly, MPRP detected ribosome footprints on both canonical and non-canonical Ribo-seq ORFs, including ORFs with a non-AUG start codon (CUG, ACG, GUG, AUU, UUG, AUC, AUA, AGG, AAG) (FIG. 50A-50B). Moreover, MPRP successfully detected translating ribosomes on short ORFs, in the length of 20 aa or less (FIG. 50C).

[0548] Ribo-seq ORFs translation in the MPRP assay was dependent on the presence of the reported start codon. Mutating the start codon to GCC of 284 Ribo-seq ORFs (in the length of 7-45 aa) resulted in substantial reduction of ribosome footprints compared to wt oligos (FIG. 50D). Unlike annotated CDS that mostly initiate with a AUG start codon, the non-canonical Ribo-seq ORFs often initiate from a non-AUG codon. Our findings confirm that the non-AUG codons reported by Stern-Ginossar et al. are essential for translation initiation of the Ribo-seq ORFs and demonstrate how MPRP can be used to functionally characterize the start codon of non-canonical ORFs.

[0549] Finally, Applicant ran PRICE to assess the overlap between ORFs that were detected in the original ribosome profiling study and the MPRP experiment. Similar to the annotated CDS, the observed peak of the PRICE-detected ORF start codon matched the location of the Ribo-seq ORFs in the designed oligo, with 152 of the 716 Ribo-seq ORFs detected (21%) (false discovery rate 0.05, FIG. 50E). Altogether, Applicant shows that MPRP can capture both canonical and non-canonical ORFs that were identified by traditional ribosome profiling.

Expanding the Repertoire of Viral Antigens that are Presented on the HLA-I Complex

[0550] Microproteins that are encoded by non-canonical ORFs can contribute to the pool of viral antigens that are presented on the HLA-I complex. Our assay resulted in the discovery of 4,208 non-canonical ORFs, 3,686 of which encode proteins in the length of 8 aa or longer, making them candidates for HLA-I binding.

[0551] To assess if these non-canonical ORFs participate in HLA-I presentation, Applicant re-analyzed two HLA-I immunopeptidome datasets from cells that were infected with either HCMV (Erhard et al. 2018) or Vaccinia virus (VACV) (Lorente et al. 2017). In the two studies, the HLA-I complex was immunoprecipitated from infected cells using HLA specific antibodies and bound peptides were identified using mass spectrometry (MS) (FIG. 51A). For the reanalysis, Applicant appended the non-canonical proteins that were detected in HCMV or VACV in the MPRP assay to the canonical human proteome database and used this combined database to research the raw mass spectrometry files (Erhard et al. 2018; Lorente et al. 2017). Applicant detected HLA-I peptides that originated from non-canonical ORFs in the HCMV and VACV genomes (Table 3). See also e.g., Weingarten-Gabbay et al., 2023. bioRxiv https://doi.org/10.1101/2023.09.26.55964, which is incorporated by reference herein, particularly at Table S2. Overall, Applicant found five potential HLA-I peptides from four non-canonical ORFs in HCMV: an uORF in the 5′UTR of UL4 (VLSAKKLS (SEQ ID NO: 16288) (A0301;MSi rank 4.9)), and (VLSAKKLSSL (SEQ ID NO: 16287) (C0102; MSi rank 0.04)), an uORF in the 5′UTR of UL148 (FAKSKTIGL (SEQ ID NO: 16292) (B0801; MSi rank 0.02)), an Upstream Overlapping ORF (uoORF) in the 5′UTR and coding region of UL135 (YPAPRPQAI (SEQ ID NO: 16295) (B0801,B5101; MSi rank 0.5)), and an N-terminal extended isoform of the UL36 protein (VMDDLRDTL (SEQ ID NO: 16297) (C0102; MSi rank 2.0)) (FIG. 51B). Applicant noted detection of LSAKKLSSL (SEQ ID NO: 16289) and SAKKLSSL (SEQ ID NO: 16290) that appear to be in-source fragments of VLSAKKLSSL (SEQ ID NO: 16287), and not HLA-I binding peptides, as they elute within 0.1 minutes of each other and do not have strong HLAthena binding predictions. In VACV-infected cells, Applicant found two HLA-I peptides from an uORR in the 5′UTR of7L (ILFFHVLLY (SEQ ID NO: 16299) (A0301;MSi rank 0.01)) and from internal ORF overlapping the coding region of LUL (HIRNKIINAEK (SEQ ID NO: 16316) (1B2705; MSi rank 0.6)) (FIG. 51C). These observations confirm that non-canonical ORFs identified by MPRP can be translated in the context of native viral infection and that the resulting proteins were presented on the HLA-I complex.

TABLE 3
HLA-I peptides originating from non-canonical ORFs in HCMV and VACV

| directory | | | | | | |
|---|---|---|---|---|---|---|
| | parent_ | numPSMs | numLCruns | | rank | deltaForward |
| | charge | Observed | Observed | score | 2Score | ReverseScore |
| HF997_ | 2 | 3 | 3 | 12.98 | 4.96 | 9.95 |
| HCMVtreated | | | | | | |
| HF997_ | 2 | 11 | 3 | 16.25 | 12.32 | 3.24 |
| HCMVtreated | | | | | | |
| HF997_ | 2 | 2 | 2 | 14.76 | 8.97 | 4.15 |
| HCMVtreated | | | | | | |
| HF997_ | 2 | 1 | 1 | 8.99 | 7.49 | 0.45 |
| HCMVtreated | | | | | | |
| HF997_ | 2 | 32 | 3 | 18.4 | 9.48 | 8.29 |
| HCMVtreated | | | | | | |
| HF997_ | 2 | 17 | 3 | 14.89 | 8.11 | 9.07 |
| HCMVtreated | | | | | | |
| HF997_ | 2 | 5 | 3 | 15.69 | 7.37 | 6.8 |
| HCMVtreated | | | | | | |
| HOM2_w632_ | 2 | 1 | 1 | 14.31 | 8.99 | 4.76 |
| A03_C01_ | | | | | | |
| VACV | | | | | | |
| HOM2_B27_ | 3 | 1 | 1 | 8.48 | 3.59 | 8.48 |
| VACV | | | | | | |
| | | percent_ | backbone_ | | | |
| | deltaRank1 | scored_peak_ | cleavage_ | total | previous_ | |
| | Rank2Score | intensity | score | Intensity | aa | sequence |
| HF997_ | 8.01 | 72 | 7 | 1.33E+07 | (S) | FAKSKTIGL |
| HCMVtreated | | | | | | (SEQ ID NO: |
| | | | | | | 16292) |
| HF997_ | 3.92 | 76.8 | 8 | 8.94E+07 | (V) | [symbol] |
| HCMVtreated | | | | | | (SEQ ID NO: |
| | | | | | | 16289) |
| HF997_ | 5.79 | 86.9 | 6 | 4.42E+07 | (L) | [symbol] |
| HCMVtreated | | | | | | (SEQ ID NO: |
| | | | | | | 16290) |
| HF997_ | 1.49 | 39.2 | 5 | 1.68E+07 | (L) | VLSAKKLS |
| HCMVtreated | | | | | | (SEQ ID NO: |
| | | | | | | 16288) |
| HF997_ | 8.91 | 92.5 | 9 | 3.05E+09 | (L) | VLSAKKLSSL |
| HCMVtreated | | | | | | (SEQ ID NO: |
| | | | | | | 16287) |
| HF997_ | 6.77 | 79 | 6 | 2.64E+08 | (I) | YPAPRPQAI |
| HCMVtreated | | | | | | (SEQ ID NO: |
| | | | | | | 16295) |
| HF997_ | 8.32 | 88.3 | 8 | 4.51E+07 | (S) | VMDDLRDTL |
| HCMVtreated | | | | | | (SEQ ID NO: |
| | | | | | | 16297) |
| HOM2_w632_ | 5.33 | 80.7 | 6 | 9.92E+07 | (E) | ILFFHVLLY |
| A03_C01_ | | | | | | (SEQ ID NO: |
| VACV | | | | | | 16299) |
| HOM2_B27_ | 4.89 | 43.2 | 6 | 4.79E+07 | (S) | HRNKIINAEK |
| VACV | | | | | | (SEQ ID NO: |
| | | | | | | 16316) |
| | | sequence | retention | sequence | best. | best.MSi_ |
| | next_aa | Length | TimeMin | Map | MSi | allele |
| HF997_ | (C) | 9 | 25.68 | F/A\|K/S\| | 0.016324 | B0801 |
| HCMVtreated | | | | K\T I\|G- | | |
| | | | | L | | |
| HF997_ | (L) | 9 | 31.75 | L/S\|A/K/ | 1.238008 | B0801 |
| HCMVtreated | | | | K\L\S\|S\ | | |
| | | | | L | | |
| HF997_ | (L) | 8 | 31.75 | S/A\|K/K | 2.013671 | C0102 |
| HCMVtreated | | | | L\S\|S\L | | |
| HF997_ | (S) | 8 | 15.7 | V/L\|S/A/ | 4.91671 | A0301 |
| HCMVtreated | | | | K K L\S | | |
| HF997_ | (L) | 10 | 31.85 | V/L\|S\|A/ | 0.043597 | C0102 |
| HCMVtreated | | | | K/K\L\S\| | | |
| | | | | S\L | | |
| HF997_ | (R) | 9 | 36.37 | Y/P\|A\|P/ | 0.054413 | B0801, |
| HCMVtreated | | | | R P | | B5101 |
| | | | | Q\A\I | | |
| HF997_ | (M) | 9 | 51.32 | V/M\|D\|D\| | 2.000613 | C0102 |
| HCMVtreated | | | | L\|R\D\T\ | | |
| | | | | L | | |
| HOM2_w632_ | (—) | 9 | 133.32 | I/L\|F F | 0.010677 | A0301 |
| A03_C01_ | | | | H\V\L\|L\| | | |
| VACV | | | | Y | | |
| HOM2_B27_ | (R) | 10 | 14.95 | H/R N | 0.595316 | B2705 |
| VACV | | | | K\I\|I/N | | |
| | | | | A\E\|K | | |

| | in source | |
|---|---|---|
| | frag | Comment |
| HF997_ | | |
| HCMVtreated | | |
| HF997_ | in source | appear to be in-source fragments of VLSAKKLSSL |
| HCMVtreated | fragment | (SEQ ID NO: 16287), and not HLA-I binding peptides, |
| | | as they elute within 0.1 minutes of each other |
| | | and do not have strong HLAthena binding predictions |
| HF997_ | in source | appear to be in-source fragments of VLSAKKLSSL |
| HCMVtreated | fragment | (SEQ ID NO: 16287), and not HLA-I binding peptides, |
| | | as they elute within 0.1 minutes of each other |
| | | and do not have strong HLAthena binding predictions |
| HF997_ | | |
| HCMVtreated | | |
| HF997_ | in source | |
| HCMVtreated | parent | |
| HF997_ | | |
| HCMVtreated | | |
| HF997_ | | |
| HCMVtreated | | |
| HOM2_w632_ | | |
| A03_C01_ | | |
| VACV | | |
| HOM2_B27_ | | |
| VACV | | |

Exposing uORFs that Regulate the Translation of Canonical Viral Proteins

[0552] In addition to a list of canonical and non-canonical ORFs, our assay provides a detailed view of ribosome footprints across thousands of viral genes that can be harnessed to study translational regulation. Examining the distribution of ribosome footprints in 2,418 viral genes, Applicant identified two main clusters: a group of genes in which most of the footprints were observed in the 5′UTR with low occupancy in the CDS region (5′UTR cluster), and a group of genes in which most of the footprints were detected in the CDS with no evidence for ribosomes in the 5′UTR (CDS cluster) (FIG. 52A-52B). The tri-nucleotide periodicity observed in uORFs that were detected in the 5′UTR region indicates that they are actively translated by ribosomes (FIG. 52C). Moreover, Applicant found a strong signal of initiating ribosomes at the start codons of these uORFs in the presence of an LTM inhibitor.

[0553] Applicant hypothesized that viral genes in the 5′UTR cluster have uORFs that attenuate translation initiation from the main CDS (FIG. 52D). To test if the translation of the detected uORFs is regulated by cellular stress, Applicant treated cells with Sodium Arsenite (NaAsO2), a potent inducer of eIF2alpha phosphorylation (Andreev et al. 2015). In agreement with Andreev et al., treating HEK293T cells with 40 μM Sodium Arsenite resulted in rapid phosphorylation of eIF2alpha after 60 minutes (FIG. 52E). Applicant also observed strong induction of the cellular ATF4 protein levels, a well-studied gene that is regulated by uORFs, confirming enhancement of main CDS translation upon Arsenite treatment.

[0554] Applicant set out to investigate the distribution of ribosome footprints across the pan-viral library in response to Arsenite treatment. Applicant transfected HEK293T cells with the library plasmid pool and treated cells with 40 μM Sodium Arsenite for 60 minutes prior ribosome profiling. Applicant found a relative decrease in the fraction of viral genes in which ribosomes were “held” at the 5′UTR (37% to 19% in untreated and treated cells, respectively, FIG. 52F) and an increase in the fraction of genes containing ribosome footprints in the CDS (63% to 81% in untreated and treated cells, respectively). This result indicates that in response to eIF2alpha phosphorylation, ribosomes were more likely to “bypass” the uORFs in the 5′UTR and initiate translation at the main CDS, as expected in the case of inhibitory uORFs. Together, MPRP exposed hundreds of potential uORF that negatively regulate the translation of viral proteins.

### Discussion

[0555] Applicant presents a method to comprehensively screen the genomes of many viruses for translated regions in a single pooled experiment. Using MPRP, Applicant uncovered thousands of “hidden” ORFs in viral genomes, expanding the repertoire of viral targets for immune response and vaccine design. The high resolution of ribosome footprints across canonical and non-canonical ORFs facilitated systematic interrogation of the relationships between ribosome occupancies on the 5′UTR and CDS regions and the identification of hundreds of uORFs that negatively regulate the synthesis of canonical viral proteins.

[0556] MPRP has the capacity to identify translated ORFs in a broad spectrum of viruses. Various viral families exhibit unique life cycles, utilizing diverse nucleic acids as their genetic material and employing distinct strategies for replication, RNA transcription, and ribosome recruitment. Furthermore, different viruses replicate within specific subcellular compartments, such as the nucleus, cytoplasm, and viral factories. Despite these variations, Applicant have successfully detected annotated CDSs from many families. Given that all known viruses are unequivocally reliant on the host translation machinery (Stern-Ginossar et al. 2019), their genomes have evolved to be recognized by the 80S ribosome. It is possible that these inherent sequence features facilitate translation initiation when the CDS is expressed from a synthetic construct in uninfected cells.

[0557] MPRP's capabilities hold particular significance in the context of researching highly pathogenic viruses, as our comprehension of their biology is limited due to the scarcity of available high-containment facilities. MPRP, employing 200 nt-long viral fragments, can be conducted in a BSL-2 setting, rendering it accessible to laboratories worldwide. Our study effectively identified annotated CDSs in families of viruses designated as high-priority pathogens with the potential for outbreaks and global pandemics by the World Health Organization (WHO). Evident signatures of elongating and initiating ribosomes, including tri-nucleotide periodicity, were found in Filoviridae (Ebola virus disease and Marburg virus disease), Paramyxoviridae (Nipah and henipaviral diseases), Arenaviridae (Lassa fever), Coronaviridae (Middle East respiratory syndrome {MERS} and Severe Acute Respiratory Syndrome {SARS}), and Flaviviridae (Zika virus) (FIGS. 49B, 56, and 57). Subsequent MPRP experiments have the potential to deepen our comprehension of their translational regulation and dependencies on host factors, which will inform future therapeutics.

[0558] This study unveiled a previously unexplored realm of viral antigens that could contribute to HLA-I presentation and T cell recognition. The identification of peptides in MS experiments relies on a predefined dataset and requires a list of the proteins present in the sample. Consequently, the lack of comprehensive information regarding the complete translatome of viral genomes hinders the detection of HLA-I peptides. It has been suggested that incorporating data from ribosome profiling could enhance the optimization of false- and failed-discovery rates (Holly and Yewdell 2023). Utilizing the list of ORFs detected by our assay, Applicant revealed HLA-I peptides originating from non-canonical ORFs in HCMV and VACV (FIG. 51A-51C). As researchers generate immunopeptidome data for other viruses, our pan-viral non-canonical ORFs list can serve as a resource for the community, enabling rapid exploration of the new immunopeptidomes. Furthermore, these non-canonical ORFs can also be integrated into the design of peptide pools for T cell assays. While T cell assays almost exclusively assess responses against canonical proteins, Applicant recently demonstrated that some T cell epitopes from non-canonical ORFs induce more potent T cell responses compared to canonical epitopes (Weingarten-Gabbay et al. 2021). Thus, the incorporation of non-canonical ORFs into T cell assays has the potential to enhance their sensitivity and facilitate the identification of vaccine targets.

[0559] Applicant reveals here an unprecedented number of viral uORFs that likely play a role in gene expression regulation. Proper temporal expression of viral proteins is crucial for their life cycle. For instance, viruses must inhibit host antiviral genes before genome replication to avoid innate immune responses. Structural protein synthesis and virion assembly usually follow sufficient genome replication. Viruses employ ‘transcriptional programs’ for ‘early,’ ‘intermediate,’ and ‘late’ genes, often using distinct promoters or controlling transcription levels through the arrangements of genes along their genome. Recent research highlights translation control, particularly uORFs, in temporal viral gene expression regulation. Enrichment of uORFs in late genes of HHV-6 and HCMV suggests roles in temporal gene control (Finkel et al. 2020). However, unlike transcription-related mechanisms, uORF-mediated gene regulation in viruses remains less understood. Our study uncovers numerous potential uORFs in viral genomes, exhibiting signs of genuine translation, including tri-nucleotide periodicity and enriched initiating ribosomes at uORF start codons (FIG. 52C). Notably, many of these uORFs respond to eIF2alpha phosphorylation, resulting in enhanced translation of the primary CDS. Given that eIF2alpha phosphorylation levels rise during infection, the expression of viral genes controlled by these uORFs would be augmented in the later stages of infection. This suggests their function as cis-regulatory elements of ‘late’ genes.

[0560] It is important to acknowledge the limitations inherent in this study. The viral sequences examined here were assessed independently of the broader genome context, and were evaluated in non-infected cells. MPRP does not capture the distinctive biology occurring within cells infected by each of the many viruses studied here. Thus, it is plausible that our assay lacks host and/or viral proteins necessary for the translation of certain ORFs. While the results from this study should be interpreted with the caution typical of high-throughput screens, there is substantive evidence supporting the identification of genuine ORFs. This evidence arises from the anticipated signature of elongating and initiating ribosomes, the reproducibility of measurements across different cell types, the notable decrease in ribosome footprints upon mutating AUG and non-AUG start codons, the corroborative support from HLA-I peptides identified through mass spectrometry, and the responsiveness of uORFs to stress conditions. In total, our study yields numerous promising candidates for unexplored viral ORFs, which can enhance our understanding of viral biology and contribute to vaccine development.

### Methods

### ORF Discovery Using PRICE

[0561] Applicant used PRICE to identify ORFs from deep sequencing reads (Erhard et al. 2018). PRICE algorithm requires a predefined set of annotated CDSs in order to estimate the codons that have generated the observed ribosome footprints. When providing the reference genome of the synthetic library, Applicant did not indicate which oligo contains an annotated viral CDS, because Applicant used this information to estimate ORF discovery rate. Instead, Applicant used annotated human CDSs that were translated in library-transfected cells and thus, were exposed to the exact same experimental conditions (e.g., RNaseI concentration and incubation time that can impact footprints size). Applicant generated a chimeric reference genome composed of chromosome 1 in hg19 and an artificial chromosome composed of 15,000 oligos of the pan-viral library. In addition, Applicant generated a gtf file with the annotations of hg19 and library oligos required for PRICE predictions. For each experiment, Applicant mapped deep sequencing reads to the chimeric fasta file using Bowtie. Applicant ran PRICE with bam files from all the experiments done in HEK293T cells. Applicant filtered ORFs a p-value <=0.05 after correcting for false discovery rate (FDR). ORFs were then defined by extending each initiating codon to the next in-frame stop codon in the corresponding viral genome.

### Tri-Nucleotide Periodicity Analysis

[0562] To determine the reading frame, Applicant used ribosome footprints in the exact length of 29 nt and plotted the position of the first nt of the sequencing read. Positions were corrected for the P site offset (12 nt).

### Re-Analysis of HLA-I Immunopeptidome Datasets

[0563] Parameters for the Spectrum Mill MS/MS search module for HLA-I immunopeptidomes reported in (Lorente et al. 2017), (Lorente et al. 2017) included: no enzyme specificity; precursor and product mass tolerance of ±10 ppm; minimum matched peak intensity of 30%; ESI-ORBITRAP-CID-HLA-v3 scoring; fixed modification: cysteinylation of cysteine; variable modifications: oxidation of methionine, deamidation of asparagine, acetylation of protein N-termini, and pyroglutamic acid at peptide N-terminal glutamine; and precursor mass shift range of −18 to 136 Da.

[0564] Parameters for the Spectrum Mill MS/MS search module for HLA-I immunopeptidomes reported in Erhard et al., (Erhard et al. 2018) included: no enzyme specificity; precursor and product mass tolerance of ±10 ppm; minimum matched peak intensity of 30%; ESI-QEXACTIVE-HCD-HLA-v3 scoring; variable modifications: cysteinylation of cysteine; oxidation of methionine, deamidation of asparagine, acetylation of protein N-termini, and pyroglutamic acid at peptide N-terminal glutamine; and precursor mass shift range of −18 to 136 Da.

### HLAthena HLA-I Peptide Presentation Predictions

[0565] HLA peptide prediction was performed using HLAthena (Sarkizova et al. 2020). For HCMV infected HF99-7, HLA A*01:01, A*03:01, B*08:01, -B*51:01, C*07:01, C*01:02 were used for HLAthena predictions (Erhard et al. 2018). For VACV-infected HOM-2 cells, HLA A*03:01, B*27:05:02, and C*01:02 were used for HLAthena predictions (Lorente et al. 2017).

### REFERENCES FOR EXAMPLE 3

[0566] Andreev, Dmitry E., Patrick B. F. O'Connor, Ciara Fahey, Elaine M. Kenny, Ilya M. Terenin, Sergey E. Dmitriev, Paul Cormican, Derek W. Morris, Ivan N. Shatsky, and Pavel V. Baranov. 2015. “Translation of 5′ Leaders Is Pervasive in Genes Resistant to eIF2 Repression.” eLife 4 (January): e03971.
[0567] Bansal, Anju, Jonathan Carlson, Jiyu Yan, Olusimidele T. Akinsiku, Malinda Schaefer, Steffanie Sabbaj, Anne Bet, et al. 2010. “CD8 T Cell Response and Evolutionary Pressure to HIV-1 Cryptic Epitopes Derived from Antisense Transcription.” The Journal of Experimental Medicine 207 (1): 51-59.
[0568] Chen, Augustine, Y. F. Kao, and Chris M. Brown. 2005. “Translation of the First Upstream ORF in the Hepatitis B Virus Pregenomic RNA Modulates Translation at the Core and Polymerase Initiation Codons.” Nucleic Acids Research 33 (4): 1169-81.
[0569] Chen, Jin, Andreas-David Brunner, J. Zachery Cogan, James K. Nunez, Alexander P. Fields, Britt Adamson, Daniel N. Itzhak, et al. 2020. “Pervasive Functional Translation of Noncanonical Human Open Reading Frames.” Science 367 (6482): 1140-46.
[0570] Erhard, Florian, Anne Halenius, Cosima Zimmermann, Anne L'Hernault, Daniel J. Kowalewski, Michael P. Weekes, Stefan Stevanovic, Ralf Zimmer, and Lars Dolken. 2018. “Improved Ribo-Seq Enables Identification of Cryptic Translation Events.” Nature Methods 15 (5): 363-66.
[0571] Finkel, Yaara, Dominik Schmiedel, Julie Tai-Schmiedel, Aharon Nachshon, Roni Winkler, Martina Dobesova, Michal Schwartz, Ofer Mandelboim, and Noam Stern-Ginossar. 2020. “Comprehensive Annotations of Human Herpesvirus 6A and 6B Genomes Reveal Novel and Conserved Genomic Features.” eLife 9 (January). https://doi.org/10.7554/eLife.50960.
[0572] Gould, Phillip S., and Andrew J. Easton. 2005. “Coupled Translation of the Respiratory Syncytial Virus M2 Open Reading Frames Requires Upstream Sequences.” The Journal of Biological Chemistry 280 (23): 21972-80.
[0573] Hickman, Heather D., Jacqueline W. Mays, James Gibbs, Ivan Kosik, Javier G. Magadin, Kazuyo Takeda, Suman Das, et al. 2018. “Influenza A Virus Negative Strand RNA Is Translated for CD8+ T Cell Immunosurveillance.” Journal of Immunology 201 (4): 1222-28.
[0574] Hinnebusch, Alan G., Ivaylo P. Ivanov, and Nahum Sonenberg. 2016. “Translational Control by 5′-Untranslated Regions of Eukaryotic mRNAs.” Science 352 (6292): 1413-16.
[0575] Holly, Jaroslav, and Jonathan W. Yewdell. 2023. “Game of Omes: Ribosome Profiling Expands the MHC-I Immunopeptidome.” Current Opinion in Immunology 83 (May): 102342.
[0576] Ingolia, Nicholas T., Gloria A. Brar, Noam Stern-Ginossar, Michael S. Harris, Gaëlle J. S. Talhouarne, Sarah E. Jackson, Mark R. Wills, and Jonathan S. Weissman. 2014. “Ribosome Profiling Reveals Pervasive Translation outside of Annotated Protein-Coding Genes.” Cell Reports 8 (5): 1365-79.
[0577] Ingolia, Nicholas T., Sina Ghaemmaghami, John R. S. Newman, and Jonathan S. Weissman. 2009. “Genome-Wide Analysis in Vivo of Translation with Nucleotide Resolution Using Ribosome Profiling.” Science 324 (5924): 218-23.
[0578] Ingolia, Nicholas T., Jeffrey A. Hussmann, and Jonathan S. Weissman. 2019. “Ribosome Profiling: Global Views of Translation.” Cold Spring Harbor Perspectives in Biology 11 (5). https://doi.org/10.1101/cshperspect.a032698.
[0579] Ingolia, Nicholas T., Liana F. Lareau, and Jonathan S. Weissman. 2011. “Ribosome Profiling of Mouse Embryonic Stem Cells Reveals the Complexity and Dynamics of Mammalian Proteomes.” Cell 147 (4): 789-802.
[0580] Lorente, Elena, Alejandro Barriga, Juan Garcia-Arriaza, Frangois A. Lemonnier, Mariano Esteban, and Daniel López. 2017. “Complex Antigen Presentation Pathway for an HLA-A*0201-Restricted Epitope from Chikungunya 6K Protein.” PLoS Neglected Tropical Diseases 11 (10): e0006036.
[0581] Lulla, Valeria, Adam M. Dinan, Myra Hosmillo, Yasmin Chaudhry, Lee Sherry, Nerea Irigoyen, Komal M. Nayak, et al. 2019. “An Upstream Protein-Coding Region in Enteroviruses Modulates Virus Infection in Gut Epithelial Cells.” Nature Microbiology 4 (2): 280-92.
[0582] Lulla, Valeria, and Andrew E. Firth. 2020. “A Hidden Gene in Astroviruses Encodes a Viroporin.” Nature Communications 11 (1): 4070.
[0583] Maness, Nicholas J., Andrew D. Walsh, Shari M. Piaskowski, Jessica Furlott, Holly L. Kolar, Alexander T. Bean, Nancy A. Wilson, and David I. Watkins. 2010. “CD8+ T Cell Recognition of Cryptic Epitopes Is a Ubiquitous Feature of AIDS Virus Infection.” Journal of Virology 84 (21): 11569-74.
[0584] McGlincy, Nicholas J., and Nicholas T. Ingolia. 2017. “Transcriptome-Wide Measurement of Translation by Ribosome Profiling.” Methods 126 (August): 112-29.
[0585] Ogden, Pierce J., Eric D. Kelsic, Sam Sinai, and George M. Church. 2019. “Comprehensive AAV Capsid Fitness Landscape Reveals a Viral Gene and Enables Machine-Guided Design.” Science 366 (6469): 1139-43.
[0586] Ouspenskaia, Tamara, Travis Law, Karl R. Clauser, Susan Klaeger, Siranush Sarkizova, Frangois Aguet, Bo Li, et al. 2022. “Unannotated Proteins Expand the MHC—I-Restricted Immunopeptidome in Cancer.” Nature Biotechnology 40 (2): 209-17.
[0587] Ruiz Cuevas, Maria Virginia, Marie-Pierre Hardy, Jaroslav Holly, Eric Bonneil, Chantal Durette, Mathieu Courcelles, Joel Lanoix, et al. 2021. “Most Non-Canonical Proteins Uniquely Populate the Proteome or Immunopeptidome.” Cell Reports 34 (10): 108815.
[0588] Sarkizova, Siranush, Susan Klaeger, Phuong M. Le, Letitia W. Li, Giacomo Oliveira, Hasmik Keshishian, Christina R. Hartigan, et al. 2020. “A Large Peptidome Dataset Improves HLA Class I Epitope Prediction across Most of the Human Population.” Nature Biotechnology 38 (2): 199-209.
[0589] Seo, Jenny J., Soo-Jin Jung, Jihye Yang, Da-Eun Choi, and V. Narry Kim. 2023. “Functional Viromic Screens Uncover Regulatory RNA Elements.” Cell 186 (15): 3291-3306.e21.
[0590] Shabman, Reed S., Thomas Hoenen, Allison Groseth, Omar Jabado, Jennifer M. Binning, Gaya K. Amarasinghe, Heinz Feldmann, and Christopher F. Basler. 2013. “An Upstream Open Reading Frame Modulates Ebola Virus Polymerase Translation and Virus Replication.” PLoS Pathogens 9 (1): e1003147.
[0591] Starck, Shelley R., and Nilabh Shastri. 2016. “Nowhere to Hide: Unconventional Translation Yields Cryptic Peptides for Immune Surveillance.” Immunological Reviews 272 (1): 8-16.
[0592] Stern-Ginossar, Noam, Sunnie R. Thompson, Michael B. Mathews, and Ian Mohr. 2019. “Translational Control in Virus-Infected Cells.” Cold Spring Harbor Perspectives in Biology 11 (3). https://doi.org/10.1101/cshperspect.a033001.
[0593] Stern-Ginossar, Noam, Ben Weisburd, Annette Michalski, Vu Thuy Khanh Le, Marco Y. Hein, Sheng-Xiong Huang, Ming Ma, et al. 2012. “Decoding Human Cytomegalovirus.” Science 338 (6110): 1088-93.
[0594] Tan, Evan, Cara Sze Hui Chin, Zhi Feng Sherman Lim, and Say Kong Ng. 2021. “HEK293 Cell Line as a Platform to Produce Recombinant Proteins and Viral Vectors.” Frontiers in Bioengineering and Biotechnology 9 (December): 796991.
[0595] Weingarten-Gabbay, Shira, Da-Yuan Chen, Siranush Sarkizova, Hannah B. Taylor, Matteo Gentili, Leah R. Pearlman, Matthew R. Bauer, et al. 2023. “The HLA-II Immunopeptidome of SARS-CoV-2.” bioRxiv. https://doi.org/10.1101/2023.05.26.542482.
[0596] Weingarten-Gabbay, Shira, Shani Elias-Kirma, Ronit Nir, Alexey A. Gritsenko, Noam Stern-Ginossar, Zohar Yakhini, Adina Weinberger, and Eran Segal. 2016. “Comparative Genetics. Systematic Discovery of Cap-Independent Translation Sequences in Human and Viral Genomes.” Science 351 (6270). https://doi.org/10.1126/science.aad4939.
[0597] Weingarten-Gabbay, Shira, Susan Klaeger, Siranush Sarkizova, Leah R. Pearlman, Da-Yuan Chen, Kathleen M. E. Gallagher, Matthew R. Bauer, et al. 2021. “Profiling SARS-CoV-2 HLA-I Peptidome Reveals T Cell Epitopes from out-of-Frame ORFs.” Cell 184 (15): 3962-80.e17.
[0598] Weingarten-Gabbay, Shira, Ronit Nir, Shai Lubliner, Eilon Sharon, Yael Kalma, Adina Weinberger, and Eran Segal. 2019. “Systematic Interrogation of Human Promoters.” Genome Research 29 (2): 171-83.
[0599] Yang, Ning, James S. Gibbs, Heather D. Hickman, Glennys V. Reynoso, Arun K. Ghosh, Jack R. Bennink, and Jonathan W. Yewdell. 2016. “Defining Viral Defective Ribosomal Products: Standard and Alternative Translation Initiation Events Generate a Common Peptide from Influenza A Virus M2 and M1 mRNAs.” Journal of Immunology 196 (9): 3608-17.

[0600] Various modifications and variations of the described methods, pharmaceutical compositions, and kits of the invention will be apparent to those skilled in the art without departing from the scope and spirit of the invention. Although the invention has been described in connection with specific embodiments, it will be understood that it is capable of further modifications and that the invention as claimed should not be unduly limited to such specific embodiments. Indeed, various modifications of the described modes for carrying out the invention that are obvious to those skilled in the art are intended to be within the scope of the invention. This application is intended to cover any variations, uses, or adaptations of the invention following, in general, the principles of the invention and including such departures from the present disclosure come within known customary practice within the art to which the invention pertains and may be applied to the essential features herein before set forth.

[0601] Further attributes, features, and embodiments of the present invention can be understood by reference to the following numbered aspects of the disclosed invention. Reference to disclosure in any of the preceding aspects is applicable to any preceding numbered aspect and to any combination of any number of preceding aspects, as recognized by appropriate antecedent disclosure in any combination of preceding aspects that can be made. The following numbered aspects are provided:
[0602] 1. A polynucleotide comprising one or more viral polynucleotides selected from SEQ ID NOS: 1-9890. or SEQ ID NOS: 9891-16277.
[0603] 2. A vector comprising:
a synthetic library expression construct comprising:
   [0604] a short synthetic polynucleotide;
   [0605] a pair of constant primers flanking the short synthetic polynucleotide, the pair of constant primers comprising a forward constant primer and a reverse constant primer, wherein the forward constant primer and the reverse constant primer are each independently coupled to a 5′ end or a 3′ end of the short synthetic polynucleotide;
   [0606] a stop codon polynucleotide comprising one or more stop codons, wherein the stop codon polynucleotide is coupled to a constant primer coupled to the 3′ end of the short synthetic polynucleotide such that the constant primer coupled to the 3′ end of the short synthetic polynucleotide is between the stop codon polynucleotide and the short synthetic polynucleotide;
   [0607] a poly A signal, wherein the poly A signal is operably coupled to the short synthetic polynucleotide, the pair of constant primers, and the stop codon polynucleotide; and
   [0608] a promoter, wherein the promoter is operably coupled to the short synthetic polynucleotide, the pair of constant primers, and the stop codon polynucleotide, and the poly A signal.
[0609] 3. The vector of aspect 2, wherein the short synthetic polynucleotide is about 200 nucleotides.
[0610] 4. The vector of any one of aspects 2-3, wherein the short synthetic polynucleotide has a sequence corresponding to a region of a genome.
[0611] 5. The vector of any one of aspects 2-4, wherein the short synthetic polynucleotide has a sequence corresponding to a region of a human genome, a non-human animal genome, a plant genome, a microbial genome, or a viral genome.
[0612] 6. The vector of any one of aspects 2-5, wherein the short synthetic polynucleotide has a sequence corresponding to
   [0613] a. an annotated region of a genome;
   [0614] b. an unannotated region of a genome;
   [0615] c. a mutation;
   [0616] d. a 5′UTR;
   [0617] e. a 3′UTR;
   [0618] f. an open reading frame; or
   [0619] g. any combination thereof.
[0620] 7. The vector of any one of aspects 2-6, wherein the short synthetic polynucleotide
   [0621] a. is a sequence according to a sequence in SEQ ID NOS: 1-9890 or SEQ ID NOS: 9891-16277;
   [0622] b. is a synthetic in silico designed sequence;
   [0623] c. does not have 100 percent identity to a genome sequence, optionally a human genome, a non-human animal genome, a plant genome, a microbial genome, or a viral genome;
   [0624] d. is not native to a genome; optionally a human genome, a non-human animal genome, a plant genome, a microbial genome, or a viral genome; or
   [0625] e. any combination thereof.
[0626] 8. The vector of any one of aspects 2-7, wherein the vector comprises two or more synthetic library expression constructs.
[0627] 9. The vector of aspect 8, wherein at least two of the two or more synthetic library expression constructs comprises a different short synthetic polynucleotide.
[0628] 10. The vector of aspect 8, wherein each of the two or more synthetic library expression constructs comprises a different short synthetic polynucleotide.
[0629] 11. The vector of any one of aspects 8-10, wherein at least two of the two or more synthetic library constructs comprises the same short synthetic polynucleotide.
[0630] 12. The vector of any one of aspects 2-11, further comprising an additional regulatory element, a reporter gene, an origin of replication, a cloning sites, an internal ribosome entry sites, a transcription termination sequence, an inverted terminal repeat, a long terminal repeats, a trans-activating response elements, a central polypurine tract, a Psi element, a Rev response element, a packaging protein gene, a polymerase gene, an envelope protein gene, a capsid protein gene, a Rep protein gene, a U3 element, a repeat element (R), a unique 5′ element (U5), an untranslated region stabilization element, or any combination thereof.
[0631] 13. The vector of any one of aspects 2-12, further comprising a Woodchuck hepatitis virus post-transcriptional regulatory element (WPRE), wherein the WPRE is operably coupled to the short synthetic polynucleotide and the pair of constant primers.
[0632] 14. The vector of any one of aspects 2-13, wherein the vector is a eukaryotic expression vector.
[0633] 15. The vector of any one of aspects 2-14, wherein the vector is a viral expression vector.
[0634] 16. The vector of any one of aspects 2-15, wherein the promoter is a constitutive promoter.
[0635] 17. The vector of any one of aspects 2-16, wherein the promoter is an inducible promoter or a conditional promoter.
[0636] 18. A vector library comprising a plurality of vectors, wherein each vector of the plurality of vectors is as in any one of aspects 2-17.
[0637] 19. The vector library of aspect 18, wherein at least two or more of the vectors of the plurality of vectors comprise different short synthetic polynucleotides.
[0638] 20. The vector library of aspect 18, wherein each vector of the plurality of vectors comprises a different short synthetic polynucleotide.
[0639] 21. The vector library of any one of aspects 18-19, wherein at least two of the vectors of the plurality of vectors comprise the same short synthetic polynucleotides.
[0640] 22. A cell comprising a vector or a vector library as in any one of aspects 2-21.
[0641] 23. The cell of aspect 22, wherein the cell is a eukaryotic cell or a prokaryotic cell.
[0642] 24. A high through put method of determining translated sequences, the method comprising:
   [0643] expressing a vector or a vector library as in any one of aspects 2-21 in one or more cells under conditions sufficient to produce translation products;
   [0644] obtaining a sample of ribosomes comprising ribosome-protected mRNA fragments (RPFs) from the cells;
   [0645] recovering ribosome footprints consisting essentially of the RPFs from the sample of ribosomes; and
   [0646] determining a sequence of the RPFs thereby identifying translated sequences.
[0647] 25. The method of aspect 24, wherein determining the sequence of the RPFs comprises nucleotide sequencing.
[0648] 26. The method of aspect 25, wherein nucleotide sequencing comprises RNA sequencing.
[0649] 27. The method of any one of aspects 25, wherein nucleotide sequencing comprises generating cDNA from the RPFs for form RPF cDNA and DNA sequencing the RPF cDNA.
[0650] 28. The method of any one of aspects 24-27, further comprising digesting unprotected mRNA prior to recovering ribosome footprints.
[0651] 29. The method of any one of aspects 24-28, further comprising removing rRNA from the sample containing ribosomes.
[0652] 30. A polynucleotide identified using the method as in any one of aspects 24-29.
[0653] 31. A polynucleotide comprising one or more viral polynucleotides selected from those polynucleotides of aspect 30 and SEQ ID NOS: 1-9890. or SEQ ID NOS: 9891-16277.
[0654] 32. A vector comprising the polynucleotide of any one of aspects 1 or 30-31.
[0655] 33. The vector of aspect 32, wherein the vector is an expression vector.
[0656] 34. The vector of any one of aspects 32-33, wherein the vector is a eukaryotic vector, prokaryotic vector, or viral vector.
[0657] 35. A polypeptide encoded by the polynucleotide of any one of aspects 1 or 30-31 and/or the vector as in any one of aspects 32-34.
[0658] 36. A delivery vehicle comprising: the polynucleotide of any one of aspects 1 or 30-31, a vector as any one of aspects 32-34, the polypeptide as in aspect 35, or any combination thereof.
[0659] 37. The delivery vehicle of aspect 36, wherein the delivery vehicle comprises a particle, lipid particle, liposome, exosome, virus particle, virus-like particle, capsid, cell penetrating peptide, DNA nanoclew, supercharged protein, self-assembling nanoparticle, spherical nucleic acid, streptolysin, lipoplex, polyplex, sugar-based particle, stable nucleic-acid particles, mRNA vaccine, and any combination thereof.
[0660] 38. A cell comprising:
   [0661] the polynucleotide of any one of aspects 1 or 30-31, a vector as any one of aspect 32-34, the polypeptide as in aspect 35, the delivery vehicle of any one of aspects 36-37, or any combination thereof.
[0662] 39. An immunogenic composition comprising:
   [0663] the polynucleotide of any one of aspects 1 or 30-31, a vector as any one of aspects 32-34, the polypeptide as in aspect 35, the delivery vehicle of any one of aspects 36-37, the cell of aspect 38, or any combination thereof.
[0664] 40. The immunogenic composition of aspect 39, wherein the polynucleotide of any one of aspects 1 or 30-31 and/or the polypeptide as in aspect 25 is stimulating a B-cell and/or T-cell response in a subject to which it is delivered.
[0665] 41. The immunogenic composition of aspect 40, wherein the B-cell response comprises antibody production.
[0666] 42. A therapeutic composition comprising:
   [0667] the immunogenic composition of any one of aspects 39-41; and
   [0668] an anti-viral therapeutic.
[0669] 43. The immunogenic or therapeutic composition of any one of aspects 39-42, wherein the one or more polynucleotides is a synthetic mRNA vaccine.
[0670] 44. A formulation comprising:
   [0671] the polynucleotide of any one of aspects 1 or 30-31, a vector as any one of aspects 32-34, the polypeptide as in aspect 35, the delivery vehicle of any one of aspects 36-37, the cell of aspect 38, the immunogenic composition of any one of aspects 39-41 or 43, a therapeutic composition as in any one of aspects 42-43; and
   [0672] a pharmaceutically acceptable carrier.
[0673] 45. A method of inducing a B-cell response and/or T-cell response to a virus in a subject in need thereof, comprising:
   [0674] administering, to the subject, the immunogenic composition of any one of aspects 39-41 or 43, or the therapeutic composition of any one of aspects 42-43, or a pharmaceutical formulation thereof.
[0675] 46. The method of aspect 45, wherein the B cell response comprises antibody production.
[0676] 47. A method of treating a viral infection in a subject in need thereof comprising:
   [0677] administering, to the subject in need thereof, the immunogenic composition of any one of aspects 39-41 or 43, or the therapeutic composition of any one of aspects 42-43, or a pharmaceutical formulation thereof in combination with an antiviral therapeutic.
[0678] 48. A method of determining an infection status of a subject comprising:
   [0679] contacting immune cells derived from a subject with the immunogenic composition of any one of aspects 39-41 or 43 or a pharmaceutical formulation thereof; and
   [0680] detecting cross-reactivity of the immune cells to the immunogenic composition.
[0681] 49. A method of massively parallel antigen profiling comprising:
   [0682] delivering to and expressing in a plurality of cells a pan-genomic library or a polynucleotide as in any one of aspects 1 or 30-31, wherein the pan-genomic library comprises a plurality of synthetic library expression constructs, each comprising a short synthetic polynucleotide and a pair of constant primers flanking the short synthetic polynucleotide, wherein the short synthetic polynucleotide has a sequence corresponding to a region of a genome; and
   [0683] determining the antigens presented by the cells.
[0684] 50. The method of aspect 49, wherein delivery comprises infecting the plurality of cells with the viral particles comprising the pan-genomic library or the polynucleotide.
[0685] 51. The method of any one of aspects 49-50, wherein determining the antigens comprises protein sequencing, mass spectrometry, Raman spectroscopy, immunodetection, chromatography, centrifugation, isoelectric focusing, or any combination thereof.
[0686] 52. The method of any one of aspects 49-51, wherein determining the antigens comprises isolating MHC complexes from the cells and detecting peptides loaded in the MHC, wherein the MHC is optionally an HLA.
[0687] 53. The method of any one of aspects 49-52, wherein the method further comprises evaluating an immune response to the antigens presented.
[0688] 54. A method of determining translational regulation comprising:
   [0689] determining a first set of translated sequences by a method comprising:
      [0690] expressing a pan-genomic library in a first plurality of cells, wherein the pan-genomic library comprises a plurality of synthetic library expression constructs, each comprising a short synthetic polynucleotide and a pair of constant primers flanking the short synthetic polynucleotide, wherein the short synthetic polynucleotide has a sequence corresponding to a region of a genome;
      [0691] obtaining a sample of ribosomes comprising ribosome-protected mRNA fragments (RPFs) from the first plurality of cells;
      [0692] recovering ribosome footprints consisting essentially of the RPFs from the sample of ribosomes; and
      [0693] determining the sequence of the RPFs thereby identifying translated sequences to form the first set of translated sequences;
   [0694] determining a second set of translated sequences by a method comprising:
      [0695] expressing the pan-genomic library in a second plurality of cells;
      [0696] applying a stress to the second plurality of cells;
      [0697] obtaining a sample of ribosomes comprising ribosome-protected mRNA fragments (RPFs) from the second plurality of cells;
      [0698] recovering ribosome footprints consisting essentially of the RPFs from the sample of ribosomes; and
      [0699] determining the sequence of the RPFs thereby identifying translated sequences to form the second set of translated sequences,
      [0700] whereby similarities and differences in the sequences of the first and the second set of translated sequences indicates sequences that are translationally regulated or regulate translation.
[0701] 55. The method of aspect 54, wherein the short synthetic polynucleotide is about 200 nucleotides.
[0702] 56. The method of any one of aspects 54-55, wherein the short synthetic polynucleotide has a sequence corresponding to a region of a genome.
[0703] 57. The method of aspect 56, wherein the short synthetic polynucleotide has a sequence corresponding to a region of a human genome, a non-human animal genome, a plant genome, a microbial genome, or a viral genome.
[0704] 58. The method of any one of aspects 54-57, wherein the short synthetic polynucleotide has a sequence corresponding to
   [0705] a. an annotated region of a genome;
   [0706] b. an unannotated region of a genome;
   [0707] c. a mutation;
   [0708] d. a 5′UTR;
   [0709] e. a 3′UTR;
   [0710] f. an open reading frame; or
   [0711] g. any combination thereof.
[0712] 59. The method of any one of aspects 54-58, wherein the short synthetic polynucleotide
   [0713] a. is a sequence according to a sequence in SEQ ID NOS: 1-9890 or SEQ ID NOS: 9891-16277;
   [0714] b. is a synthetic in silico designed sequence;
   [0715] c. does not have 100 percent identity to a genome sequence, optionally a human genome, a non-human animal genome, a plant genome, a microbial genome, or a viral genome;
   [0716] d. is not native to a genome, optionally a human genome, a non-human animal genome, a plant genome, a microbial genome, or a viral genome; or
   [0717] e. any combination thereof.
[0718] 60. The method of any one of aspects 54-59, wherein expressing a pan-genomic library in a first plurality of cells and expressing a pan-genomic library in a second plurality of cells comprises expressing one or more vectors as in any one of aspects 26-41 or a vector library as in any one of aspects 42-45 in the first plurality of cells and the second plurality of cells.
[0719] 61. The method of any one of aspects 54-60, wherein the stress is a small molecule agent, a biologic agent, a physical stress, a chemical stress, or any combination thereof.
[0720] 62. A vector comprising:
   [0721] an optically active reporter construct comprising:
      [0722] a test polynucleotide;
      [0723] a first optically active protein encoding polynucleotide, wherein the first optically active protein encoding polynucleotide is operatively coupled in-frame with the test polynucleotide;
      [0724] a second optically active protein encoding polynucleotide, wherein the second optically active protein is a different optically active protein that the first optically active protein;
      [0725] a promoter, wherein the test polynucleotide, the first optically active protein encoding polynucleotide, and the second optically active protein encoding polynucleotide are operatively coupled to the promoter; and
      [0726] an internal ribosomal entry site (IRES), wherein the IRES is between the first optically active protein encoding polynucleotide and the second optically active protein encoding polynucleotide.
[0727] 63. The vector of aspect 62, further comprising one or more additional regulatory elements, one or more additional reporters, viral replication elements and/or encoding polynucleotides, viral packaging elements and/or encoding polynucleotides, viral envelope protein encoding polynucleotides, long-terminal repeats, viral poly or any combination thereof.
[0728] 64. The vector of any one of aspects 62-63, wherein the promoter is a constitutive promoter or an inducible promoter.
[0729] 65. The vector of any one of aspects 62-64, further comprising one or more untranslated regions (UTRs), wherein the one or more untranslated regions are operatively coupled at a 5′ and/or a 3′ end of the test polynucleotide and/or the first optically active protein encoding polynucleotide.
[0730] 66. The vector of aspect 65, wherein the one or more untranslated regions comprise or consist of 5′ UTRs, 3′ UTRs, or both.
[0731] 67. The vector of any one of aspects 62-66, wherein the test polynucleotide comprises or consists of a short synthetic polynucleotide.
[0732] 68. The vector of aspect 67, wherein the short synthetic polynucleotide is about 200 nucleotides.
[0733] 69. The vector of any one of aspects 67-68, wherein the short synthetic polynucleotide has a sequence corresponding to a region of a genome.
[0734] 70. The vector of aspect 69, wherein the short synthetic polynucleotide has a sequence corresponding to a region of a human genome, a non-human animal genome, a plant genome, a microbial genome, or a viral genome.
[0735] 71. The vector of any one of aspects 67-70, wherein the short synthetic polynucleotide has a sequence corresponding to
   [0736] a. an annotated region of a genome;
   [0737] b. an unannotated region of a genome;
   [0738] c. a mutation;
   [0739] d. a 5′UTR;
   [0740] e. a 3′UTR;
   [0741] f. an open reading frame; or
   [0742] g. any combination thereof.
[0743] 72. The vector of any one of aspects 67-71, wherein the short synthetic polynucleotide
   [0744] a. is a sequence according to a sequence in SEQ ID NOS: 1-9890 or SEQ ID NOS: 9891-16277;
   [0745] b. is a synthetic in silico designed sequence;
   [0746] c. does not have 100 percent identity to a genome sequence, optionally a human genome, a non-human animal genome, a plant genome, a microbial genome, or a viral genome;
   [0747] d. is not native to a genome, optionally a human genome, a non-human animal genome, a plant genome, a microbial genome, or a viral genome; or
   [0748] e. any combination thereof.
[0749] 73. The vector of any one of aspects 62-72, wherein the vector is a viral vector, optionally a retroviral vector, lentiviral vector, adenoviral vector, or adeno-associated viral vector.
[0750] 74. A vector system comprising:
   [0751] one or more vectors as in any one of aspects 62-73, an optionally one or more a viral envelope protein vectors, one or more viral packaging vectors, or any combination thereof.
[0752] 75. The vector or vector system of any one of aspects 62-74, wherein the vector or vector system are capable of producing viral particles comprising the optically active reporter construct.
[0753] 76. A pan-genomic, optionally pan-viral genomic, optically active reporter construct library, comprising:
   [0754] a plurality of vectors as in any one of aspects 67-74, wherein at least two test polynucleotides are different or the same, or wherein each test polynucleotide is different, and the test polynucleotides in each of the vectors of the plurality of vectors comprises or consists of a short synthetic polynucleotide.
[0755] 77. An engineered viral particle comprising:
   [0756] a cargo comprising an optically active reporter construct, wherein the optically active reporter construct cargo comprises:
      [0757] a test polynucleotide;
      [0758] a first optically active protein encoding polynucleotide, wherein the first optically active protein encoding polynucleotide is operatively coupled in-frame with the test polynucleotide;
      [0759] a second optically active protein encoding polynucleotide, wherein the second optically active protein is a different optically active protein that the first optically active protein;
      [0760] a promoter, wherein the test polynucleotide, the first optically active protein encoding polynucleotide, and the second optically active protein encoding polynucleotide are operatively coupled to the promoter; and
      [0761] an internal ribosomal entry site (IRES), wherein the IRES is between the first optically active protein encoding polynucleotide and the second optically active protein encoding polynucleotide.
[0762] 78. The engineered viral particle of aspect 77, wherein the promoter is a constitutive promoter or an inducible promoter.
[0763] 79. The engineered viral particle of any one of aspects 77-78, further comprising one or more untranslated regions (UTRs), wherein the one or more untranslated regions are operatively coupled at a 5′ and/or a 3′ end of the test polynucleotide and/or the first optically active protein encoding polynucleotide.
[0764] 80. The engineered viral particle of aspect 79, wherein the one or more untranslated regions comprise or consist of 5′ UTRs, 3′ UTRs, or both.
[0765] 81. The engineered viral particle of any one of aspects 77-80, wherein the test polynucleotide comprises or consists of a short synthetic polynucleotide.
[0766] 82. The engineered viral particle of aspect 81, wherein the short synthetic polynucleotide is about 200 nucleotides.
[0767] 83. The engineered viral particle of any one of aspects 81-82, wherein the short synthetic polynucleotide has a sequence corresponding to a region of a genome.
[0768] 84. The engineered viral particle of any one of aspects 81-83, wherein the short synthetic polynucleotide has a sequence corresponding to a region of a human genome, a non-human animal genome, a plant genome, a microbial genome, or a viral genome.
[0769] 85. The engineered viral particle of any one of aspects 81-84, wherein the short synthetic polynucleotide has a sequence corresponding to
   [0770] a. an annotated region of a genome;
   [0771] b. an unannotated region of a genome;
   [0772] c. a mutation;
   [0773] d. a 5′UTR;
   [0774] e. a 3′UTR;
   [0775] f. an open reading frame; or
   [0776] g. any combination thereof.
[0777] 86. The engineered viral particle of any one of aspects 81-85, wherein the short synthetic polynucleotide
   [0778] a. is a sequence according to a sequence in SEQ ID NOS: 1-9890 or SEQ ID NOS: 9891-16277;
   [0779] b. is a synthetic in silico designed sequence;
   [0780] c. does not have 100 percent identity to a genome sequence, optionally a human genome, a non-human animal genome, a plant genome, a microbial genome, or a viral genome;
   [0781] d. is not native to a genome, optionally a human genome, a non-human animal genome, a plant genome, a microbial genome, or a viral genome; or
   [0782] e. any combination thereof.
[0783] 87. The engineered viral particle of any one of aspects 77-86, wherein the engineered viral particle is a viral particle, optionally a retroviral viral particle, lentiviral viral particle, adenoviral viral particle, or adeno-associated viral particle.
[0784] 88. A pan-genomic, optionally pan-viral genomic, engineered viral particle library comprising:
   [0785] a plurality of engineered viral particles of any one of aspects 81-87, wherein at least two test polynucleotides are different or the same or wherein each test polynucleotide of the at least two test polynucleotides is different, and
   [0786] wherein the test polynucleotides in each of the vectors of the plurality of vectors comprises or consists of a short synthetic polynucleotide.
[0787] 89. A method comprising:
   [0788] a. transducing one or more cells with one or more viral particles or a pan-viral engineered viral particle library as in any one of aspects 77-88 and allowing for genomic integration and expression of the optically active reporter construct in the one or more cells;
   [0789] b. selecting cells for genomic integration of the optically active reporter construct via sorting by detecting an optical signal produced from the first optically active protein and selecting cells that produce the optical signal from the second optically active protein;
   [0790] c. sorting selected cells from (b) into expression bins, wherein sorting selected cells from (b) comprises detecting an optical signal produced by the first optically active protein;
   [0791] d. sequencing one or more nucleic acids of the sorted selected cells by expression bin; and
   [0792] e. computing an expression score for each test polynucleotide by expression bin.
[0793] 90. The method of aspect 89, wherein sequencing comprises DNA sequencing, RNA sequencing, or both.
[0794] 91. The method of any one of aspects 89-90, wherein sequencing comprises genomic DNA sequencing.
[0795] 92. The method of any one of aspects 89-91, wherein sequencing comprises next generation sequencing or third generation sequencing.
[0796] 93. The method of any one of aspects 89-92, wherein sequencing comprises deep sequencing.
[0797] 94. The method of any one of aspects 89-93, wherein sequencing comprises single cell sequencing.
[0798] 95. A method of screening test agents and/or conditions comprising:
   [0799] a. transducing a first set of one or more cells with one or more viral particles or a pan-viral engineered viral particle library as in any one of aspects 77-88 and allowing for genomic integration and expression of the optically active reporter construct in the one or more cells;
   [0800] b. transducing a second set of the one or more cells with the one or more viral particles or a pan-viral engineered viral particle library as in any one of aspects 77-88 and allowing for genomic integration and expression of the optically active reporter construct in the one or more cells, wherein the second set of one or more cells comprises the same one or more cells as the first set of one or more cells, and wherein the one or more viral particles or the pan-viral engineered viral particle library used to transduce the second set of one or more cells is the same as the one or more viral particles or the pan-viral engineered viral particle library used to transduce the first set of one or more cells;
   [0801] c. exposing the second set of one or more cells to one or more test agents and/or conditions;
   [0802] d. selecting cells in each of the first set of one or more cells and second set of one or more cells for genomic integration of the optically active reporter construct via sorting by detecting an optical signal produced from the first optically active protein and selecting cells that produce the optical signal from the second optically active protein;
   [0803] e. sorting selected cells from (d) into expression bins, wherein sorting selected cells from (d) comprises detecting an optical signal produced by the first optically active protein;
   [0804] f. sequencing one or more nucleic acids of the sorted selected cells by expression bin; and;
   [0805] g. computing an expression score for each test polynucleotide by expression bin;
   [0806] h. comparing expression scores for each test polynucleotide between the first and second set of cells to determine an effect of the test agent and/or condition.
[0807] 96. The method of aspect 95, wherein the test agent or condition is a small molecule agent,
a biologic agent, a physical stress, a chemical stress, or any combination thereof.
[0808] 97. The method of any one of aspects 95-96, wherein sequencing comprises DNA sequencing, RNA sequencing, or both.
[0809] 98. The method of any one of aspects 95-97, wherein sequencing comprises genomic DNA sequencing.
[0810] 99. The method of any one of aspects 95-98, wherein sequencing comprises next generation sequencing or third generation sequencing.
[0811] 100. The method of any one of aspects 95-99, wherein sequencing comprises deep sequencing.
[0812] 101. The method of any one of aspects 95-100, wherein sequencing comprises single cell sequencing.

The application's sequence listing, which the Patent Office published only in electronic form, follows.

SEQUENCE LISTING (16316 sequences)

SEQ ID NO: 1 - DNA, 33 bp, synthetic construct
  source 1..33: mol_type = other DNA
  misc_feature 1..33: note = Synthetic
acgaataagatacaaacacaaatgtttatataa

SEQ ID NO: 2 - DNA, 51 bp, synthetic construct
  misc_feature 1..51: note = Synthetic
  source 1..51: mol_type = other DNA
gtgctcaaaatgctctttaaatacgactcggtccgcactagcctgaggtaa

SEQ ID NO: 3 - DNA, 189 bp, synthetic construct
  misc_feature 1..189: note = Synthetic
  source 1..189: mol_type = other DNA
attacttatagtacttcaagaatggaaagcgtgatattttctatcaatggggaaattatacaagtgaataaggaaattattacggcatctccgtataatttttttaaacgaattcaggatcaccatctaaaggatgaagcgattatattgaatggtataaacgactcggtccgcactagcctgaggtaa

SEQ ID NO: 4 - DNA, 189 bp, synthetic construct
  misc_feature 1..189: note = Synthetic
  source 1..189: mol_type = other DNA
attacttatagtacttcaagagccgaaagcgtgatattttctatcaatggggaaattatacaagtgaataaggaaattattacggcatctccgtataatttttttaaacgaattcaggatcaccatctaaaggatgaagcgattatattgaatggtataaacgactcggtccgcactagcctgaggtaa

SEQ ID NO: 5 - DNA, 168 bp, synthetic construct
  source 1..168: mol_type = other DNA
  misc_feature 1..168: note = Synthetic
atggaagacatcaatttttcatccttggctccgcgacacggcacgaagccgtacatgggcacctggagcgacatcggcacgagccaactgaacgggggcgccttcaattggagcagtatctggagcgggcttaaaaatttcgactcggtccgcactagcctgaggtaa

SEQ ID NO: 6 - DNA, 222 bp, synthetic construct
  source 1..222: mol_type = other DNA
  misc_feature 1..222: note = Synthetic
atgccccttggtcaaagtcaacgcctcaacactcctcctacttcagttgcaaccatgatggacgttacggaggtgtatgacgacccgatagaccctgttgagccagaaggagaatggaatagcagtcccgtagttccaaatattttgcggaactctgactacaacctgaactctcctttgctagaagaccccgccgactcggtccgcactagcctgaggtaa

SEQ ID NO: 7 - DNA, 222 bp, synthetic construct
  source 1..222: mol_type = other DNA
  misc_feature 1..222: note = Synthetic
atgccccttggtcaaagtcaacgcctcaacactcctcctacttcagttgcaaccgccatggacgttacggaggtgtatgacgacccgatagaccctgttgagccagaaggagaatggaatagcagtcccgtagttccaaatattttgcggaactctgactacaacctgaactctcctttgctagaagaccccgccgactcggtccgcactagcctgaggtaa

SEQ ID NO: 8 - DNA, 204 bp, synthetic construct
  source 1..204: mol_type = other DNA
  misc_feature 1..204: note = Synthetic
atggattcagacgatggtttttatgaatggttgaatggcgacggttcagtatttgctgcctcaaaacagcaaatgttgatgaatcacgttgctaactttgacgacgatcttctaactatggaagaagccatgtcgatgatttcgagacattgttgtatcttaatttatgcacaggacgactcggtccgcactagcctgaggtaa

SEQ ID NO: 9 - DNA, 204 bp, synthetic construct
  misc_feature 1..204: note = Synthetic
  source 1..204: mol_type = other DNA
atggattcagacgatggtttttatgaatggttgaatggtgatggttcagtatttgctgcctcaaaacagcaaatgttgatgaatcacgttgctaactttgacgatgatcttctaactatggaagaagccatgtcgatgatttcaagacattgttgtatcttaatttatgcacaggacgactcggtccgcactagcctgaggtaa

SEQ ID NO: 10 - DNA, 33 bp, synthetic construct
  misc_feature 1..33: note = Synthetic
  source 1..33: mol_type = other DNA
atcgcatccctgctctctgacctggatttgtag

SEQ ID NO: 11 - DNA, 168 bp, synthetic construct
  misc_feature 1..168: note = Synthetic
  source 1..168: mol_type = other DNA
atggcaaaggaactggcggcggtctatgccgatgtgtcagccctagccatggacctctgtcttcttagttacgcagacccggcaacactggacactaaaagtctggccctcactacagggaagtttcagagccttcacggcgactcggtccgcactagcctgaggtaa

SEQ ID NO: 12 - DNA, 162 bp, synthetic construct
  misc_feature 1..162: note = Synthetic
  source 1..162: mol_type = other DNA
aaggaactggcggcggtctatgccgatgtgtcagccctagccatggacctctgtcttcttagttacgcagacccggcaacactggacactaaaagtctggccctcactacagggaagtttcagagccttcacggcgactcggtccgcactagcctgaggtaa

SEQ ID NO: 13 - DNA, 21 bp, synthetic construct
  source 1..21: mol_type = other DNA
  misc_feature 1..21: note = Synthetic
ataaacaggatccactactaa

SEQ ID NO: 14 - DNA, 18 bp, synthetic construct
  misc_feature 1..18: note = Synthetic
  source 1..18: mol_type = other DNA
atggccgttcacacctaa

SEQ ID NO: 15 - DNA, 54 bp, synthetic construct
  source 1..54: mol_type = other DNA
  misc_feature 1..54: note = Synthetic
atgtacactacaaggaccccaagaaggctatgtcacttggtggagaatatatga

SEQ ID NO: 16 - DNA, 99 bp, synthetic construct
  misc_feature 1..99: note = Synthetic
  source 1..99: mol_type = other DNA
atgcaggctctaactattacctgcgaactgtttcgggattgcattttgcagacctctctgcctgcgatggttggagttccagacgatacgtcgaagtga

SEQ ID NO: 17 - DNA, 129 bp, synthetic construct
  misc_feature 1..129: note = Synthetic
  source 1..129: mol_type = other DNA
ttggagttccagacgatacgtcgaagtgaccaactaggcggaatcggtagtaagcgccgcctcttttcatctcactaccacaacgagcgaattaacccatcgttgagtcaacgactcggtccgcactag

SEQ ID NO: 18 - DNA, 15 bp, synthetic construct
  source 1..15: mol_type = other DNA
  misc_feature 1..15: note = Synthetic
atgtaccaggtgtga

SEQ ID NO: 19 - DNA, 36 bp, synthetic construct
  source 1..36: mol_type = other DNA
  misc_feature 1..36: note = Synthetic
atgtgtactgggatgggtcgccttggccaactctaa

SEQ ID NO: 20 - DNA, 102 bp, synthetic construct
  misc_feature 1..102: note = Synthetic
  source 1..102: mol_type = other DNA
acgagaaccttcatgcatttcctagaatatcatcgacggttgccaatgatgtcaggaaatattctgttgtgtcagtttataataaaaagtataacattgtaa

SEQ ID NO: 21 - DNA, 27 bp, synthetic construct
  source 1..27: mol_type = other DNA
  misc_feature 1..27: note = Synthetic
atgcgggcttgctgttctcatttctag

SEQ ID NO: 22 - DNA, 99 bp, synthetic construct
  misc_feature 1..99: note = Synthetic
  source 1..99: mol_type = other DNA
ataggttacatggggttaggcgggttcttcactggactttaccggatcatgaacaaacactctacgcatttacgggtgggtcaagatcaatggcggtga

SEQ ID NO: 23 - DNA, 45 bp, synthetic construct
  misc_feature 1..45: note = Synthetic
  source 1..45: mol_type = other DNA
atgggaacacaggtacgtgggaagtacattttgggaataatgtaa

SEQ ID NO: 24 - DNA, 150 bp, synthetic construct
  misc_feature 1..150: note = Synthetic
  source 1..150: mol_type = other DNA
atgtgcagtaccagtgacgacacggtatccgctactcagcttgttaaacagctacagcacaccccctcaccgtattccagcaccgtgtccgtgggcaccgcaaagacctacggccagacgtcggctgctacacgactcggtccgcactag

SEQ ID NO: 25 - DNA, 192 bp, synthetic construct
  misc_feature 1..192: note = Synthetic
  source 1..192: mol_type = other DNA
aagccctgtggatacctagtcaaaatgaagacactcatattcttctggaatttatggctttgggccctactggtatgtttttggtgtatcactcttgtctgtgtaactaccaactcaattgatacaatggcttctttgcttgttatgtgcattttgtttgtcagcgactcggtccgcactagcctgaggtaa

SEQ ID NO: 26 - DNA, 165 bp, synthetic construct
  source 1..165: mol_type = other DNA
  misc_feature 1..165: note = Synthetic
aagacactcatattcttctggaatttatggctttgggccctactggtatgtttttggtgtatcactcttgtctgtgtaactaccaactcaattgatacaatggcttctttgcttgttatgtgcattttgtttgtcagcgactcggtccgcactagcctgaggtaa

SEQ ID NO: 27 - DNA, 168 bp, synthetic construct
  source 1..168: mol_type = other DNA
  misc_feature 1..168: note = Synthetic
atggataacaatgttgaagacaataaaatcatggattcttgggaagaaagagcagagaatagatcagctgacatctcctcagcgctcgacattatcgaattcatactcaacaacgacacccaagaaaacgcaaatattgacgactcggtccgcactagcctgaggtaa

SEQ ID NO: 28 - DNA, 150 bp, synthetic construct
  source 1..150: mol_type = other DNA
  misc_feature 1..150: note = Synthetic
ttgaagacaataaaatcatggattcttgggaagaaagagcagagaatagatcagctgacatctcctcagcgctcgacattatcgaattcatactcaacaacgacacccaagaaaacgcaaatattgacgactcggtccgcactagcctga

SEQ ID NO: 29 - DNA, 15 bp, synthetic construct
  misc_feature 1..15: note = Synthetic
  source 1..15: mol_type = other DNA
gtgatcagccgataa

SEQ ID NO: 30 - DNA, 153 bp, synthetic construct
  source 1..153: mol_type = other DNA
  misc_feature 1..153: note = Synthetic
atgttgaagacaataaaatcatggattcttgggaagaaagagcagagaatagatcagctgacatctcctcagcgctcgacattatcgaattcatactcaacaacgacacccaagaaaacgcaaatattgacgactcggtccgcactagcctga

SEQ ID NO: 31 - DNA, 138 bp, synthetic construct
  source 1..138: mol_type = other DNA
  misc_feature 1..138: note = Synthetic
atggattcttgggaagaaagagcagagaatagatcagctgacatctcctcagcgctcgacattatcgaattcatactcaacaacgacacccaagaaaacgcaaatattgacgactcggtccgcactagcctgaggtaa

SEQ ID NO: 32 - DNA, 204 bp, synthetic construct
  misc_feature 1..204: note = Synthetic
  source 1..204: mol_type = other DNA
aagccttttataacacaactatttgaaagcatgaaacccaccacgagtctatataagaaattgatggctacccaaaaactgaccaccgaccgcattccatttctcgatatcttcgacgataggtacaacctagtcagacacgtcgaacgacaattaaactggtacgccgcatatgccgactcggtccgcactagcctgaggtaa

SEQ ID NO: 33 - DNA, 81 bp, synthetic construct
  source 1..81: mol_type = other DNA
  misc_feature 1..81: note = Synthetic
atactcaccaccggtggtatgaccgaagatacagacaatgatgatgatataatgagaatgaatgcactaggagggatatga

SEQ ID NO: 34 - DNA, 54 bp, synthetic construct
  misc_feature 1..54: note = Synthetic
  source 1..54: mol_type = other DNA
gtgactgagggcgctcgatttaactctagcgagatcgaacttaacggccaataa

SEQ ID NO: 35 - DNA, 168 bp, synthetic construct
  source 1..168: mol_type = other DNA
  misc_feature 1..168: note = Synthetic
atgatgctaacggacgcggccatgctcctgatctgcgtggccatcgtcgcgttgctactctacgccgtgtaccgccgcggccgcgagacgcagacgacgcccaagcgcaccgttgacgagctggtagagaacgacgcgatcgactcggtccgcactagcctgaggtaa

SEQ ID NO: 36 - DNA, 159 bp, synthetic construct
  misc_feature 1..159: note = Synthetic
  source 1..159: mol_type = other DNA
acggacgcggccatgctcctgatctgcgtggccatcgtcgcgttgctactctacgccgtgtaccgccgcggccgcgagacgcagacgacgcccaagcgcaccgttgacgagctggtagagaacgacgcgatcgactcggtccgcactagcctgaggtaa

SEQ ID NO: 37 - DNA, 201 bp, synthetic construct
  misc_feature 1..201: note = Synthetic
  source 1..201: mol_type = other DNA
atgtatccagcggcggcggcgcgcaacgaagctatgtccaagcgcaaaatcaaagaagagatgctccaggtcatcgcgccggagatctatggccccccgaagaaggaagagcaggattacaagccccgaaagctaaagcgggtcaaaaagaaaaagaaagatgatgatgatgacgactcggtccgcactagcctgaggtaa

SEQ ID NO: 38 - DNA, 201 bp, synthetic construct
  source 1..201: mol_type = other DNA
  misc_feature 1..201: note = Synthetic
atgtatccagcggcggcggcgcgcaacgaagctgcctccaagcgcaaaatcaaagaagagatgctccaggtcatcgcgccggagatctatggccccccgaagaaggaagagcaggattacaagccccgaaagctaaagcgggtcaaaaagaaaaagaaagatgatgatgatgacgactcggtccgcactagcctgaggtaa

SEQ ID NO: 39 - DNA, 168 bp, synthetic construct
  source 1..168: mol_type = other DNA
  misc_feature 1..168: note = Synthetic
atgtgggactcgtcatacatgcaacaagtgagtgagggactgatgactggaaaagttccaatagatcaagtgttcggcactaatcccttagaaaagttatataagagaagaaagccgaaagggacagtgggattacaatgcgactcggtccgcactagcctgaggtaa

SEQ ID NO: 40 - DNA, 180 bp, synthetic construct
  source 1..180: mol_type = other DNA
  misc_feature 1..180: note = Synthetic
ataaatcttacagcctgggactcgtcatacatgcaacaagtgagtgagggactgatgactggaaaagttccaatagatcaagtgttcggcactaatcccttagaaaagttatataagagaagaaagccgaaagggacagtgggattacaatgcgactcggtccgcactagcctgaggtaa

SEQ ID NO: 41 - DNA, 27 bp, synthetic construct
  misc_feature 1..27: note = Synthetic
  source 1..27: mol_type = other DNA
atgaacaaaaaggtgatgcattactaa

SEQ ID NO: 42 - DNA, 33 bp, synthetic construct
  source 1..33: mol_type = other DNA
  misc_feature 1..33: note = Synthetic
ctggccgacagggtggggaaggaggactgttag

SEQ ID NO: 43 - DNA, 168 bp, synthetic construct
  source 1..168: mol_type = other DNA
  misc_feature 1..168: note = Synthetic
atggattttacagacattgacgctgtcaactcactgattgagtcatcatcggcaattatagactccatacagcatggagggctgcaaccagcaggcactgttggcttatctcaaattccaaaagggataaccagtgcactcgactcggtccgcactagcctgaggtaa

SEQ ID NO: 44 - DNA, 168 bp, synthetic construct
  source 1..168: mol_type = other DNA
  misc_feature 1..168: note = Synthetic
atggctagccttcttaaaagcctcacactgttcaagaggactcgggaccaaccccctcttgcctctggctccgggggagcaataagaggaataaagcatgtcattatagtcctaatcccgggtgattcaagcattgttaccgactcggtccgcactagcctgaggtaa

SEQ ID NO: 45 - DNA, 141 bp, synthetic construct
  source 1..141: mol_type = other DNA
  misc_feature 1..141: note = Synthetic
ctgttcaagaggactcgggaccaaccccctcttgcctctggctccgggggagcaataagaggaataaagcatgtcattatagtcctaatcccgggtgattcaagcattgttaccgactcggtccgcactagcctgaggtaa

SEQ ID NO: 46 - DNA, 33 bp, synthetic construct
  source 1..33: mol_type = other DNA
  misc_feature 1..33: note = Synthetic
ctgaagatcacaaaaatagttctctcctcttag

SEQ ID NO: 47 - DNA, 30 bp, synthetic construct
  misc_feature 1..30: note = Synthetic
  source 1..30: mol_type = other DNA
ttggaaacgactcggtccgcactagcctga

SEQ ID NO: 48 - DNA, 168 bp, synthetic construct
  source 1..168: mol_type = other DNA
  misc_feature 1..168: note = Synthetic
atgcagcggattcgaccttactggataaaattcgagcaaaccggaggcgcggggatggccgatgggatgtccggaataaatatacccagcattttaggttgcagcgtaacgatcgacaacttactaacacgagccgaagacgactcggtccgcactagcctgaggtaa

SEQ ID NO: 49 - DNA, 168 bp, synthetic construct
  misc_feature 1..168: note = Synthetic
  source 1..168: mol_type = other DNA
atgggtaataaaaatatcaaaccatctaaggaaaatagactgtccatcttgtccaaggataagatggattcatttaagagaggatcttgggcaacatcatcctttagagaaaagtcacgtgcaaccatccaaagattttccgactcggtccgcactagcctgaggtaa

SEQ ID NO: 50 - DNA, 153 bp, synthetic construct
  source 1..153: mol_type = other DNA
  misc_feature 1..153: note = Synthetic
atcaaaccatctaaggaaaatagactgtccatcttgtccaaggataagatggattcatttaagagaggatcttgggcaacatcatcctttagagaaaagtcacgtgcaaccatccaaagattttccgactcggtccgcactagcctgaggtaa

SEQ ID NO: 51 - DNA, 147 bp, synthetic construct
  misc_feature 1..147: note = Synthetic
  source 1..147: mol_type = other DNA
ttgagagggaaaaaagcagacgaattagaaaaagttaggttacggcccggcggaaagaaaaagtacaggttaaaacatattgtgtgggcagcgaatgaattggataaattcggattggccgactcggtccgcactagcctgaggtaa

SEQ ID NO: 52 - DNA, 168 bp, synthetic construct
  misc_feature 1..168: note = Synthetic
  source 1..168: mol_type = other DNA
atggcgacttatatccagagggtacagtgcatatctgcattattgtcagttgtgctcacaacactggtctcgtgtcaaattcctagagataggctctctaatataggggtcatagtcgacgaagggaaatcactgaagatcgactcggtccgcactagcctgaggtaa

SEQ ID NO: 53 - DNA, 156 bp, synthetic construct
  misc_feature 1..156: note = Synthetic
  source 1..156: mol_type = other DNA
atccagagggtacagtgcatatctgcattattgtcagttgtgctcacaacactggtctcgtgtcaaattcctagagataggctctctaatataggggtcatagtcgacgaagggaaatcactgaagatcgactcggtccgcactagcctgaggtaa

SEQ ID NO: 54 - DNA, 96 bp, synthetic construct
  source 1..96: mol_type = other DNA
  misc_feature 1..96: note = Synthetic
ctggcgcccaatacgcaaaccgcctctccccgcgcgttggccgattcattaatgcagctggcacgacaggtttcccgactggaaagcgggcagtga

SEQ ID NO: 55 - DNA, 54 bp, synthetic construct
  misc_feature 1..54: note = Synthetic
  source 1..54: mol_type = other DNA
atgcttccggctcgtataatgtgtggaattgcgactcggtccgcactagcctga

SEQ ID NO: 56 - DNA, 84 bp, synthetic construct
  misc_feature 1..84: note = Synthetic
  source 1..84: mol_type = other DNA
acgcaaaccgcctctccccgcgcgttggccgattcattaatgcagctggcacgacaggtttcccgactggaaagcgggcagtga

SEQ ID NO: 57 - DNA, 159 bp, synthetic construct
  source 1..159: mol_type = other DNA
  misc_feature 1..159: note = Synthetic
ataaaccgtacctacgtgacctaccaacgtaggttttactcgatgaaaggtgaagcggagatcttgcaatctggtcgcgtaatcctctggacgacactgcggctttgtattctttatcgtcgtcgtcgttgccggcttcgcctcctcggaagcgcctag

SEQ ID NO: 58 - DNA, 90 bp, synthetic construct
  misc_feature 1..90: note = Synthetic
  source 1..90: mol_type = other DNA
atcgtcgtcgtcgttgccggcttcgcctcctcggaagcgcctagaaaaaagacgatcaggaccagagcgactcggtccgcactagcctga

SEQ ID NO: 59 - DNA, 117 bp, synthetic construct
  misc_feature 1..117: note = Synthetic
  source 1..117: mol_type = other DNA
atgaaaggtgacgcggagatcttgcaatctggtcgcgtaatcctctggacgacactgcggctttgtattctttatcgtcgtcgtcgttgccggcttcgcctcctcggaagcgcctag

SEQ ID NO: 60 - DNA, 159 bp, synthetic construct
  misc_feature 1..159: note = Synthetic
  source 1..159: mol_type = other DNA
ataaaccgtacctacgtgacctaccaacgtaggttttactcgatgaaaggtgtcgcggagatcttgcaatctggtcgcgtaatcctctggacgacactgcggctttgtattctttatcgtcgtcgtcgttgccggcttcgcctcctcggaagcgcctag

SEQ ID NO: 61 - DNA, 159 bp, synthetic construct
  source 1..159: mol_type = other DNA
  misc_feature 1..159: note = Synthetic
ataaaccgtacctacgtgacctaccaacgtaggttttactcgatgaaaggttacgcggagatcttgcaatctggtcgcgtaatcctctggacgacactgcggctttgtattctttatcgtcgtcgtcgttgccggcttcgcctcctcggaagcgcctag

SEQ ID NO: 62 - DNA, 117 bp, synthetic construct
  source 1..117: mol_type = other DNA
  misc_feature 1..117: note = Synthetic
atgaaatgtgacgcggagatcttgcaatctggtcgcgtaatcctctggacgacactgcggctttgtattctttatcgtcgtcgtcgttgccggcttcgcctcctcggaagcgcctag

SEQ ID NO: 63 - DNA, 159 bp, synthetic construct
  misc_feature 1..159: note = Synthetic
  source 1..159: mol_type = other DNA
ataaaccgtacctacgtgacctaccaacgtaggttttactcgatgaagggtgacgcggagatcttgcaatctggtcgcgtaatcctctggacgacactgcggctttgtattctttatcgtcgtcgtcgttgccggcttcgcctcctcggaagcgcctag

SEQ ID NO: 64 - DNA, 171 bp, synthetic construct
  misc_feature 1..171: note = Synthetic
  source 1..171: mol_type = other DNA
aagaccgtcgcaataaaccgtacctacgtgacctaccaacgtaggttttactcgatgagaggtgacgcggagatcttgcaatctggtcgcgtaatcctctggacgacactgcggctttgtattctttatcgtcgtcgtcgttgccggcttcgcctcctcggaagcgcctag

SEQ ID NO: 65 - DNA, 171 bp, synthetic construct
  source 1..171: mol_type = other DNA
  misc_feature 1..171: note = Synthetic
aagaccgtcgcaataaaccgtacctacgtgacctaccaacgtaggttttactcgatggaaggtgacgcggagatcttgcaatctggtcgcgtaatcctctggacgacactgcggctttgtattctttatcgtcgtcgtcgttgccggcttcgcctcctcggaagcgcctag

SEQ ID NO: 66 - DNA, 171 bp, synthetic construct
  source 1..171: mol_type = other DNA
  misc_feature 1..171: note = Synthetic
aagaccgtcgcaataaaccgtacctacgtgacctaccaacgtaggttttactcggccaaaggtgacgcggagatcttgcaatctggtcgcgtaatcctctggacgacactgcggctttgtattctttatcgtcgtcgtcgttgccggcttcgcctcctcggaagcgcctag

SEQ ID NO: 67 - DNA, 171 bp, synthetic construct
  misc_feature 1..171: note = Synthetic
  source 1..171: mol_type = other DNA
aagaccgtcgcaataaaccgtacctacgtgacctaccaacgtaggttttactcggtgaaaggtgacgcggagatcttgcaatctggtcgcgtaatcctctggacgacactgcggctttgtattctttatcgtcgtcgtcgttgccggcttcgcctcctcggaagcgcctag

SEQ ID NO: 68 - DNA, 171 bp, synthetic construct
  source 1..171: mol_type = other DNA
  misc_feature 1..171: note = Synthetic
aagaccgtcgcaataaaccgtacctacgtgacctaccaacgtaggttgtactcgatgaaaggtgacgcggagatcttgcaatctggtcgcgtaatcctctggacgacactgcggctttgtattctttatcgtcgtcgtcgttgccggcttcgcctcctcggaagcgcctag

SEQ ID NO: 69 - DNA, 159 bp, synthetic construct
  source 1..159: mol_type = other DNA
  misc_feature 1..159: note = Synthetic
ataaaccgtacctacgtgacctaccaacgtaggtttaactcgatgaaaggtgacgcggagatcttgcaatctggtcgcgtaatcctctggacgacactgcggctttgtattctttatcgtcgtcgtcgttgccggcttcgcctcctcggaagcgcctag

SEQ ID NO: 70 - DNA, 171 bp, synthetic construct
  misc_feature 1..171: note = Synthetic
  source 1..171: mol_type = other DNA
aagaccgtcgcaataaaccgtacctacgtgacctaccaacgtaggttttacgcgatgaaaggtgacgcggagatcttgcaatctggtcgcgtaatcctctggacgacactgcggctttgtattctttatcgtcgtcgtcgttgccggcttcgcctcctcggaagcgcctag

SEQ ID NO: 71 - DNA, 78 bp, synthetic construct
  source 1..78: mol_type = other DNA
  misc_feature 1..78: note = Synthetic
gtgactaaatccgagaatatgatagaaatgatgaaggaaagatcgactatcgactcggtccgcactagcctgaggtaa

SEQ ID NO: 72 - DNA, 144 bp, synthetic construct
  source 1..144: mol_type = other DNA
  misc_feature 1..144: note = Synthetic
aagttttttaaggggaaaaagctcaatattgtagcattacgatctctggaggattgtataaattacgtgactaaatccgagaatatgatagaaatgatgaaggaaagatcgactatcgactcggtccgcactagcctgaggtaa

SEQ ID NO: 73 - DNA, 201 bp, synthetic construct
  source 1..201: mol_type = other DNA
  misc_feature 1..201: note = Synthetic
attaagtcattggatcataccgttttcccctctctgttagatgaggatagtaaaataaagttttttaaggggaaaaagctcaatattgtagcattacgctctctggaggattgtataaattacgtgactaaatccgagaatatgatagaaatgatgaaggaaagatcgactatcgactcggtccgcactagcctgaggtaa

SEQ ID NO: 74 - DNA, 225 bp, synthetic construct
  source 1..225: mol_type = other DNA
  misc_feature 1..225: note = Synthetic
atagggtgtgaccgaaaacggtcagaccgaattcggttgtatataaacagaagcaggatgcacacaagggcagggatgtctgaggagaatccatgccctaggaacatctttttgctttgcaaagagtatggtttggagctagaggatttgcgattgctctgtgtatggtgcaaacggccgttatcagaggctgacatcgactcggtccgcactagcctgaggtaa

SEQ ID NO: 75 - DNA, 54 bp, synthetic construct
  source 1..54: mol_type = other DNA
  misc_feature 1..54: note = Synthetic
atatatctacacagtttggaaaataaaatatttctggtagatgattatccataa

SEQ ID NO: 76 - DNA, 39 bp, synthetic construct
  source 1..39: mol_type = other DNA
  misc_feature 1..39: note = Synthetic
attgtaatggttacgtcgactcggtccgcactagcctga

SEQ ID NO: 77 - DNA, 45 bp, synthetic construct
  source 1..45: mol_type = other DNA
  misc_feature 1..45: note = Synthetic
atcaaaataaaaagtctggagtctcacgctcgcttggtcctgtaa

SEQ ID NO: 78 - DNA, 168 bp, synthetic construct
  source 1..168: mol_type = other DNA
  misc_feature 1..168: note = Synthetic
atggaagacatcaactttgcgtctctggccccgcgacacggctcgcgcccgttcatgggaaactggcaagatatcggcaccagcaatatgagcggtggcgccttcagctggggctcgctgtggagcggcattaaaaatttcgactcggtccgcactagcctgaggtaa

SEQ ID NO: 79 - DNA, 159 bp, synthetic construct
  misc_feature 1..159: note = Synthetic
  source 1..159: mol_type = other DNA
atcaactttgcgtctctggccccgcgacacggctcgcgcccgttcatgggaaactggcaagatatcggcaccagcaatatgagcggtggcgccttcagctggggctcgctgtggagcggcattaaaaatttcgactcggtccgcactagcctgaggtaa

SEQ ID NO: 80 - DNA, 12 bp, synthetic construct
  misc_feature 1..12: note = Synthetic
  source 1..12: mol_type = other DNA
atgaaaaaataa

SEQ ID NO: 81 - DNA, 48 bp, synthetic construct
  source 1..48: mol_type = other DNA
  misc_feature 1..48: note = Synthetic
atgagccacaaccttcactgccccctgccattagttacttcaacctaa

SEQ ID NO: 82 - DNA, 168 bp, synthetic construct
  misc_feature 1..168: note = Synthetic
  source 1..168: mol_type = other DNA
atgactgacccaatcgccacatcatccaccgctgccaaggagctgctggacatggacggacgtgcctcagaacagcgactcatccaactacgcattcgtcagcagcaggaacgagcagtaaaagagctaagggatgccatcgactcggtccgcactagcctgaggtaa

SEQ ID NO: 83 - DNA, 117 bp, synthetic construct
  source 1..117: mol_type = other DNA
  misc_feature 1..117: note = Synthetic
atggacggacgtgcctcagaacagcgactcatccaactacgcattcgtcagcagcaggaacgagcagtaaaagagctaagggatgccatcgactcggtccgcactagcctgaggtaa

SEQ ID NO: 84 - DNA, 171 bp, synthetic construct
  source 1..171: mol_type = other DNA
  misc_feature 1..171: note = Synthetic
aagaccgtcgcaataaaccgtacctacgtgacctaccaacgtaggttttactggatgaaaggtgacgcggagatcttgcaatctggtcgcgtaatcctctggacgacactgcggctttgtattctttatcgtcgtcgtcgttgccggcttcgcctcctcggaagcgcctag

SEQ ID NO: 85 - DNA, 171 bp, synthetic construct
  source 1..171: mol_type = other DNA
  misc_feature 1..171: note = Synthetic
aagaccgtcgcaataaaccgtacctacgtgacctaccaacgtatgttttactcgatgaaaggtgacgcggagatcttgcaatctggtcgcgtaatcctctggacgacactgcggctttgtattctttatcgtcgtcgtcgttgccggcttcgcctcctcggaagcgcctag

SEQ ID NO: 86 - DNA, 171 bp, synthetic construct
  source 1..171: mol_type = other DNA
  misc_feature 1..171: note = Synthetic
aagaccgtcgcaataaaccgtacctacgtgacctaccaacgtgggttttactcgatgaaaggtgacgcggagatcttgcaatctggtcgcgtaatcctctggacgacactgcggctttgtattctttatcgtcgtcgtcgttgccggcttcgcctcctcggaagcgcctag

SEQ ID NO: 87 - DNA, 21 bp, synthetic construct
  misc_feature 1..21: note = Synthetic
  source 1..21: mol_type = other DNA
atgctgtaccactccggataa

SEQ ID NO: 88 - DNA, 30 bp, synthetic construct
  source 1..30: mol_type = other DNA
  misc_feature 1..30: note = Synthetic
attttgacgactcggtccgcactagcctga

SEQ ID NO: 89 - DNA, 21 bp, synthetic construct
  source 1..21: mol_type = other DNA
  misc_feature 1..21: note = Synthetic
atgcacaaagaagaattctag

SEQ ID NO: 90 - DNA, 27 bp, synthetic construct
  source 1..27: mol_type = other DNA
  misc_feature 1..27: note = Synthetic
atggcgactcggtccgcactagcctga

SEQ ID NO: 91 - DNA, 39 bp, synthetic construct
  source 1..39: mol_type = other DNA
  misc_feature 1..39: note = Synthetic
ttgcatcccttgctaccgactcggtccgcactagcctga

SEQ ID NO: 92 - DNA, 48 bp, synthetic construct
  source 1..48: mol_type = other DNA
  misc_feature 1..48: note = Synthetic
ttggatattaaaatcacgctttcgagtaaaaactacgaatataaatag

SEQ ID NO: 93 - DNA, 75 bp, synthetic construct
  misc_feature 1..75: note = Synthetic
  source 1..75: mol_type = other DNA
atgaagatcatattcacacttctgataaatctttgtcttgtagtgtatgcaacgactcggtccgcactagcctga

SEQ ID NO: 94 - DNA, 168 bp, synthetic construct
  misc_feature 1..168: note = Synthetic
  source 1..168: mol_type = other DNA
atggagaaaacgccggcggagacgacggcggtttcagctggcaacgtgccacgtgactcaattccgtgtataactaacgtgtccgcggacacccgcggccgtacccgccccagcagaccagccaccgtccctcagcgacgcgactcggtccgcactagcctgaggtaa

SEQ ID NO: 95 - DNA, 144 bp, synthetic construct
  misc_feature 1..144: note = Synthetic
  source 1..144: mol_type = other DNA
acggcggtttcagctggcaacgtgccacgtgactcaattccgtgtataactaacgtgtccgcggacacccgcggccgtacccgccccagcagaccagccaccgtccctcagcgacgcgactcggtccgcactagcctgaggtaa

SEQ ID NO: 96 - DNA, 171 bp, synthetic construct
  source 1..171: mol_type = other DNA
  misc_feature 1..171: note = Synthetic
aagaccgtcgcaataaaccgtacctacgtgacctaccaacgtaggttttactcgaagaaaggtgacgcggagatcttgcaatctggtcgcgtaatcctctggacgacactgcggctttgtattctttatcgtcgtcgtcgttgccggcttcgcctcctcggaagcgcctag

SEQ ID NO: 97 - DNA, 171 bp, synthetic construct
  source 1..171: mol_type = other DNA
  misc_feature 1..171: note = Synthetic
aagaccgtcgcaataaaccgtacctacgtgacctaccaacgtaggttttactcgatcaaaggtgacgcggagatcttgcaatctggtcgcgtaatcctctggacgacactgcggctttgtattctttatcgtcgtcgtcgttgccggcttcgcctcctcggaagcgcctag

SEQ ID NO: 98 - DNA, 171 bp, synthetic construct
  misc_feature 1..171: note = Synthetic
  source 1..171: mol_type = other DNA
aagaccgtcgcaataaaccgtacctacgtgacctaccaacgtaggttttactcgatgaaagctgacgcggagatcttgcaatctggtcgcgtaatcctctggacgacactgcggctttgtattctttatcgtcgtcgtcgttgccggcttcgcctcctcggaagcgcctag

SEQ ID NO: 99 - DNA, 159 bp, synthetic construct
  source 1..159: mol_type = other DNA
  misc_feature 1..159: note = Synthetic
ataaaccgtacctacgtgacctaccaacgtaggttttactcgatgaaaggcgacgcggagatcttgcaatctggtcgcgtaatcctctggacgacactgcggctttgtattctttatcgtcgtcgtcgttgccggcttcgcctcctcggaagcgcctag

SEQ ID NO: 100 - DNA, 36 bp, synthetic construct
  source 1..36: mol_type = other DNA
  misc_feature 1..36: note = Synthetic
atgcaaaaaaatatgaaaaaaagatgttttatataa

SEQ ID NO: 101 - DNA, 84 bp, synthetic construct
  misc_feature 1..84: note = Synthetic
  source 1..84: mol_type = other DNA
attttaaaaaactgtttaacaaggtccctattgttacagatggaagggtcaaacttaataaaggatatttgttcgactttgtga

SEQ ID NO: 102 - DNA, 57 bp, synthetic construct
  source 1..57: mol_type = other DNA
  misc_feature 1..57: note = Synthetic
attttaaaaaactgtttaacaaggttcctattgttacagatggaagggtcaaactga

SEQ ID NO: 103 - DNA, 141 bp, synthetic construct
  misc_feature 1..141: note = Synthetic
  source 1..141: mol_type = other DNA
atgaaattgtcgatattaaagaatttaaacccgaaaatgaattgcgtgactattttgaacaaattactggtggtagaactgttcctagaatcttttttgggaaaacttctattggtggatatagcgacctgttggaaatag

SEQ ID NO: 104 - DNA, 69 bp, synthetic construct
  source 1..69: mol_type = other DNA
  misc_feature 1..69: note = Synthetic
atggacgcattgggtgatattctatcatctattggggtattcgactcggtccgcactagcctgaggtaa

SEQ ID NO: 105 - DNA, 141 bp, synthetic construct
  misc_feature 1..141: note = Synthetic
  source 1..141: mol_type = other DNA
atgaaattgtcgatattaaagaatttagacctgaaaatgaattgcgtgactattttgaacaaattactggtggtagaactgttcctagaatcttttttgggaaaacttctatcggtggatatagcgacctgttggaaatag

SEQ ID NO: 106 - DNA, 126 bp, synthetic construct
  source 1..126: mol_type = other DNA
  misc_feature 1..126: note = Synthetic
atcttttttgggaaaacttctatcggtggatatagcgacctgttggaaatagacaacatggacgcattgggtgatattctatcatctattggggtattcgactcggtccgcactagcctgaggtaa

SEQ ID NO: 107 - DNA, 51 bp, synthetic construct
  misc_feature 1..51: note = Synthetic
  source 1..51: mol_type = other DNA
atgtcaataccgatgaggaatttgaagaggatactgctactgttcatatag

SEQ ID NO: 108 - DNA, 27 bp, synthetic construct
  source 1..27: mol_type = other DNA
  misc_feature 1..27: note = Synthetic
atgtgcgctaccagaaccattaattag

SEQ ID NO: 109 - DNA, 219 bp, synthetic construct
  misc_feature 1..219: note = Synthetic
  source 1..219: mol_type = other DNA
atagcgcctcattttgtgggtcaccatattcttgggaacaagatctacagcatggggcagaatctttccaccagcaatcctctgggattctttcccgaccaccagttggatccagccttcagagcaaacaccgcaaatccagattgggacttcaatcccaacaaggacacctggccagacgccaacaaggtcgactcggtccgcactagcctgaggtaa

SEQ ID NO: 110 - DNA, 45 bp, synthetic construct
  source 1..45: mol_type = other DNA
  misc_feature 1..45: note = Synthetic
atggttttagctcgactgaaagacatttcctcagggccccgctaa

SEQ ID NO: 111 - DNA, 168 bp, synthetic construct
  misc_feature 1..168: note = Synthetic
  source 1..168: mol_type = other DNA
atgattgattcctcagaggtgtatgatgaccctattgaccctgccgaaccggagtgtgaatggagcgggaacccagtgatccccaacattttgaggaactccgattataatctgaattccccattgctggaagatccaaccgactcggtccgcactagcctgaggtaa

SEQ ID NO: 112 - DNA, 156 bp, synthetic construct
  misc_feature 1..156: note = Synthetic
  source 1..156: mol_type = other DNA
attcccacgccttacatgtggagctaccagccccagatgggcctggccgccggcgccgcccaggactactccacccgcatgaattggctcagcgccgggcccgcgatgatctcacgggtgaatgacatcgactcggtccgcactagcctgaggtaa

SEQ ID NO: 113 - DNA, 36 bp, synthetic construct
  source 1..36: mol_type = other DNA
  misc_feature 1..36: note = Synthetic
atgtgtgagatgtgttgcacgcacagctgcgtatga

SEQ ID NO: 114 - DNA, 48 bp, synthetic construct
  source 1..48: mol_type = other DNA
  misc_feature 1..48: note = Synthetic
ttggatattaaaatcacgctttcgagtaaaaactacgaatataaataa

SEQ ID NO: 115 - DNA, 75 bp, synthetic construct
  source 1..75: mol_type = other DNA
  misc_feature 1..75: note = Synthetic
atgaagatcatattcacacttctgataaatctttgtcatgtagtgtatgcaacgactcggtccgcactagcctga

SEQ ID NO: 116 - DNA, 168 bp, synthetic construct
  misc_feature 1..168: note = Synthetic
  source 1..168: mol_type = other DNA
atggctagacgatttcgccggcacagaggaaagttcggatactacagacggggaagatggcactggagacacagactgcgacgaagacgctattcccggaggcgtaaacttcgatatgcgcgtagacgacccagtgctcgcgactcggtccgcactagcctgaggtaa

SEQ ID NO: 117 - DNA, 213 bp, synthetic construct
  source 1..213: mol_type = other DNA
  misc_feature 1..213: note = Synthetic
gtggatacctcagcatccaaaactctccttcccgaatggatcaggatgccttcttttttgagagggatcctgaagccgaaggagaggcaccacgaaaacaagaatcactctcagatgtcatcggactccttgacgtcgtcttatcctacaagcccacagaaattggagaagacagaagctggctccgactcggtccgcactagcctgaggtaa

SEQ ID NO: 118 - DNA, 213 bp, synthetic construct
  misc_feature 1..213: note = Synthetic
  source 1..213: mol_type = other DNA
gtggatacctcagcatccaaaactctccttcccgaatggatcagggccccttcttttttgagagggatcctgaagccgaaggagaggcaccacgaaaacaagaatcactctcagatgtcatcggactccttgacgtcgtcttatcctacaagcccacagaaattggagaagacagaagctggctccgactcggtccgcactagcctgaggtaa

SEQ ID NO: 119 - DNA, 141 bp, synthetic construct
  misc_feature 1..141: note = Synthetic
  source 1..141: mol_type = other DNA
ctgtggacagttatttttatattaataactcagggaaaacatcaaaacatagaaatttgtaaagaaaaaatatacacgataatagataacttaccttgtcctgcgtgtaaaatcgactcggtccgcactagcctgaggtaa

SEQ ID NO: 120 - DNA, 33 bp, synthetic construct
  source 1..33: mol_type = other DNA
  misc_feature 1..33: note = Synthetic
atgcaatccagcacaatcatcgaagaagcctga

SEQ ID NO: 121 - DNA, 33 bp, synthetic construct
  source 1..33: mol_type = other DNA
  misc_feature 1..33: note = Synthetic
acgttgaacttgacgcggtttcggaaagcctga

SEQ ID NO: 122 - DNA, 45 bp, synthetic construct
  misc_feature 1..45: note = Synthetic
  source 1..45: mol_type = other DNA
atgacgttcgtagacacgttgatcataaaacaccgtagaggctaa

SEQ ID NO: 123 - DNA, 39 bp, synthetic construct
  source 1..39: mol_type = other DNA
  misc_feature 1..39: note = Synthetic
atgagcacccgcgctctcatctcttcagacttgtcatga

SEQ ID NO: 124 - DNA, 45 bp, synthetic construct
  source 1..45: mol_type = other DNA
  misc_feature 1..45: note = Synthetic
atgacccccgctcagactaacggcactcgactcggtccgcactag

SEQ ID NO: 125 - DNA, 30 bp, synthetic construct
  misc_feature 1..30: note = Synthetic
  source 1..30: mol_type = other DNA
acgttgatcataaaacaccgtagaggctaa

SEQ ID NO: 126 - DNA, 45 bp, synthetic construct
  source 1..45: mol_type = other DNA
  misc_feature 1..45: note = Synthetic
atggttttcctaagccctccggtagagaagccaagaatgtcctga

SEQ ID NO: 127 - DNA, 27 bp, synthetic construct
  misc_feature 1..27: note = Synthetic
  source 1..27: mol_type = other DNA
atgaagggtaaagttaaacgatgctga

SEQ ID NO: 128 - DNA, 60 bp, synthetic construct
  misc_feature 1..60: note = Synthetic
  source 1..60: mol_type = other DNA
atgccttttaaggcctcttctttgggactacatttgtatttcattgagcaactcttttga

SEQ ID NO: 129 - DNA, 168 bp, synthetic construct
  misc_feature 1..168: note = Synthetic
  source 1..168: mol_type = other DNA
atgagcaaagagattcccacgccttacatgtggagctaccagccccagatgggcctggccgccggcgccgcccaggactactccacccgcatgaattggctcagcgccgggcccgcgatgatctcacgggtgaatgacatcgactcggtccgcactagcctgaggtaa

SEQ ID NO: 130 - DNA, 21 bp, synthetic construct
  misc_feature 1..21: note = Synthetic
  source 1..21: mol_type = other DNA
atggcagagactctctggtga

SEQ ID NO: 131 - DNA, 144 bp, synthetic construct
  misc_feature 1..144: note = Synthetic
  source 1..144: mol_type = other DNA
ctggtgaatccgggcccggccatggcaagccacaaggacgatgaagaaaagttttttcctcagagcggggttctcatctttgggaagcaaggctcagagaaaacaaatgtggacattgaaacgactcggtccgcactagcctga

SEQ ID NO: 132 - DNA, 132 bp, synthetic construct
  source 1..132: mol_type = other DNA
  misc_feature 1..132: note = Synthetic
atccgggcccggccatggcaagccacaaggacgatgaagaaaagttttttcctcagagcggggttctcatctttgggaagcaaggctcagagaaaacaaatgtggacattgaaacgactcggtccgcactag

SEQ ID NO: 133 - DNA, 168 bp, synthetic construct
  misc_feature 1..168: note = Synthetic
  source 1..168: mol_type = other DNA
atgttctacttaaaaaaactcctacgccagcttctggctccgttgtgtaaacatgggtcgtacacgcatttgcaattgtttgtgatgggtgaggcctgtgtgccaggaaagtgtgttcttacaatgtttttgacaaataacgactcggtccgcactagcctgaggtaa

SEQ ID NO: 134 - DNA, 177 bp, synthetic construct
  source 1..177: mol_type = other DNA
  misc_feature 1..177: note = Synthetic
atttttgttgccttctacttaaaaaaactcctacgccagcttctggctccgttgtgtaaacatgggtcgtacacgcatttgcaattgtttgtgatgggtgaggcctgtgtgccaggaaagtgtgttcttacaatgtttttgacaaataacgactcggtccgcactagcctgaggtaa

SEQ ID NO: 135 - DNA, 216 bp, synthetic construct
  misc_feature 1..216: note = Synthetic
  source 1..216: mol_type = other DNA
ttgtcatccggcttagagcaaaccgtccttttatcatcttccgtcgccatggctatgtacacatccgaatccgaacgcgactggcgtcgtgtaatccacgactcgcacggcctgtggtgcgattgcggcgactggcgagagcacctctattgtgtgtacgacagccattttcagcgacgacccacgaccgactcggtccgcactagcctgaggtaa

SEQ ID NO: 136 - DNA, 216 bp, synthetic construct
  source 1..216: mol_type = other DNA
  misc_feature 1..216: note = Synthetic
ttgtcatccggcttagagcaaaccgtccttttatcatcttccgtcgccgccgctatgtacacatccgaatccgaacgcgactggcgtcgtgtaatccacgactcgcacggcctgtggtgcgattgcggcgactggcgagagcacctctattgtgtgtacgacagccattttcagcgacgacccacgaccgactcggtccgcactagcctgaggtaa

SEQ ID NO: 137 - DNA, 177 bp, synthetic construct
  source 1..177: mol_type = other DNA
  misc_feature 1..177: note = Synthetic
atcgccagcatgagcaaggagattcccaccccctacatgtggagctatcagccccagatgggcctggccgcgggggccgcccaggactactccagcaagatgaactggctcagcgccggcccccacatgatctcacgagttaacggcatcgactcggtccgcactagcctgaggtaa

SEQ ID NO: 138 - DNA, 177 bp, synthetic construct
  source 1..177: mol_type = other DNA
  misc_feature 1..177: note = Synthetic
atcgccagcgccagcaaggagattcccaccccctacatgtggagctatcagccccagatgggcctggccgcgggggccgcccaggactactccagcaagatgaactggctcagcgccggcccccacatgatctcacgagttaacggcatcgactcggtccgcactagcctgaggtaa

SEQ ID NO: 139 - DNA, 114 bp, synthetic construct
  misc_feature 1..114: note = Synthetic
  source 1..114: mol_type = other DNA
atgggaatatatttggatttgtggtgtcccataccactagatttcctcgtcctatggaacgagaaggtgttgattaccattacgttaacagagaggcaatctggaagggaatag

SEQ ID NO: 140 - DNA, 114 bp, synthetic construct
  source 1..114: mol_type = other DNA
  misc_feature 1..114: note = Synthetic
atgggaatatatttggatttgtggtgtcccataccactagatttcctcgtcctatggaacgagaaggtgttgattaccattacgttaacagagaggccatctggaagggaatag

SEQ ID NO: 141 - DNA, 114 bp, synthetic construct
  source 1..114: mol_type = other DNA
  misc_feature 1..114: note = Synthetic
atgggaatatatttggatttgtggtgtcccataccactagatttcctcgtcctgccgaacgagaaggtgttgattaccattacgttaacagagaggcaatctggaagggaatag

SEQ ID NO: 142 - DNA, 114 bp, synthetic construct
  misc_feature 1..114: note = Synthetic
  source 1..114: mol_type = other DNA
atgggaatatatttggatttgtggtgtcccataccactagatttcctcgtcctgccgaacgagaaggtgttgattaccattacgttaacagagaggccatctggaagggaatag

SEQ ID NO: 143 - DNA, 84 bp, synthetic construct
  source 1..84: mol_type = other DNA
  misc_feature 1..84: note = Synthetic
acggggctgtacctaacatttgagacatctgcgcccttggtgttggtggataaaaaatatgcgactcggtccgcactagcctga

SEQ ID NO: 144 - DNA, 39 bp, synthetic construct
  source 1..39: mol_type = other DNA
  misc_feature 1..39: note = Synthetic
atgatgccttcaggaggatcaacaatcagtccgatttga

SEQ ID NO: 145 - DNA, 21 bp, synthetic construct
  source 1..21: mol_type = other DNA
  misc_feature 1..21: note = Synthetic
ataaaacaccgtagaggctaa

SEQ ID NO: 146 - DNA, 45 bp, synthetic construct
  source 1..45: mol_type = other DNA
  misc_feature 1..45: note = Synthetic
atgacgttcctagacacgttgatcataaaacaccgtagaggctaa

SEQ ID NO: 147 - DNA, 39 bp, synthetic construct
  source 1..39: mol_type = other DNA
  misc_feature 1..39: note = Synthetic
ataaaactgcatattatacactggttaacgcccttatag

SEQ ID NO: 148 - DNA, 159 bp, synthetic construct
  source 1..159: mol_type = other DNA
  misc_feature 1..159: note = Synthetic
atgaggtccctgattatagtccttctgttcccctctatcatctactccatgtctattagacaatgtgagaagactgaagaggaaacatggggattgaaaatagggttgtgtataattgccaaagatttctatcccgcgactcggtccgcactagcctga

SEQ ID NO: 149 - DNA, 45 bp, synthetic construct
  source 1..45: mol_type = other DNA
  misc_feature 1..45: note = Synthetic
atgacgttcggagacacgttgatcataaaacaccgtagaggctaa

SEQ ID NO: 150 - DNA, 45 bp, synthetic construct
  misc_feature 1..45: note = Synthetic
  source 1..45: mol_type = other DNA
atgacgttcgtcgacacgttgatcataaaacaccgtagaggctaa

SEQ ID NO: 151 - DNA, 183 bp, synthetic construct
  source 1..183: mol_type = other DNA
  misc_feature 1..183: note = Synthetic
gtgtcgaggtcgggaatgtcttcgtggcgactcaaaatgagcaagtgttcgggttccagcagcgtccagactctcgaagatctgcgcaatcgtcttcgctccgaggccttgggcagcgattgccaagagccccgcgacgacctcttccccaacggcgactcggtccgcactagcctgaggtaa

SEQ ID NO: 152 - DNA, 183 bp, synthetic construct
  misc_feature 1..183: note = Synthetic
  source 1..183: mol_type = other DNA
gtgtcgaggtcgggagcctcttcgtggcgactcaaaatgagcaagtgttcgggttccagcagcgtccagactctcgaagatctgcgcaatcgtcttcgctccgaggccttgggcagcgattgccaagagccccgcgacgacctcttccccaacggcgactcggtccgcactagcctgaggtaa

SEQ ID NO: 153 - DNA, 78 bp, synthetic construct
  misc_feature 1..78: note = Synthetic
  source 1..78: mol_type = other DNA
ttggctgggcctgaagtcctcattagaataataaaagaaccaatcagaagaacttcctcttttagagtatataagtaa

SEQ ID NO: 154 - DNA, 102 bp, synthetic construct
  source 1..102: mol_type = other DNA
  misc_feature 1..102: note = Synthetic
atggctgagtttatgccgctggtggtagacacgaacagagctgagtgtctaaccgcctgggcgggtgccggagctcctgcgactcggtccgcactagcctga

SEQ ID NO: 155 - DNA, 132 bp, synthetic construct
  misc_feature 1..132: note = Synthetic
  source 1..132: mol_type = other DNA
attgaagggatattcatggcctgtggattaaacgaacctgagtacctgtaccatcctttgctcagccctattaagctatacatcacaggcttaatgcgagacaacgactcggtccgcactagcctgaggtaa

SEQ ID NO: 156 - DNA, 90 bp, synthetic construct
  source 1..90: mol_type = other DNA
  misc_feature 1..90: note = Synthetic
atgtgccctggtgaccgtccacagccgacgaggacgttttgcctggagaggtgttggccattgaagggatattcatggcctgtggattaa

SEQ ID NO: 157 - DNA, 165 bp, synthetic construct
  misc_feature 1..165: note = Synthetic
  source 1..165: mol_type = other DNA
acggaaacaaaaattacattcgcgctcaagaaactaatcattgatagagaagtggtggctaacgttatcggactctctggagatagtgaacgcgtatcaatgactgaaaatgtagaagaagatctggttcgtaatctgggacttgtccgactcggtccgcactag

SEQ ID NO: 158 - DNA, 129 bp, synthetic construct
  misc_feature 1..129: note = Synthetic
  source 1..129: mol_type = other DNA
atcattgatagagaagtggtggctaacgttatcggactctctggagatagtgaacgtgtatcaatgactgaaaatgtagaagaagatttggctcgtaatttgggacttgttcgactcggtccgcactag

SEQ ID NO: 159 - DNA, 165 bp, synthetic construct
  misc_feature 1..165: note = Synthetic
  source 1..165: mol_type = other DNA
acggaaacaaaaattacattcgcactcaagaaactaatcattgatagagaagtggtggctaacgttatcggactctctggagatagtgaacgtgtatcaatgactgaaaatgtagaagaagatctggctcgtaatctgggacttgttcgactcggtccgcactag

SEQ ID NO: 160 - DNA, 165 bp, synthetic construct
  source 1..165: mol_type = other DNA
  misc_feature 1..165: note = Synthetic
acggaaacaaaaattacattcgcgctcaagaaactaatcattgatagagaagttgtggctaacgttatcggactctctggagatagtgaacgtgtatcaatgactgaaaatgtagaagaagatctggctcgtaatctgggacttgttcgactcggtccgcactag

SEQ ID NO: 161 - DNA, 222 bp, synthetic construct
  misc_feature 1..222: note = Synthetic
  source 1..222: mol_type = other DNA
atgaatgcacttagtccaggacctatcattgattaccacgtctggataggagattgtatctgtcaagttactgctgtggacgtacatggaaaggaaattatgagaatgagattcaaaaagggtgcggtgcttccgatcccaaatctggtaaaagttaaacttggggagaatgatacagaaaatctttcttctaccgactcggtccgcactagcctgaggtaa

SEQ ID NO: 162 - DNA, 162 bp, synthetic construct
  misc_feature 1..162: note = Synthetic
  source 1..162: mol_type = other DNA
ctgataccgtctcggaaagctcaaatcatgctgcctgatccggaagatccggaaagcaagaaagctacaaggagagcaggaaacctaattatctgcttcctattcatcttctttctgtttgtaaccttcattgttccaactctaagacacttgctgtcctaa

SEQ ID NO: 163 - DNA, 162 bp, synthetic construct
  source 1..162: mol_type = other DNA
  misc_feature 1..162: note = Synthetic
ctgataccgtctcggaaagctcaaatcgccctgcctgatccggaagatccggaaagcaagaaagctacaaggagagcaggaaacctaattatctgcttcctattcatcttctttctgtttgtaaccttcattgttccaactctaagacacttgctgtcctaa

SEQ ID NO: 164 - DNA, 132 bp, synthetic construct
  misc_feature 1..132: note = Synthetic
  source 1..132: mol_type = other DNA
atcattacagagactgtaaagaacagtgagaggatcgactccatagtggacaacattaatacagacgataacttgatttcgaaattacccatggagatacaacgcgaaatactttattactccattaaataa

SEQ ID NO: 165 - DNA, 156 bp, synthetic construct
  misc_feature 1..156: note = Synthetic
  source 1..156: mol_type = other DNA
atatacgaaacaccgataaattataaaaaaagcaatgtgtccgctgtttccgttaataatactattttcgtaactggcggattattcataaataactctaatagcacgatcgtggttaacaatatggacgactcggtccgcactagcctgaggtaa

SEQ ID NO: 166 - DNA, 168 bp, synthetic construct
  misc_feature 1..168: note = Synthetic
  source 1..168: mol_type = other DNA
atgggtatacagcacgaattcgacatcattattaatggagatatcgcgttgagaaatttacagttacataaaggggataactacggatgcaaactaaaaattatttcgaatgattacaagaaattaaagtttagattcatcgactcggtccgcactagcctgaggtaa

SEQ ID NO: 167 - DNA, 162 bp, synthetic construct
  misc_feature 1..162: note = Synthetic
  source 1..162: mol_type = other DNA
atacagcacgaattcgacatcattattaatggagatatcgcgttgagaaatttacagttacataaaggggataactacggatgcaaactaaaaattatttcgaatgattacaagaaattaaagtttagattcatcgactcggtccgcactagcctgaggtaa

SEQ ID NO: 168 - DNA, 18 bp, synthetic construct
  source 1..18: mol_type = other DNA
  misc_feature 1..18: note = Synthetic
atggagatatcgcgttga

SEQ ID NO: 169 - DNA, 21 bp, synthetic construct
  misc_feature 1..21: note = Synthetic
  source 1..21: mol_type = other DNA
atgcgacggcggccaacttag

SEQ ID NO: 170 - DNA, 84 bp, synthetic construct
  source 1..84: mol_type = other DNA
  misc_feature 1..84: note = Synthetic
atggctccggactcgtttatcgtgagcttcatgatttctacgggtatctgcagctggacctcgactcggtccgcactagcctga

SEQ ID NO: 171 - DNA, 156 bp, synthetic construct
  misc_feature 1..156: note = Synthetic
  source 1..156: mol_type = other DNA
acgacgtcactgggctgtggttggagagtgatctcaccgcggatgaggaagcttttgtcagcttttatacaagccgtacgggcacactcactctcgtacccggtggcaccggaggctactatctgctatggatcgactcggtccgcactagcctga

SEQ ID NO: 172 - DNA, 60 bp, synthetic construct
  misc_feature 1..60: note = Synthetic
  source 1..60: mol_type = other DNA
atgtctcactatcagaaaacggacgacgtcaccgaaagccgcctaatcatcatcaagtag

SEQ ID NO: 173 - DNA, 21 bp, synthetic construct
  source 1..21: mol_type = other DNA
  misc_feature 1..21: note = Synthetic
atggtgcctcccgacctatga

SEQ ID NO: 174 - DNA, 141 bp, synthetic construct
  misc_feature 1..141: note = Synthetic
  source 1..141: mol_type = other DNA
ataaatctccagtccgttctgcttatcttcgattcgccacagccaatcatctttgccagaccgcgctgggtaagcgttgacaggttgatgagtaaatcagtttcagcgcgatcaatttctcgctgtgttggcttgctgtag

SEQ ID NO: 175 - DNA, 198 bp, synthetic construct
  source 1..198: mol_type = other DNA
  misc_feature 1..198: note = Synthetic
atggaagactttgtgcgacagtgcttcaatccaatgattgtcgagcttgcggaaaagacaatgaaggaatatggggaagacccgaaaattgaaacaaataagttcgctgcaatatgcacacacttagaagtctgcttcatgtattcagacttccatttcattgacgaacgaggcgaatcacgactcggtccgcactag

SEQ ID NO: 176 - DNA, 165 bp, synthetic construct
  source 1..165: mol_type = other DNA
  misc_feature 1..165: note = Synthetic
atgattgtcgagcttgcggaaaagacaatgaaggaatatggggaagacccgaaaattgaaacaaataagttcgctgcaatatgcacacacttagaagtctgcttcatgtattcagacttccatttcattgacgaacgaggcgaatcacgactcggtccgcactag

SEQ ID NO: 177 - DNA, 198 bp, synthetic construct
  misc_feature 1..198: note = Synthetic
  source 1..198: mol_type = other DNA
atgtggggtctactagctattgctgttttgatcagctcctgtttggccatcaaaaatgtatatgacatgaagatagagtgcccgcattctgttaacttcggagaaaccagtgtgtcaggccaggtagagttacctccactcccgattactgatgcagaacaattggtccctgagacgactcggtccgcactagcctga

SEQ ID NO: 178 - DNA, 45 bp, synthetic construct
  source 1..45: mol_type = other DNA
  misc_feature 1..45: note = Synthetic
ctgatgcagaacaattggtccctgagacgactcggtccgcactag

SEQ ID NO: 179 - DNA, 171 bp, synthetic construct
  source 1..171: mol_type = other DNA
  misc_feature 1..171: note = Synthetic
ttgatcagctcctgtttggccatcaaaaatgtatatgacatgaagatagagtgcccgcattctgttaacttcggagaaaccagtgtgtcaggccaggtagagttacctccactcccgattactgatgcagaacaattggtccctgagacgactcggtccgcactagcctga

SEQ ID NO: 180 - DNA, 21 bp, synthetic construct
  misc_feature 1..21: note = Synthetic
  source 1..21: mol_type = other DNA
atgaagtttggggagatttaa

SEQ ID NO: 181 - DNA, 45 bp, synthetic construct
  source 1..45: mol_type = other DNA
  misc_feature 1..45: note = Synthetic
atgtatagaatctgtaacactttcatccgactcggtccgcactag

SEQ ID NO: 182 - DNA, 21 bp, synthetic construct
  misc_feature 1..21: note = Synthetic
  source 1..21: mol_type = other DNA
atgaatatcctggggtcgtaa

SEQ ID NO: 183 - DNA, 90 bp, synthetic construct
  source 1..90: mol_type = other DNA
  misc_feature 1..90: note = Synthetic
atgtctggattatatcaaccatcacttacaagactgcggtgcgacatgcagcactgcaccagagatccgactcggtccgcactagcctga

SEQ ID NO: 184 - DNA, 168 bp, synthetic construct
  misc_feature 1..168: note = Synthetic
  source 1..168: mol_type = other DNA
atggcgtggtcaattacaaataaagcggatactagtagcttcacaaagatggctgaaatcagagctcatctaaaaaatagcgctgaaaataaagataaaaacgaggatattttcccggaagatgtaataattccatctaccgactcggtccgcactagcctgaggtaa

SEQ ID NO: 185 - DNA, 168 bp, synthetic construct
  misc_feature 1..168: note = Synthetic
  source 1..168: mol_type = other DNA
atggcgtggtcaattacgaataaagcggatactagtagtttcacaaagatggctgaaatcagagcccatctaagaaatagcgctgaaaataaagataaaaacgaggatattttcccggaagatgtaataattccgtctaccgactcggtccgcactagcctgaggtaa

SEQ ID NO: 186 - DNA, 168 bp, synthetic construct
  misc_feature 1..168: note = Synthetic
  source 1..168: mol_type = other DNA
atggcgtggtcaattacgaataaagcggatactagtagtttcacaaagatggctgaaatcagagctcatctaagaaatagcgctgaaaataaagataaaaacgaggatattttcccggaagatgtaataattccatctaccgactcggtccgcactagcctgaggtaa

SEQ ID NO: 187 - DNA, 51 bp, synthetic construct
  source 1..51: mol_type = other DNA
  misc_feature 1..51: note = Synthetic
ataatcataaattatttcattatcgcgatatccgttaagtttgtatcgtag

SEQ ID NO: 188 - DNA, 156 bp, synthetic construct
  misc_feature 1..156: note = Synthetic
  source 1..156: mol_type = other DNA
attacgaataaagcggatactagtagtttcacaaagatggctgaaatcagagcccatctaagaaatagcgctgaaaataaagataaaaacgaggatattttcccggaagatgtaataattccgtctaccgactcggtccgcactagcctgaggtaa

SEQ ID NO: 189 - DNA, 156 bp, synthetic construct
  misc_feature 1..156: note = Synthetic
  source 1..156: mol_type = other DNA
attacgaataaagcggatactagtagtttcacaaagatggctgaaatcagagctcatctaagaaatagcgctgaaaataaagataaaaacgaggatattttcccggaagatgtaataattccatctaccgactcggtccgcactagcctgaggtaa

SEQ ID NO: 190 - DNA, 168 bp, synthetic construct
  source 1..168: mol_type = other DNA
  misc_feature 1..168: note = Synthetic
atggcgtggtcaattacgaataaagcggatactagtagtttcacaaagatggctgaaattagagctcatctaagaaatagcgctgaaaataaagataaaaacgatgatattttcccggaagatgtaataattccatctaccgactcggtccgcactagcctgaggtaa

SEQ ID NO: 191 - DNA, 156 bp, synthetic construct
  source 1..156: mol_type = other DNA
  misc_feature 1..156: note = Synthetic
attacgaataaagcggatactagtagtttcacaaagatggctgaaattagagctcatctaagaaatagcgctgaaaataaagataaaaacgatgatattttcccggaagatgtaataattccatctaccgactcggtccgcactagcctgaggtaa

SEQ ID NO: 192 - DNA, 30 bp, synthetic construct
  source 1..30: mol_type = other DNA
  misc_feature 1..30: note = Synthetic
ctgttcacaacattctgccacatgacctaa

SEQ ID NO: 193 - DNA, 15 bp, synthetic construct
  misc_feature 1..15: note = Synthetic
  source 1..15: mol_type = other DNA
ctgggaccactatga

SEQ ID NO: 194 - DNA, 18 bp, synthetic construct
  source 1..18: mol_type = other DNA
  misc_feature 1..18: note = Synthetic
atgaaaactgggcaataa

SEQ ID NO: 195 - DNA, 168 bp, synthetic construct
  misc_feature 1..168: note = Synthetic
  source 1..168: mol_type = other DNA
atgcagatgccctccacccagacctccaaaccaccccaattgtcacagacaccagtatcagcagcagtggtggtgaaagctctgaagaactcagtgaaagcagcttttttaacctcatcaccccaggcgcctggaacactcgactcggtccgcactagcctgaggtaa

SEQ ID NO: 196 - DNA, 162 bp, synthetic construct
  misc_feature 1..162: note = Synthetic
  source 1..162: mol_type = other DNA
atgccctccacccagacctccaaaccaccccaattgtcacagacaccagtatcagcagcagtggtggtgaaagctctgaagaactcagtgaaagcagcttttttaacctcatcaccccaggcgcctggaacactcgactcggtccgcactagcctgaggtaa

SEQ ID NO: 197 - DNA, 168 bp, synthetic construct
  source 1..168: mol_type = other DNA
  misc_feature 1..168: note = Synthetic
atgctgtcggtgatggtctcttcctctctggtcctgatcgtcttttttctaggcgcttccgaggaggcgaagccggcaacgacgacgacgataaagaatacaaagccgcagtgtcgtccagaggattacgcgaccagattcgactcggtccgcactagcctgaggtaa

SEQ ID NO: 198 - DNA, 87 bp, synthetic construct
  source 1..87: mol_type = other DNA
  misc_feature 1..87: note = Synthetic
acgacgacgataaagaatacaaagccgcagtgtcgtccagaggattacgcgaccagattcgactcggtccgcactagcctgaggtaa

SEQ ID NO: 199 - DNA, 33 bp, synthetic construct
  source 1..33: mol_type = other DNA
  misc_feature 1..33: note = Synthetic
atgaacatcggaaatatagaatatacttcataa

SEQ ID NO: 200 - DNA, 39 bp, synthetic construct
  source 1..39: mol_type = other DNA
  misc_feature 1..39: note = Synthetic
ttgcttcctgtgcctattgcgagaaactggttcgattga

SEQ ID NO: 201 - DNA, 75 bp, synthetic construct
  source 1..75: mol_type = other DNA
  misc_feature 1..75: note = Synthetic
ctggttcgattgaccgtcctcgcggatcacagcgccattagacagctggaggcgactcggtccgcactagcctga

SEQ ID NO: 202 - DNA, 108 bp, synthetic construct
  misc_feature 1..108: note = Synthetic
  source 1..108: mol_type = other DNA
atgaatttccgatactcgttccatgactccaggtccgtgctttacagagttatgaaagaaagtcgagtggcaaggaatagggctatggaacccatcctgtgtctatag

SEQ ID NO: 203 - DNA, 141 bp, synthetic construct
  misc_feature 1..141: note = Synthetic
  source 1..141: mol_type = other DNA
atgccttgcatccatccatcacgccaacgcccggttaccgcggaacaaccttcaaacccagccgcactcgctccacccgccgtcgtcgctctgtccgccgccgctcaaggcgcacggcccccatctctgtgcgtcgcgtaa

SEQ ID NO: 204 - DNA, 168 bp, synthetic construct
  source 1..168: mol_type = other DNA
  misc_feature 1..168: note = Synthetic
atgcttcacatctcgcgactcggcctttttctggcccttttcgcgatagtcatgcactccgttaatctaataaaatacacatctgatcccttagaagctttcaaaaccgtcaaccgccacaattggagcgacgaacaaagcgactcggtccgcactagcctgaggtaa

SEQ ID NO: 205 - DNA, 186 bp, synthetic construct
  misc_feature 1..186: note = Synthetic
  source 1..186: mol_type = other DNA
gtggtcaactcacccgacgcccttcacatctcgcgactcggcctttttctggcccttttcgcgatagtcatgcactccgttaatctaataaaatacacatctgatcccttagaagctttcaaaaccgtcaaccgccacaattggagcgacgaacaaagcgactcggtccgcactagcctgaggtaa

SEQ ID NO: 206 - DNA, 21 bp, synthetic construct
  source 1..21: mol_type = other DNA
  misc_feature 1..21: note = Synthetic
atggcgttcaatctacaatag

SEQ ID NO: 207 - DNA, 186 bp, synthetic construct
  source 1..186: mol_type = other DNA
  misc_feature 1..186: note = Synthetic
gtgggaaataaaatttgcatgtcacgaggcagaagctggtcagacgcgtactccatgttgggttccacggggaggggaacacacgccccaagacacgacggcgcacatagggagcggagcaaacaattgattcaaatatttgactccgcagcgagccgcgactcggtccgcactagcctgaggtaa

SEQ ID NO: 208 - DNA, 48 bp, synthetic construct
  source 1..48: mol_type = other DNA
  misc_feature 1..48: note = Synthetic
acgccccaagacacgacggcgcacatagggagcggagcaaacaattga

SEQ ID NO: 209 - DNA, 21 bp, synthetic construct
  misc_feature 1..21: note = Synthetic
  source 1..21: mol_type = other DNA
atgtccaggctgaaagcataa

SEQ ID NO: 210 - DNA, 102 bp, synthetic construct
  misc_feature 1..102: note = Synthetic
  source 1..102: mol_type = other DNA
atgcaagacttggagccatcaagggacaagatatgtcttgaagtccagataacaaccaagcaccttggccaagagctactaaccctatctcatagatcataa

SEQ ID NO: 211 - DNA, 39 bp, synthetic construct
  source 1..39: mol_type = other DNA
  misc_feature 1..39: note = Synthetic
ataaagtcaccattctcgactcggtccgcactagcctga

SEQ ID NO: 212 - DNA, 168 bp, synthetic construct
  source 1..168: mol_type = other DNA
  misc_feature 1..168: note = Synthetic
atgttctacttaaaaaaactcctacgccagcttctggccccgttgtgtaaacatgggccgtacactcatttgcaattgtttgtgatgggtgacgcctgtgtgccaggaaaatgtgttcttacaatgttcttgacaaataacgactcggtccgcactagcctgaggtaa

SEQ ID NO: 213 - DNA, 45 bp, synthetic construct
  misc_feature 1..45: note = Synthetic
  source 1..45: mol_type = other DNA
atcggggttttggtgatcaacaatttgtgcaatctgatactttaa

SEQ ID NO: 214 - DNA, 141 bp, synthetic construct
  source 1..141: mol_type = other DNA
  misc_feature 1..141: note = Synthetic
atcaagatagctccaggaatagcagatatacgagacaaatatatggaattaggttttaattatcctgaatataatagagctgttaagtttgctgaagaaagttatatgtattacgactcggtccgcactagcctgaggtaa

SEQ ID NO: 215 - DNA, 33 bp, synthetic construct
  misc_feature 1..33: note = Synthetic
  source 1..33: mol_type = other DNA
attattaagagccggggcagctgttactcttaa

SEQ ID NO: 216 - DNA, 141 bp, synthetic construct
  misc_feature 1..141: note = Synthetic
  source 1..141: mol_type = other DNA
atcaaaatagcaccaggaatagcagatatacgagacaaatatatggaattaggttttaattatcctgaatataatagagctgttaagtttgcagaagaaagttatacgtactacgactcggtccgcactagcctgaggtaa

SEQ ID NO: 217 - DNA, 99 bp, synthetic construct
  misc_feature 1..99: note = Synthetic
  source 1..99: mol_type = other DNA
atgattatgctctatatattgatctttttgactatcctcactctgcagctatcttggcagagagtgttcagatgcacgactcggtccgcactagcctga

SEQ ID NO: 218 - DNA, 168 bp, synthetic construct
  misc_feature 1..168: note = Synthetic
  source 1..168: mol_type = other DNA
atgcttcagcgacgcggtgtaagctaccacattgtggtccctggggtcctagtgacttatttagaggacttttctattacgcaaatgattaaagaaaaactaccacgctttatcactcacattttggaaggcatcaccggcgactcggtccgcactagcctgaggtaa

SEQ ID NO: 219 - DNA, 84 bp, synthetic construct
  source 1..84: mol_type = other DNA
  misc_feature 1..84: note = Synthetic
atgattaaagaaaaactaccacgctttatcactcacattttggaaggcatcaccggcgactcggtccgcactagcctgaggtaa

SEQ ID NO: 220 - DNA, 168 bp, synthetic construct
  misc_feature 1..168: note = Synthetic
  source 1..168: mol_type = other DNA
atgcttcagcgacgcggtgtaagctaccacattgtggtccctggggtcctagtgacgtatttacaggatttttctattactaaaatgattaaagaaaaactacctggctttatcacttacattttggaaggcattaccggcgactcggtccgcactagcctgaggtaa

SEQ ID NO: 221 - DNA, 135 bp, synthetic construct
  source 1..135: mol_type = other DNA
  misc_feature 1..135: note = Synthetic
gtggtccctggggtcctagtgacgtatttacaggatttttctattactaaaatgattaaagaaaaactacctggctttatcacttacattttggaaggcattaccggcgactcggtccgcactagcctgaggtaa

SEQ ID NO: 222 - DNA, 90 bp, synthetic construct
  misc_feature 1..90: note = Synthetic
  source 1..90: mol_type = other DNA
atgagcgagccagagaatgggaagcgcagactactcaaacagcttcgcatcaagcgcatccccgactcggtccgcactagcctgaggtaa

SEQ ID NO: 223 - DNA, 96 bp, synthetic construct
  source 1..96: mol_type = other DNA
  misc_feature 1..96: note = Synthetic
atgaagccagggtcgcaatggcgatgcatgccaagatcccactcaatcaaccccagaatcaggacactgcacaacttcaaccatttccccttgtga

SEQ ID NO: 224 - DNA, 96 bp, synthetic construct
  source 1..96: mol_type = other DNA
  misc_feature 1..96: note = Synthetic
atgaagccagggtcgcagccgcgatgcatgccaagatcccactcaatcaaccccagaatcaggacactgcacaacttcaaccatttccccttgtga

SEQ ID NO: 225 - DNA, 168 bp, synthetic construct
  misc_feature 1..168: note = Synthetic
  source 1..168: mol_type = other DNA
atgactgaaacactcaccacctccaattccgccgaggatctgctcgatatggacggccgcgtctcagaacagcgactcgcccaactacgcatccgccagcagcaggaacgcgcggccaaagagctcagagatgtcatccacgactcggtccgcactagcctgaggtaa

SEQ ID NO: 226 - DNA, 33 bp, synthetic construct
  source 1..33: mol_type = other DNA
  misc_feature 1..33: note = Synthetic
atgtcatccacgactcggtccgcactagcctga

SEQ ID NO: 227 - DNA, 129 bp, synthetic construct
  misc_feature 1..129: note = Synthetic
  source 1..129: mol_type = other DNA
ctgctcgatatggacggccgcgtctcagaacagcgactcgcccaactacgcatccgccagcagcaggaacgcgcggccaaagagctcagagatgtcatccacgactcggtccgcactagcctgaggtaa

SEQ ID NO: 228 - DNA, 102 bp, synthetic construct
  misc_feature 1..102: note = Synthetic
  source 1..102: mol_type = other DNA
aaggccatggcaccgagcgttggttttcttgtattccccttagtatgcagcgcgcggcgatgtatgaggaaggtcctcctccctcctacgagagcgtggtga

SEQ ID NO: 229 - DNA, 102 bp, synthetic construct
  source 1..102: mol_type = other DNA
  misc_feature 1..102: note = Synthetic
aaggccatggcaccgagcgttggttttcttgtattccccttagtgcccagcgcgcggcgatgtatgaggaaggtcctcctccctcctacgagagcgtggtga

SEQ ID NO: 230 - DNA, 27 bp, synthetic construct
  misc_feature 1..27: note = Synthetic
  source 1..27: mol_type = other DNA
aagagccggggcagctgttactcttaa

SEQ ID NO: 231 - DNA, 135 bp, synthetic construct
  misc_feature 1..135: note = Synthetic
  source 1..135: mol_type = other DNA
atagagacaggaatagcagatatacgagacaaatatatggtattagattttaattatcctgaatataatagagctgttaggtttgccgaagaaagttatatgtattacgactcggtccgcactagcctgaggtaa

SEQ ID NO: 232 - DNA, 168 bp, synthetic construct
  misc_feature 1..168: note = Synthetic
  source 1..168: mol_type = other DNA
atgggggcagccgttactcttaatagaatcaacatagcatcaggaatagcagatatacgagacaaatatatggaattaggttttaattatcctaaatataatagaactgttaagtttgccgaagaaagttatatgtattacgactcggtccgcactagcctgaggtaa

SEQ ID NO: 233 - DNA, 168 bp, synthetic construct
  source 1..168: mol_type = other DNA
  misc_feature 1..168: note = Synthetic
atgggggcagccgttactcttaatagaatcaagatagctccaggaatagcagatatacgagacaaatatatggaattaggttttaattatcctgaatataatagagctgttaagtttgctgaagaaagttatatgtattacgactcggtccgcactagcctgaggtaa

SEQ ID NO: 234 - DNA, 168 bp, synthetic construct
  misc_feature 1..168: note = Synthetic
  source 1..168: mol_type = other DNA
atgggggcagctgttactcttaatagaatcaaaatagcaccaggaatagcagatatacgagacaaatatatggaattaggttttaattatcctgaatataatagagctgttaagtttgcagaagaaagttatacgtactacgactcggtccgcactagcctgaggtaa

SEQ ID NO: 235 - DNA, 141 bp, synthetic construct
  misc_feature 1..141: note = Synthetic
  source 1..141: mol_type = other DNA
atcaacatagcatcaggaatagcagatatacgagacaaatatatggaattaggttttaattatcctaaatataatagaactgttaagtttgccgaagaaagttatatgtattacgactcggtccgcactagcctgaggtaa

SEQ ID NO: 236 - DNA, 168 bp, synthetic construct
  source 1..168: mol_type = other DNA
  misc_feature 1..168: note = Synthetic
atgttcccataccctacacttaactacccgcctatggcgccgattaacccgatggcttaccgggatcctaatccgcctaggcgcaggtggcggccctttaggccaccacttgcagctcaaattgaggacctgagacgttccgactcggtccgcactagcctgaggtaa

SEQ ID NO: 237 - DNA, 108 bp, synthetic construct
  source 1..108: mol_type = other DNA
  misc_feature 1..108: note = Synthetic
attctgccgaaagaacaaaaattaatagaaattctgactacattatcgttaatggaaaaaagaaaatcagtagtgatctccgactcggtccgcactagcctgaggtaa

SEQ ID NO: 238 - DNA, 180 bp, synthetic construct
  source 1..180: mol_type = other DNA
  misc_feature 1..180: note = Synthetic
aggtattccacaatgtctagtctattgaggtcacttgctgcatttaagagacatagggagcaaccaacagcaccgtcaggttcgggtggtgcaattaaaggattgaaaaatacaattattgttccagttccaggggatacagtaattactaccgactcggtccgcactagcctgaggtaa

SEQ ID NO: 239 - DNA, 156 bp, synthetic construct
  source 1..156: mol_type = other DNA
  misc_feature 1..156: note = Synthetic
ttgaggtcacttgctgcatttaagagacatagggagcaaccaacagcaccgtcaggttcgggtggtgcaattaaaggattgaaaaatacaattattgttccagttccaggggatacagtaattactaccgactcggtccgcactagcctgaggtaa

SEQ ID NO: 240 - DNA, 21 bp, synthetic construct
  misc_feature 1..21: note = Synthetic
  source 1..21: mol_type = other DNA
atggtctcacaaaaatattaa

SEQ ID NO: 241 - DNA, 33 bp, synthetic construct
  misc_feature 1..33: note = Synthetic
  source 1..33: mol_type = other DNA
atctcaacaaaatctagacaatatggcccttaa

SEQ ID NO: 242 - DNA, 180 bp, synthetic construct
  misc_feature 1..180: note = Synthetic
  source 1..180: mol_type = other DNA
atggcccttaaggatctcatgtcgagtgttgaaaaagatatgcgccaacttcaggccgaaacaaacgatctggtgacgaacgtatatgatgcaagggagtatacgcgtagggcaatagatcaaattctacaactagtcaaaggttttgaacgattcccgactcggtccgcactagcctga

SEQ ID NO: 243 - DNA, 123 bp, synthetic construct
  source 1..123: mol_type = other DNA
  misc_feature 1..123: note = Synthetic
atgcattgcctgctctgccgcttcacgcagtgcctgagagttaatttcgctcacttcgaacctctctgtttactgataagttccagatcctcctggcaacttgcacaagtccgacaaccctga

SEQ ID NO: 244 - DNA, 60 bp, synthetic construct
  source 1..60: mol_type = other DNA
  misc_feature 1..60: note = Synthetic
atctatcggatcgccacactcacaacaatgagtggcagatatcgactcggtccgcactag

SEQ ID NO: 245 - DNA, 168 bp, synthetic construct
  misc_feature 1..168: note = Synthetic
  source 1..168: mol_type = other DNA
atgttaaacaggatacaaaccttgatgaaaacagctaacaattatgaaactattgagatattgcgtaattatttaagactgtatatcattttggcacgaaatgaagaaggtcgtggtatactaatatacgatgataacatcgactcggtccgcactagcctgaggtaa

SEQ ID NO: 246 - DNA, 24 bp, synthetic construct
  misc_feature 1..24: note = Synthetic
  source 1..24: mol_type = other DNA
atgaagaaggtcgtggtatactaa

SEQ ID NO: 247 - DNA, 171 bp, synthetic construct
  source 1..171: mol_type = other DNA
  misc_feature 1..171: note = Synthetic
atcgccttaaacaggatacaaaccttgatgaaaacagctaacaattatgaaactattgagatattgcgtaattatttaagactgtatatcattttggcacgaaatgaagaaggtcgtggtatactaatatacgatgataacatcgactcggtccgcactagcctgaggtaa

SEQ ID NO: 248 - DNA, 168 bp, synthetic construct
  misc_feature 1..168: note = Synthetic
  source 1..168: mol_type = other DNA
atgaggtccctgattatagtccttctgttcccctctatcatctactccatgtctattagacgatgcgagaagactgaagaggaaacatggggattaaaaatagggttgtgtataattgccaaagatttctatcccgaaagcgactcggtccgcactagcctgaggtaa

SEQ ID NO: 249 - DNA, 159 bp, synthetic construct
  misc_feature 1..159: note = Synthetic
  source 1..159: mol_type = other DNA
ctgattatagtccttctgttcccctctatcatctactccatgtctattagacgatgcgagaagactgaagaggaaacatggggattaaaaatagggttgtgtataattgccaaagatttctatcccgaaagcgactcggtccgcactagcctgaggtaa

SEQ ID NO: 250 - DNA, 15 bp, synthetic construct
  misc_feature 1..15: note = Synthetic
  source 1..15: mol_type = other DNA
atgaatataaaataa

SEQ ID NO: 251 - DNA, 63 bp, synthetic construct
  source 1..63: mol_type = other DNA
  misc_feature 1..63: note = Synthetic
atgatagacaaggcagcattaactggatggggatggcctacagagtcctggctgatgtgttga

SEQ ID NO: 252 - DNA, 204 bp, synthetic construct
  source 1..204: mol_type = other DNA
  misc_feature 1..204: note = Synthetic
attaactggatggggatggcctacagagtcctggctgatgtgttgaggggaattcgcatggacgggctttttgtttcatcagatacagaggaacttcttcacaacctttgggaatggatgtacttcagttggatggttgagcggcaacagcgaaaggacggtcggaggagaggtatctgctcgactcggtccgcactagcctga

SEQ ID NO: 253 - DNA, 36 bp, synthetic construct
  source 1..36: mol_type = other DNA
  misc_feature 1..36: note = Synthetic
atccaaatccaggagcagcatctcaacaaaatctag

SEQ ID NO: 254 - DNA, 180 bp, synthetic construct
  source 1..180: mol_type = other DNA
  misc_feature 1..180: note = Synthetic
atgacccttaaggatctcatgtcgagtgttgaaaaagatatgcgtcaacttcaggccgaaacaaacgatctggtgacgaacgtatatgatgcaagggagtatacgcgtagggcaatagatcaaattatacaactagtcaaaggttttgaacgattcccgactcggtccgcactagcctga

SEQ ID NO: 255 - DNA, 180 bp, synthetic construct
  source 1..180: mol_type = other DNA
  misc_feature 1..180: note = Synthetic
atggcccttaaggatctcatgtcgaatgttgaaagagatatgcaccaacttcaggccgaaacaaacgatctggtgacgaacgtatatgatgcaagggagtatacgcgtagggcaatagatcaaattctacaactagtcaaaggttttgaacgattcccgactcggtccgcactagcctga

SEQ ID NO: 256 - DNA, 180 bp, synthetic construct
  misc_feature 1..180: note = Synthetic
  source 1..180: mol_type = other DNA
atgtcccttaaggatctcatgtcgagtgttgaaaaagatatgcaccaacttcaggcagaaacaaacgatctggtgacgaatgtaaatgatgcaagggaatatacacgtagggcaatagatcaaattttacaactagtcaaaggttttgaacgattcccgactcggtccgcactagcctga

SEQ ID NO: 257 - DNA, 12 bp, synthetic construct
  misc_feature 1..12: note = Synthetic
  source 1..12: mol_type = other DNA
atgcggaagtga

SEQ ID NO: 258 - DNA, 39 bp, synthetic construct
  source 1..39: mol_type = other DNA
  misc_feature 1..39: note = Synthetic
ttggcgctcaaagggcgcgtttattgttctgtcagctga

SEQ ID NO: 259 - DNA, 216 bp, synthetic construct
  misc_feature 1..216: note = Synthetic
  source 1..216: mol_type = other DNA
atggccaaggttgtgctcgcgcccatagtgctctaccggggctccggagagtacaaggtgacgttcgcgctcaagcgcattagcatggagagcatggtacacgccactgtggtggatgccagcggagagcacgtgcggctggtcatgaccgagagcgccgacgacgacgagcgcctggccgcgctgggggtaatggaccgactcggtccgcactag

SEQ ID NO: 260 - DNA, 63 bp, synthetic construct
  source 1..63: mol_type = other DNA
  misc_feature 1..63: note = Synthetic
atggctttcatcaacgatgagaagattaaagctctgaccacgtatactctgagaagaaaatga

SEQ ID NO: 261 - DNA, 126 bp, synthetic construct
  source 1..126: mol_type = other DNA
  misc_feature 1..126: note = Synthetic
atggtgcaagcgatgagaaccattgggactcatcctagctccagtgctggtctgaaaaatgatcttcttgaaaatttgcaggcctatcagaaacgaatgggggtgcagatgcaacggttcaagtga

SEQ ID NO: 262 - DNA, 165 bp, synthetic construct
  source 1..165: mol_type = other DNA
  misc_feature 1..165: note = Synthetic
atcttcttgaaaatttgcaggcctatcagaaacgaatgggggtgcagatgcaacggttcaagtgatcctctcgctattgccgcaaatatcattgggatcttgcacttgatattgtggattcttgatcgtctttttttcgactcggtccgcactagcctgaggtaa

SEQ ID NO: 263 - DNA, 36 bp, synthetic construct
  misc_feature 1..36: note = Synthetic
  source 1..36: mol_type = other DNA
atattcttttcatgggtaatgaagcagcaaaattag

SEQ ID NO: 264 - DNA, 42 bp, synthetic construct
  misc_feature 1..42: note = Synthetic
  source 1..42: mol_type = other DNA
atgtcaagtgtaaagagccacatcaactttgtgaaacaatag

SEQ ID NO: 265 - DNA, 33 bp, synthetic construct
  source 1..33: mol_type = other DNA
  misc_feature 1..33: note = Synthetic
atggcgtccccgactcggtccgcactagcctga

SEQ ID NO: 266 - DNA, 216 bp, synthetic construct
  misc_feature 1..216: note = Synthetic
  source 1..216: mol_type = other DNA
atggccatcgtgtgcacgatcatgtccatcgtcaccatcatcgtgacgcacgtgaccgggtccgtgggcgccaccactttcatgtacatcgtgctcggcctgctgttcgccatctacgccttccgcctcactggccgcggtatcgtgcgcactcgctccgccgcgcccgcctgcccggtgtacgcgggcgactcggtccgcactagcctgaggtaa

SEQ ID NO: 267 - DNA, 57 bp, synthetic construct
  source 1..57: mol_type = other DNA
  misc_feature 1..57: note = Synthetic
atagaattaattatatatctattacaccgaccttgtatcataataaagttgtggtag

SEQ ID NO: 268 - DNA, 24 bp, synthetic construct
  source 1..24: mol_type = other DNA
  misc_feature 1..24: note = Synthetic
atagaatcctggggtagtgactga

SEQ ID NO: 269 - DNA, 42 bp, synthetic construct
  source 1..42: mol_type = other DNA
  misc_feature 1..42: note = Synthetic
gtggacgctgtcattatgaacaaccgactcggtccgcactag

SEQ ID NO: 270 - DNA, 42 bp, synthetic construct
  source 1..42: mol_type = other DNA
  misc_feature 1..42: note = Synthetic
atgcctttactaacctccgcgactcggtccgcactagcctga

SEQ ID NO: 271 - DNA, 39 bp, synthetic construct
  source 1..39: mol_type = other DNA
  misc_feature 1..39: note = Synthetic
acgcagcagttggagctcccatccatacagatgacctga

SEQ ID NO: 272 - DNA, 69 bp, synthetic construct
  misc_feature 1..69: note = Synthetic
  source 1..69: mol_type = other DNA
atgccgcactgggtgatcttgacatctagacaattcagatcccaatctaaaattgacatacctaattga

SEQ ID NO: 273 - DNA, 72 bp, synthetic construct
  misc_feature 1..72: note = Synthetic
  source 1..72: mol_type = other DNA
ctggatcccggccggcacattcaggacgcaatgccggctccaaaccttccaccaggatcccagcacctctga

SEQ ID NO: 274 - DNA, 48 bp, synthetic construct
  source 1..48: mol_type = other DNA
  misc_feature 1..48: note = Synthetic
ctggaacacaagattctgacattttcgactcggtccgcactagcctga

SEQ ID NO: 275 - DNA, 12 bp, synthetic construct
  misc_feature 1..12: note = Synthetic
  source 1..12: mol_type = other DNA
atagtaatttaa

SEQ ID NO: 276 - DNA, 51 bp, synthetic construct
  source 1..51: mol_type = other DNA
  misc_feature 1..51: note = Synthetic
atgatgtgcagaaacacatcaataagttcgactcggtccgcactagcctga

SEQ ID NO: 277 - DNA, 45 bp, synthetic construct
  misc_feature 1..45: note = Synthetic
  source 1..45: mol_type = other DNA
aagatggggcaaatacaaaagccgctcttagcaaagtcaagttga

SEQ ID NO: 278 - DNA, 21 bp, synthetic construct
  source 1..21: mol_type = other DNA
  misc_feature 1..21: note = Synthetic
ttggatctgggtttgggataa

SEQ ID NO: 279 - DNA, 168 bp, synthetic construct
  source 1..168: mol_type = other DNA
  misc_feature 1..168: note = Synthetic
atgtcccgacttggacctgcgttggatgagtttcgctcctttaagaataatccccctaggagaggtgcactcacaacagcaatccaagggatcaagaagaatgttattgtcttggttcctaccatgaaacaaccagcaaacgactcggtccgcactagcctgaggtaa

SEQ ID NO: 280 - DNA, 18 bp, synthetic construct
  source 1..18: mol_type = other DNA
  misc_feature 1..18: note = Synthetic
ctgacttcctggtcctga

SEQ ID NO: 281 - DNA, 198 bp, synthetic construct
  source 1..198: mol_type = other DNA
  misc_feature 1..198: note = Synthetic
ctggtcctgactattttatgcagacaagacatggaagacatcaattttgcgtcgctggctccgcggcacggctcgcggccgtttatgggcacctggaacgagatcggcaccagccagctcaacgggggcgctttcagttggagcagcctgtggagtggcattaaaaacttcgactcggtccgcactagcctgaggtaa

SEQ ID NO: 282 - DNA, 57 bp, synthetic construct
  source 1..57: mol_type = other DNA
  misc_feature 1..57: note = Synthetic
atggatgctgagaccccgcaggaacgctcagcagtctttgtgaatgaggatgagtga

SEQ ID NO: 283 - DNA, 168 bp, synthetic construct
  source 1..168: mol_type = other DNA
  misc_feature 1..168: note = Synthetic
atggcgcagcgccaaaagccaatggctctgaggccagcggccaggatcttgttcctgccgccgttgaacaggccgtccccattcaacccgtggctggcgcggctcttgccgcccccgccgccgggcaaattaaccaaattcgactcggtccgcactagcctgaggtaa

SEQ ID NO: 284 - DNA, 36 bp, synthetic construct
  misc_feature 1..36: note = Synthetic
  source 1..36: mol_type = other DNA
atgtttatcgactcggtccgcactagcctgaggtaa

SEQ ID NO: 285 - DNA, 168 bp, synthetic construct
  misc_feature 1..168: note = Synthetic
  source 1..168: mol_type = other DNA
atgggccaaatcttttcccgtagcgctagccctattccgcgaccgccccgggggctggctgctcatcactggcttaacttcctccaggcggcatatcgcctagaacccggtccctccagttacgatttccaccagttaaacgactcggtccgcactagcctgaggtaa

SEQ ID NO: 286 - DNA, 159 bp, synthetic construct
  source 1..159: mol_type = other DNA
  misc_feature 1..159: note = Synthetic
atcttttcccgtagcgctagccctattccgcgaccgccccgggggctggctgctcatcactggcttaacttcctccaggcggcatatcgcctagaacccggtccctccagttacgatttccaccagttaaacgactcggtccgcactagcctgaggtaa

SEQ ID NO: 287 - DNA, 168 bp, synthetic construct
  source 1..168: mol_type = other DNA
  misc_feature 1..168: note = Synthetic
atgggccaaatcttttcccgtagcgctagccctattccgcggccgccccgggggctggccgctcatcactggcttaacttcctccaggcggcatatcgcctagaacccggtccctccagttacgatttccaccagttaaacgactcggtccgcactagcctgaggtaa

SEQ ID NO: 288 - DNA, 72 bp, synthetic construct
  source 1..72: mol_type = other DNA
  misc_feature 1..72: note = Synthetic
atagataagaagaggacaaagtttcagaatagagccaaaatggtcgactcggtccgcactagcctgaggtaa

SEQ ID NO: 289 - DNA, 108 bp, synthetic construct
  misc_feature 1..108: note = Synthetic
  source 1..108: mol_type = other DNA
atgcatccactcaatagtgaggagtcgagtatgaaaatagataagaagaggacaaagtttcagaatagagccaaaatggtcgactcggtccgcactagcctgaggtaa

SEQ ID NO: 290 - DNA, 33 bp, synthetic construct
  source 1..33: mol_type = other DNA
  misc_feature 1..33: note = Synthetic
atacattcaacgactcggtccgcactagcctga

SEQ ID NO: 291 - DNA, 18 bp, synthetic construct
  source 1..18: mol_type = other DNA
  misc_feature 1..18: note = Synthetic
atttttgtgtccgtgtag

SEQ ID NO: 292 - DNA, 21 bp, synthetic construct
  misc_feature 1..21: note = Synthetic
  source 1..21: mol_type = other DNA
attatctgctcagagggataa

SEQ ID NO: 293 - DNA, 162 bp, synthetic construct
  source 1..162: mol_type = other DNA
  misc_feature 1..162: note = Synthetic
atctcttcgttgttcggaggtagatacgataataagtttttgcttaacatgtcttcggctcccaaaatagagttgattgtagataaggtggcttcgttatcagaaagacgcttggaggggcgtctgccagaagacgactcggtccgcactagcctgaggtaa

SEQ ID NO: 294 - DNA, 123 bp, synthetic construct
  misc_feature 1..123: note = Synthetic
  source 1..123: mol_type = other DNA
ttgcttaacatgtcttcggctcccaaaatagagttgattgtagataaggtggcttcgttatcagaaagacgcttggaggggcgtctgccagaagacgactcggtccgcactagcctgaggtaa

SEQ ID NO: 295 - DNA, 30 bp, synthetic construct
  source 1..30: mol_type = other DNA
  misc_feature 1..30: note = Synthetic
ataaaagtcattatctgctccgagggataa

SEQ ID NO: 296 - DNA, 162 bp, synthetic construct
  source 1..162: mol_type = other DNA
  misc_feature 1..162: note = Synthetic
atctcttcgttgttcggaggtagatacgataataagtttttgcttaacatgtcttcggctcccaaaatagagttgattgtagataaggtggcttcgttatcagaaagacgcttggaggggcgtctgccggaagacgactcggtccgcactagcctgaggtaa

SEQ ID NO: 297 - DNA, 21 bp, synthetic construct
  misc_feature 1..21: note = Synthetic
  source 1..21: mol_type = other DNA
attatctgctccgagggataa

SEQ ID NO: 298 - DNA, 129 bp, synthetic construct
  source 1..129: mol_type = other DNA
  misc_feature 1..129: note = Synthetic
atggaagatttcttgaaaaaagaaaagagaaagagaccaccttcccggcggcggacacgctcctctccgtcgccgttctgcaccatgattcgatcaataacaacatcatcatcggagaccatcttttaa

SEQ ID NO: 299 - DNA, 195 bp, synthetic construct
  source 1..195: mol_type = other DNA
  misc_feature 1..195: note = Synthetic
gtgaacatacgcactcgtggcaacaacatgaaggaaagtctttctcggccgccgtcaccctggcttttcgctctcttgctcttcttttctgcgtctttcctgcatgcgggcagggattgtccggagccccctgccgtttctgtcaatgtcatggtggtcgcgacgtgcgactcggtccgcactagcctgaggtaa

SEQ ID NO: 300 - DNA, 195 bp, synthetic construct
  misc_feature 1..195: note = Synthetic
  source 1..195: mol_type = other DNA
gtgaacatacgcactcgtggcaacaacgccaaggaaagtctttctcggccgccgtcaccctggcttttcgctctcttgctcttcttttctgcgtctttcctgcatgcgggcagggattgtccggagccccctgccgtttctgtcaatgtcatggtggtcgcgacgtgcgactcggtccgcactagcctgaggtaa

SEQ ID NO: 301 - DNA, 48 bp, synthetic construct
  source 1..48: mol_type = other DNA
  misc_feature 1..48: note = Synthetic
atggcactttccctatgccaatattcatcaatcatgatgggttcttag

SEQ ID NO: 302 - DNA, 15 bp, synthetic construct
  source 1..15: mol_type = other DNA
  misc_feature 1..15: note = Synthetic
atgatgggttcttag

SEQ ID NO: 303 - DNA, 39 bp, synthetic construct
  source 1..39: mol_type = other DNA
  misc_feature 1..39: note = Synthetic
atgaaaattacctgggaatggttcagtcaggcagtttga

SEQ ID NO: 304 - DNA, 72 bp, synthetic construct
  source 1..72: mol_type = other DNA
  misc_feature 1..72: note = Synthetic
ttgtcttccatcatctataaattcctccacctctatatatctaccaccgtgctgaaaactagatccatttaa

SEQ ID NO: 305 - DNA, 39 bp, synthetic construct
  source 1..39: mol_type = other DNA
  misc_feature 1..39: note = Synthetic
acgtggttaaacagtacgtttattaaagtaactgggtga

SEQ ID NO: 306 - DNA, 129 bp, synthetic construct
  source 1..129: mol_type = other DNA
  misc_feature 1..129: note = Synthetic
acgctactttctcgagtgcagatactcttcgagacggctaaacaacgtgtccaactcgctgagacctttccgcgtgccgttatccgatttcctttccgcctcctgacgactcggtccgcactagcctga

SEQ ID NO: 307 - DNA, 60 bp, synthetic construct
  misc_feature 1..60: note = Synthetic
  source 1..60: mol_type = other DNA
gtgtccaactcgctgagacctttccgcgtgccgttatccgatttcctttccgcctcctga

SEQ ID NO: 308 - DNA, 21 bp, synthetic construct
  misc_feature 1..21: note = Synthetic
  source 1..21: mol_type = other DNA
atgttttcggctccacggtag

SEQ ID NO: 309 - DNA, 168 bp, synthetic construct
  source 1..168: mol_type = other DNA
  misc_feature 1..168: note = Synthetic
atgtttacagatccgcccaaggcggcaaaaatatacattaactcatccgtcgagtctacatttatagacacttcttcactgaactctgaaaaatatgccacaatttggcgcagtttatcgatttttatacggatgctcatcgactcggtccgcactagcctgaggtaa

SEQ ID NO: 310 - DNA, 69 bp, synthetic construct
  misc_feature 1..69: note = Synthetic
  source 1..69: mol_type = other DNA
atgccacaatttggcgcagtttatcgatttttatacggatgctcatcgactcggtccgcactagcctga

SEQ ID NO: 311 - DNA, 189 bp, synthetic construct
  source 1..189: mol_type = other DNA
  misc_feature 1..189: note = Synthetic
ctgagaggtataatagcccaagcctttacagatccgcccaaggcggcaaaaatatacattaactcatccgtcgagtctacatttatagacacttcttcactgaactctgaaaaatatgccacaatttggcgcagtttatcgatttttatacggatgctcatcgactcggtccgcactagcctgaggtaa

SEQ ID NO: 312 - DNA, 21 bp, synthetic construct
  misc_feature 1..21: note = Synthetic
  source 1..21: mol_type = other DNA
aagtggagcagactactgtag

SEQ ID NO: 313 - DNA, 30 bp, synthetic construct
  misc_feature 1..30: note = Synthetic
  source 1..30: mol_type = other DNA
atggcagcgactcggtccgcactagcctga

SEQ ID NO: 314 - DNA, 24 bp, synthetic construct
  source 1..24: mol_type = other DNA
  misc_feature 1..24: note = Synthetic
ataaagtggagcagactactgtag

SEQ ID NO: 315 - DNA, 45 bp, synthetic construct
  source 1..45: mol_type = other DNA
  misc_feature 1..45: note = Synthetic
atacgagcgacgcggcggtacatgacgagtgggcacttgcgatag

SEQ ID NO: 316 - DNA, 51 bp, synthetic construct
  source 1..51: mol_type = other DNA
  misc_feature 1..51: note = Synthetic
ttgcatgatagaatggttcagtggcaaacttccatggaaaaacaaaagtag

SEQ ID NO: 317 - DNA, 51 bp, synthetic construct
  source 1..51: mol_type = other DNA
  misc_feature 1..51: note = Synthetic
atgcatctagtcagcggcggtctcaacgaaattaaccaacagtatccgtga

SEQ ID NO: 318 - DNA, 30 bp, synthetic construct
  misc_feature 1..30: note = Synthetic
  source 1..30: mol_type = other DNA
ttgccgccgactcggtccgcactagcctga

SEQ ID NO: 319 - DNA, 63 bp, synthetic construct
  source 1..63: mol_type = other DNA
  misc_feature 1..63: note = Synthetic
aggatgaggacagaagacgtgctctggcagatgaggttactagatggcaaagaaccggcttag

SEQ ID NO: 320 - DNA, 144 bp, synthetic construct
  misc_feature 1..144: note = Synthetic
  source 1..144: mol_type = other DNA
ttggaaaaagcagtatattcaaggtatgaagtacaaggaataacagccgtaataacatcaatggctacctttgcgaatagcaaagaaaactttaagaaactaagagggcccgtcgtaaccttgtaccgactcggtccgcactag

SEQ ID NO: 321 - DNA, 204 bp, synthetic construct
  source 1..204: mol_type = other DNA
  misc_feature 1..204: note = Synthetic
gtgagcccgcaggtgcggcatatggacccgtccgaggcgcccaggcgcgggtccttcaccgtgcccaggtcctcgtcgttcttcaactggctgatgaccacgtccgtggcgcttatctcgctctgcgagtacaggctgtacgacacgcgcgccaccaccgacatgattctccgagtcgtattaatacgactcggtccgcactag

SEQ ID NO: 322 - DNA, 60 bp, synthetic construct
  misc_feature 1..60: note = Synthetic
  source 1..60: mol_type = other DNA
ctgtttacaacacctatgataataagagatctagtaactagagtaaaaatctacagatga

SEQ ID NO: 323 - DNA, 39 bp, synthetic construct
  misc_feature 1..39: note = Synthetic
  source 1..39: mol_type = other DNA
atgttacaacgcaatcgatacataaaaacaaggaaataa

SEQ ID NO: 324 - DNA, 48 bp, synthetic construct
  misc_feature 1..48: note = Synthetic
  source 1..48: mol_type = other DNA
atgaaccaccagaagatgatcgactcggtccgcactagcctgaggtaa

SEQ ID NO: 325 - DNA, 39 bp, synthetic construct
  source 1..39: mol_type = other DNA
  misc_feature 1..39: note = Synthetic
atgttacaacgcaatcgatacatgaaaacaaggaaataa

SEQ ID NO: 326 - DNA, 45 bp, synthetic construct
  source 1..45: mol_type = other DNA
  misc_feature 1..45: note = Synthetic
ataatccatctcctccagaatctccagaaccagcatcgcctatag

SEQ ID NO: 327 - DNA, 78 bp, synthetic construct
  source 1..78: mol_type = other DNA
  misc_feature 1..78: note = Synthetic
ttgcctacccaggcgagccgcattttcagcctgcaccttcatatccacgccggcaatggacggcacagacgctcttga

SEQ ID NO: 328 - DNA, 168 bp, synthetic construct
  misc_feature 1..168: note = Synthetic
  source 1..168: mol_type = other DNA
atggacggcacagacgctcttgaaaagcttaccaaaggcctgagtgggggaggcgggagccttcaccagacaaagctgttgatggaatttcaactccgaggactgccggtgcctgccctcttaaacagcagcacaacagacgactcggtccgcactagcctgaggtaa

SEQ ID NO: 329 - DNA, 183 bp, synthetic construct
  source 1..183: mol_type = other DNA
  misc_feature 1..183: note = Synthetic
atatccacgccggcagccgacggcacagacgctcttgaaaagcttaccaaaggcctgagtgggggaggcgggagccttcaccagacaaagctgttgatggaatttcaactccgaggactgccggtgcctgccctcttaaacagcagcacaacagacgactcggtccgcactagcctgaggtaa

SEQ ID NO: 330 - DNA, 66 bp, synthetic construct
  source 1..66: mol_type = other DNA
  misc_feature 1..66: note = Synthetic
atgatacgatactatatgtattcttcgatagtccgcattatgtacctattctatgaataccattaa

SEQ ID NO: 331 - DNA, 216 bp, synthetic construct
  misc_feature 1..216: note = Synthetic
  source 1..216: mol_type = other DNA
ctgatgacatctcaaagacttgcagaagggaattacagcctcccaccagactctttagctgtctatagaattactgattcttcctcacaatggttcgacattgggattaaccatgatggcttttcctatgttggacttcctgatctgccagctgacctaacctttcctcttacctcgaccttcatgggcgactcggtccgcactagcctgaggtaa

SEQ ID NO: 332 - DNA, 150 bp, synthetic construct
  misc_feature 1..150: note = Synthetic
  source 1..150: mol_type = other DNA
atgcacggcacggcaagacgacacgagggccttggcggcgcggctagcaccgcgccggccctggcggctttcctgtcatcaccccgctgggccgcatgcacctacgcgccgacatgcgcacgcgcgtcatgtgcgtggactttggcgtga

SEQ ID NO: 333 - DNA, 99 bp, synthetic construct
  misc_feature 1..99: note = Synthetic
  source 1..99: mol_type = other DNA
aagacagatataacgatagttttatcactagtccagaatactatagcgcggaaaaatacatgtgtagatatactaccgactcggtccgcactagcctga

SEQ ID NO: 334 - DNA, 132 bp, synthetic construct
  source 1..132: mol_type = other DNA
  misc_feature 1..132: note = Synthetic
attttgcccagggctggggtcctatcagttatgccaacggaagcggcctcgacgaacgcccctactgctggcactaccctccaagaccttgtggcattgtgcccgcaaacgactcggtccgcactagcctga

SEQ ID NO: 335 - DNA, 129 bp, synthetic construct
  source 1..129: mol_type = other DNA
  misc_feature 1..129: note = Synthetic
ttgcccagggctggggtcctatcagttatgccaacggaagcggcctcgacgaacgcccctactgctggcactaccctccaagaccttgtggcattgtgcccgcaaacgactcggtccgcactagcctga

SEQ ID NO: 336 - DNA, 168 bp, synthetic construct
  source 1..168: mol_type = other DNA
  misc_feature 1..168: note = Synthetic
atgatcgcgggcaccccaccgcactccacgatggaacgcgggggggatcgcgacatcgtggtcaccggtgctcggaaccagttcgcgcccgacctggagccgggggggtcggtatcgtgcatgcgctcgtcgctgtccttcgactcggtccgcactagcctgaggtaa

SEQ ID NO: 337 - DNA, 165 bp, synthetic construct
  misc_feature 1..165: note = Synthetic
  source 1..165: mol_type = other DNA
atcgcgggcaccccaccgcactccacgatggaacgcgggggggatcgcgacatcgtggtcaccggtgctcggaaccagttcgcgcccgacctggagccgggggggtcggtatcgtgcatgcgctcgtcgctgtccttcgactcggtccgcactagcctgaggtaa

SEQ ID NO: 338 - DNA, 21 bp, synthetic construct
  source 1..21: mol_type = other DNA
  misc_feature 1..21: note = Synthetic
acgaactcgaaacaccactaa

SEQ ID NO: 339 - DNA, 168 bp, synthetic construct
  misc_feature 1..168: note = Synthetic
  source 1..168: mol_type = other DNA
atggaaatagtcacatacaagacggtttcagcgagatctccgaccgtcacctggtcatcgggattcggacgagctatagcttcgattcaaaaacggaatcaagataatatcaggaaacccctacgcttctacaccggtctcgactcggtccgcactagcctgaggtaa

SEQ ID NO: 340 - DNA, 162 bp, synthetic construct
  source 1..162: mol_type = other DNA
  misc_feature 1..162: note = Synthetic
atagtcacatacaagacggtttcagcgagatctccgaccgtcacctggtcatcgggattcggacgagctatagcttcgattcaaaaacggaatcaagataatatcaggaaacccctacgcttctacaccggtctcgactcggtccgcactagcctgaggtaa

SEQ ID NO: 341 - DNA, 189 bp, synthetic construct
  misc_feature 1..189: note = Synthetic
  source 1..189: mol_type = other DNA
attcacttctattcagtcaaaatgtttaactatctggaaaatgaggaggtagctctcgatgaacttaaacagatgttgaaagacagagatcctaatgataccaggaaccaattcaagaataatgctttacatgcatacctttttaatgagcattgtaataacgactcggtccgcactagcctgaggtaa

SEQ ID NO: 342 - DNA, 114 bp, synthetic construct
  misc_feature 1..114: note = Synthetic
  source 1..114: mol_type = other DNA
ttgaaagacagagatcctaatgataccaggaaccaattcaagaataatgctttacatgcatacctttttaatgagcattgtaataacgactcggtccgcactagcctgaggtaa

SEQ ID NO: 343 - DNA, 168 bp, synthetic construct
  source 1..168: mol_type = other DNA
  misc_feature 1..168: note = Synthetic
atgtcaagtaaggaagcactgaagaagaagggaatttccctgggaggaggaggaaaacggggctttgagatgaaaaaggccccacaacataacaacagtaatagacaacttcggcggtcactgttcaggatggatgtcggcgactcggtccgcactagcctgaggtaa

SEQ ID NO: 344 - DNA, 123 bp, synthetic construct
  source 1..123: mol_type = other DNA
  misc_feature 1..123: note = Synthetic
attctgtgccctagagtcacctcaaagaataatctgtggtgtccaaggggagggttctggggccggctacttagaaaccgccatagatcgggcagggtggagtacttgaggagccggcggtag

SEQ ID NO: 345 - DNA, 42 bp, synthetic construct
  misc_feature 1..42: note = Synthetic
  source 1..42: mol_type = other DNA
acgttcgtagacacgttgatcataaaacaccgtagaggctaa

SEQ ID NO: 346 - DNA, 63 bp, synthetic construct
  misc_feature 1..63: note = Synthetic
  source 1..63: mol_type = other DNA
atgattaacggaagttcatctgctttatgggcaagagctttagccagaatttctttgtcgtaa

SEQ ID NO: 347 - DNA, 54 bp, synthetic construct
  misc_feature 1..54: note = Synthetic
  source 1..54: mol_type = other DNA
atcatttgctcgccgtttccacgtacagctccgactcggtccgcactagcctga

SEQ ID NO: 348 - DNA, 15 bp, synthetic construct
  source 1..15: mol_type = other DNA
  misc_feature 1..15: note = Synthetic
atgttagcgctttaa

SEQ ID NO: 349 - DNA, 45 bp, synthetic construct
  source 1..45: mol_type = other DNA
  misc_feature 1..45: note = Synthetic
atgaactcaaactttgtaagagtgatgaggaagtctcagaattga

SEQ ID NO: 350 - DNA, 159 bp, synthetic construct
  misc_feature 1..159: note = Synthetic
  source 1..159: mol_type = other DNA
aaggaagcactgaagaagaagggaatttccctgggaggaggaggaaaacggggctttgagatgaaaaaggccccacaacataacaacagtaatagacaacttcggcggtcactgttcaggatggatgtcggcgactcggtccgcactagcctgaggtaa

SEQ ID NO: 351 - DNA, 30 bp, synthetic construct
  misc_feature 1..30: note = Synthetic
  source 1..30: mol_type = other DNA
ctggacatgctcagagaccctcccaactaa

SEQ ID NO: 352 - DNA, 147 bp, synthetic construct
  source 1..147: mol_type = other DNA
  misc_feature 1..147: note = Synthetic
atgcatggtgaaaagtattacaggactgtggcttcccgtgtctccaaggaggccgcccaaagtgggatagaaatggtagtcccacgccaccgatctgttctgcgctgggtgcgctttggcgactcggtccgcactagcctgaggtaa

SEQ ID NO: 353 - DNA, 75 bp, synthetic construct
  source 1..75: mol_type = other DNA
  misc_feature 1..75: note = Synthetic
atgcagatggatcataatcagagagcttcttggaagacgatgatctatagaggggtacgactcggtccgcactag

SEQ ID NO: 354 - DNA, 99 bp, synthetic construct
  source 1..99: mol_type = other DNA
  misc_feature 1..99: note = Synthetic
atcagcaaaccgcaaatcaaaatgttcgcttactacgcggatagcgcctttgacttgataaacagcggcaagcgcggtgctaccatacataagcgatga

SEQ ID NO: 355 - DNA, 126 bp, synthetic construct
  source 1..126: mol_type = other DNA
  misc_feature 1..126: note = Synthetic
atgaagcaaaaggggcttgcccaaagtcgccgggaatggatacaaaataaaatgccttcgggcattcagggcggttattttcggtttgcttttccgcccgactcggtccgcactagcctgaggtaa

SEQ ID NO: 356 - DNA, 210 bp, synthetic construct
  source 1..210: mol_type = other DNA
  misc_feature 1..210: note = Synthetic
attcggaatatggaggctgaggaagtcctagagatgcaagacttgtggctgctgcggaggtcagagaaagccaccaactggttgcagagcaacggatgggataggctcaaacgaatggcagtcagtggagatgattgcgttgtgaagccaattgatgataggtttgcacatgccctcaggttcgactcggtccgcactagcctgaggtaa

SEQ ID NO: 357 - DNA, 222 bp, synthetic construct
  misc_feature 1..222: note = Synthetic
  source 1..222: mol_type = other DNA
gtggtgcaactcattcggaatatggaggctgaggaagtcctagagatgcaagacttgtggctgctgcggaggtcagagaaagtgaccaactggttgcagagcaacggatgggataggctcaaacgaatggcagtcagtggagatgattgcgttgtgaagccaagccatgataggtttgcacatgccctcaggttcgactcggtccgcactagcctgaggtaa

SEQ ID NO: 358 - DNA, 222 bp, synthetic construct
  misc_feature 1..222: note = Synthetic
  source 1..222: mol_type = other DNA
gtggtgcaactcattcggaatatggaggctgaggaagtcctagagatgcaagacttgtggctgctgcggaggtcagagaaagtgaccaactggttgcagagcaacggatgggataggctcaaacgaatggcagtcagtggagatgattgcgttgtgaagccaattgatgataggtttgcacatgccctcaggttcgactcggtccgcactagcctgaggtaa

SEQ ID NO: 359 - DNA, 30 bp, synthetic construct
  source 1..30: mol_type = other DNA
  misc_feature 1..30: note = Synthetic
gtgcgcatggaccacttcaacccatgttag

SEQ ID NO: 360 - DNA, 48 bp, synthetic construct
  misc_feature 1..48: note = Synthetic
  source 1..48: mol_type = other DNA
ctgctctgcctttctaacccactgctgagatggctagtagttcgctaa

SEQ ID NO: 361 - DNA, 186 bp, synthetic construct
  misc_feature 1..186: note = Synthetic
  source 1..186: mol_type = other DNA
atggctagtagttcgctaagcttctctggccgagagattactgaactactggaaacaggactgggcactattgagagtatcgagaggatggtggcggcaaagggtgggcctgacgggggaattgacccagagtcccaacctggacagaggggacttccgactcccacccgactcggtccgcactag

SEQ ID NO: 362 - DNA, 171 bp, synthetic construct
  misc_feature 1..171: note = Synthetic
  source 1..171: mol_type = other DNA
ataggattgagagaagaattagacgtggcattgagctcaagataccaagtcagcggcgtcggaaacatcactagagcgatgtccacgctgtctaagagtttgaagtcttttaggaaaataagaggtcccatcatacatctgtacgactcggtccgcactagcctgaggtaa

SEQ ID NO: 363 - DNA, 219 bp, synthetic construct
  source 1..219: mol_type = other DNA
  misc_feature 1..219: note = Synthetic
atgcatgccaattatctgttttggagaaatagtacaatgtggaatggaggggcttacagtctctttgacatgagtaagttccctttgaaagcggctggtacggctgttgttagccttaaaccagaccaaataaatgacttagtcctctccttgattgagaagggcaagttattagtgcgtgatacacgcaaagaagcgactcggtccgcactagcctga

SEQ ID NO: 364 - DNA, 27 bp, synthetic construct
  misc_feature 1..27: note = Synthetic
  source 1..27: mol_type = other DNA
atggagcaagtgctcacaaaccagtga

SEQ ID NO: 365 - DNA, 114 bp, synthetic construct
  misc_feature 1..114: note = Synthetic
  source 1..114: mol_type = other DNA
acgcgcaagtccgtggcggaaccgactactttgggtgtccgtgtttcactttttacttttatgactgctaatggtgacaatttaatattgttaccatttggcttgtcgaattga

SEQ ID NO: 366 - DNA, 63 bp, synthetic construct
  misc_feature 1..63: note = Synthetic
  source 1..63: mol_type = other DNA
ttgaagctgagtttccatttgacagatccccacagccgcattgagcagagtagatgtgattaa

SEQ ID NO: 367 - DNA, 57 bp, synthetic construct
  source 1..57: mol_type = other DNA
  misc_feature 1..57: note = Synthetic
atgccgtgttctacttccaaaatacgcccattaacgactcggtccgcactagcctga

SEQ ID NO: 368 - DNA, 138 bp, synthetic construct
  source 1..138: mol_type = other DNA
  misc_feature 1..138: note = Synthetic
atgtcccaaagaagctgcacccgccactgcacaacatcggcttcagcgtcgtctaggttgggcccggcgaggacacttaagcaaacattttcgaactacagtcgttcaaaaccatgcgtaatcgtcgtagtgcactag

SEQ ID NO: 369 - DNA, 168 bp, synthetic construct
  misc_feature 1..168: note = Synthetic
  source 1..168: mol_type = other DNA
atggaccacaagcagtacctgctaactatgttcttcgcagaggacagctccttcttcaagtacctgtcggagcaggacgacgacacagccctggacgacgtaatgattgtcaagcactacatggacgtgctgctggccctcgactcggtccgcactagcctgaggtaa

SEQ ID NO: 370 - DNA, 141 bp, synthetic construct
  source 1..141: mol_type = other DNA
  misc_feature 1..141: note = Synthetic
atgttcttcgcagaggacagctccttcttcaagtacctgtcggagcaggacgacgacacagccctggacgacgtaatgattgtcaagcactacatggacgtgctgctggccctcgactcggtccgcactagcctgaggtaa

SEQ ID NO: 371 - DNA, 15 bp, synthetic construct
  source 1..15: mol_type = other DNA
  misc_feature 1..15: note = Synthetic
gtgtcggtgtggtag

SEQ ID NO: 372 - DNA, 183 bp, synthetic construct
  misc_feature 1..183: note = Synthetic
  source 1..183: mol_type = other DNA
aagactgtcgccactatgtcctccgcacttcggtctcgggctcgctcggcctcgctcggaacgacgactcagggctgggatccgccgccattgcgtcgtcccagcagggcgcgccggcgccagtggatgcgcgaagctgcgcaggccgccgctcacgactcggtccgcactagcctgaggtaa

SEQ ID NO: 373 - DNA, 183 bp, synthetic construct
  source 1..183: mol_type = other DNA
  misc_feature 1..183: note = Synthetic
aagactgtcgccactgcctcctccgcacttcggtctcgggctcgctcggcctcgctcggaacgacgactcagggctgggatccgccgccattgcgtcgtcccagcagggcgcgccggcgccagtggatgcgcgaagctgcgcaggccgccgctcacgactcggtccgcactagcctgaggtaa

SEQ ID NO: 374 - DNA, 168 bp, synthetic construct
  source 1..168: mol_type = other DNA
  misc_feature 1..168: note = Synthetic
atgttacgagttccggacgtgaaggctagtctagtagagggcgcggcgcgcctgtcgacaggcgagcgcgtgtttcacgtcttgacctctccggcggtggcggccatggtgggagtctctaatcctgaagtcccgatgcccgactcggtccgcactagcctgaggtaa

SEQ ID NO: 375 - DNA, 72 bp, synthetic construct
  misc_feature 1..72: note = Synthetic
  source 1..72: mol_type = other DNA
gtggcggccatggtgggagtctctaatcctgaagtcccgatgcccgactcggtccgcactagcctgaggtaa

SEQ ID NO: 376 - DNA, 39 bp, synthetic construct
  source 1..39: mol_type = other DNA
  misc_feature 1..39: note = Synthetic
atgccaccttttcagctcgcgccccaaatgaagatatag

SEQ ID NO: 377 - DNA, 90 bp, synthetic construct
  source 1..90: mol_type = other DNA
  misc_feature 1..90: note = Synthetic
atgtatctaatggtcaaactaaatctactcgttcgcagaattgggaatcaactgttacatggaatgaaacttccagacaccgtactttag

SEQ ID NO: 378 - DNA, 168 bp, synthetic construct
  misc_feature 1..168: note = Synthetic
  source 1..168: mol_type = other DNA
atggacgcggacctaaagctgctggcggagacactcttcgcaggcgtgctcagcaccaaggacgtgtacgtgcttgcgcgcgagatgcgcggacagagcccgcggcgcacggtcttctcggtggacgcacagggctgcgtcgactcggtccgcactagcctgaggtaa

SEQ ID NO: 379 - DNA, 153 bp, synthetic construct
  source 1..153: mol_type = other DNA
  misc_feature 1..153: note = Synthetic
aagctgctggcggagacactcttcgcaggcgtgctcagcaccaaggacgtgtacgtgcttgcgcgcgagatgcgcggacagagcccgcggcgcacggtcttctcggtggacgcacagggctgcgtcgactcggtccgcactagcctgaggtaa

SEQ ID NO: 380 - DNA, 171 bp, synthetic construct
  source 1..171: mol_type = other DNA
  misc_feature 1..171: note = Synthetic
ttgaatcttattccattatctgaaatggtggtaaaactaactgctgtgtgtatgaaatgctttaaggaagcttccttttctaaacgattaggtgcagaaaccgagatagagataatcggaggtaatgaaatgtatcaatcggtgtgtagaaagtgttacatcgactcataa

SEQ ID NO: 381 - DNA, 33 bp, synthetic construct
  misc_feature 1..33: note = Synthetic
  source 1..33: mol_type = other DNA
acggagatattagtcgaggatgtgattccatag

SEQ ID NO: 382 - DNA, 48 bp, synthetic construct
  misc_feature 1..48: note = Synthetic
  source 1..48: mol_type = other DNA
gtgcaggcagcttccacagcaatggcatcctggtcatccagcggatag

SEQ ID NO: 383 - DNA, 162 bp, synthetic construct
  misc_feature 1..162: note = Synthetic
  source 1..162: mol_type = other DNA
atgatcagcccactgacgcgttgcgcgagaagattgtgcaccgccgctttacaggcttcgacgccgcttcgttctaccatcgacaccaccacgctggcacccaggccatcggcgcgagatttaatcgccgcgaccgactcggtccgcactagcctgaggtaa

SEQ ID NO: 384 - DNA, 168 bp, synthetic construct
  misc_feature 1..168: note = Synthetic
  source 1..168: mol_type = other DNA
atggctatagcagaaagcggagcgttcgaaataaatgtcaatcttggaaaatccatcgcttccatacaaaaaaatcctataatctacatgcgtagacatctctctttttatgtggagttattaaaatttatcattcatcacgactcggtccgcactagcctgaggtaa

SEQ ID NO: 385 - DNA, 183 bp, synthetic construct
  misc_feature 1..183: note = Synthetic
  source 1..183: mol_type = other DNA
atgaccatcactccaagccactgctcaatcagttacctccacatgatgatatatacaaccacactcttccgtccttccgcgagcaatagaacaaagtatgttatggtgccacacaatagctgcatactcttaatatatattatccaataccttcacgactcggtccgcactagcctgaggtaa

SEQ ID NO: 386 - DNA, 168 bp, synthetic construct
  source 1..168: mol_type = other DNA
  misc_feature 1..168: note = Synthetic
atggagttcaaaagaatttttaatacggttcatgacattataaaccgattatgtcaacatggctacaaggaatacatcattccgcccgaatcaaccacaccggtggaattaatggagtatattagcactatcgtctcaaacgactcggtccgcactagcctgaggtaa

SEQ ID NO: 387 - DNA, 36 bp, synthetic construct
  source 1..36: mol_type = other DNA
  misc_feature 1..36: note = Synthetic
atgtttcttgtgttagcgacttatctgatttattag

SEQ ID NO: 388 - DNA, 168 bp, synthetic construct
  misc_feature 1..168: note = Synthetic
  source 1..168: mol_type = other DNA
atgtggccgttctcctccatccccgtgggcgccgactgccgcgtcgtggagacgctgcccgcagaggtggcgtccctggcgcagggcaacatgagcaccctcgactgcttcaccgccatcgccgagtccgcgaagaagttcgactcggtccgcactagcctgaggtaa

SEQ ID NO: 389 - DNA, 108 bp, synthetic construct
  source 1..108: mol_type = other DNA
  misc_feature 1..108: note = Synthetic
atgatcagcccactgacgcgttgcgcgagaagattgtgcaccgccgctttacaggcttcgacgccgcttcgttctaccatcgacaccaccacgctggcacccagttga

SEQ ID NO: 390 - DNA, 219 bp, synthetic construct
  misc_feature 1..219: note = Synthetic
  source 1..219: mol_type = other DNA
agggaaatacaaccatctccatctactgcatctgtaaccaccccggattgcatgaaagcctttgctgtcttgtttgtgctgagtttaataaaaactgagttaagaccctcctacggactaccgcttcttcaatcaggactttacaacaccaaccagatcttccagaagacccagacccttcctcctttcatcgactcggtccgcactagcctgaggtaa

SEQ ID NO: 391 - DNA, 75 bp, synthetic construct
  source 1..75: mol_type = other DNA
  misc_feature 1..75: note = Synthetic
atgtttccggatgcaaaccgctctattatgctctcccgtcctcgtaggatctgtctcccgtttctcctcctgtag

SEQ ID NO: 392 - DNA, 27 bp, synthetic construct
  source 1..27: mol_type = other DNA
  misc_feature 1..27: note = Synthetic
atgtcgactcggtccgcactagcctga

SEQ ID NO: 393 - DNA, 33 bp, synthetic construct
  source 1..33: mol_type = other DNA
  misc_feature 1..33: note = Synthetic
atgaaaccatgcaggagattaacactctgctga

SEQ ID NO: 394 - DNA, 174 bp, synthetic construct
  misc_feature 1..174: note = Synthetic
  source 1..174: mol_type = other DNA
atgcaggagattaacactctgctgatcgccctggataaaacatgggatgacgacttattgccgctctgttcccagatatttcgccgcgacattcgtgcatcgtcagaactgacacaggccgaagcagtaaaagctcttggattcctgaaacagaaacgactcggtccgcactag

SEQ ID NO: 395 - DNA, 111 bp, synthetic construct
  misc_feature 1..111: note = Synthetic
  source 1..111: mol_type = other DNA
acgacgcgtatgctcaagatgcaggtgaacgaatgcagtcttacggagatgcgccagacatatcagagtctgaagaggcgttgcgactcggtccgcactagcctgaggtaa

SEQ ID NO: 396 - DNA, 81 bp, synthetic construct
  misc_feature 1..81: note = Synthetic
  source 1..81: mol_type = other DNA
atgctgtcgcttccggaacaggggcgaacgagacagccaagaatgagaaggcggcatatggggcggcttctgaggttctga

SEQ ID NO: 397 - DNA, 102 bp, synthetic construct
  source 1..102: mol_type = other DNA
  misc_feature 1..102: note = Synthetic
atgctcaagatgcaggtgaacgaatgcagtcttacggagatgcgccagacatatcagagtctgaagaggcgttgcgactcggtccgcactagcctgaggtaa

SEQ ID NO: 398 - DNA, 114 bp, synthetic construct
  source 1..114: mol_type = other DNA
  misc_feature 1..114: note = Synthetic
acgatgataatatggccacaaccatggaacaagagacttgcgcgcactctctcacttttgaggaatgcccaaaatgctctgctctacaataccgtaatggattttacctgctaa

SEQ ID NO: 399 - DNA, 108 bp, synthetic construct
  source 1..108: mol_type = other DNA
  misc_feature 1..108: note = Synthetic
ataatgccgccacaaccatggaacaagagacttgcgcgcactctctcacttttgaggaatgcccaaaatgctctgctctacaataccgtaatggattttacctgctaa

SEQ ID NO: 400 - DNA, 39 bp, synthetic construct
  source 1..39: mol_type = other DNA
  misc_feature 1..39: note = Synthetic
atggatatattaaagtcgaataaagtgaacaataattaa

SEQ ID NO: 401 - DNA, 222 bp, synthetic construct
  source 1..222: mol_type = other DNA
  misc_feature 1..222: note = Synthetic
atgaacccaccccaagcccgcgtctcggaacagacaaaggacttgcttagcgttatggttaaccagcaccccgaagaggacgcaaaagtgtgtaaatccagtgataattcaccgctttataacaccatggttatgttatcgtatgggggtgatacggacttactattaagctctgcatgtacccgcacatctaccgactcggtccgcactagcctgaggtaa

SEQ ID NO: 402 - DNA, 222 bp, synthetic construct
  misc_feature 1..222: note = Synthetic
  source 1..222: mol_type = other DNA
atgaacccaccccaagcccgcgtctcggaacagacaaaggacttgcttagcgttgccgttaaccagcaccccgaagaggacgcaaaagtgtgtaaatccagtgataattcaccgctttataacaccatggttatgttatcgtatgggggtgatacggacttactattaagctctgcatgtacccgcacatctaccgactcggtccgcactagcctgaggtaa

SEQ ID NO: 403 - DNA, 168 bp, synthetic construct
  misc_feature 1..168: note = Synthetic
  source 1..168: mol_type = other DNA
atgcaacccgccactctacaatggtcttcgtacgtactacagctaagattaacaactgccgccatattaaaacccggcgaactgagatattttaaatgcggattaggtatctgccccccttcatccagcgtggtgtgcaccgactcggtccgcactagcctgaggtaa

SEQ ID NO: 404 - DNA, 75 bp, synthetic construct
  misc_feature 1..75: note = Synthetic
  source 1..75: mol_type = other DNA
atggtcttcgtacgtactacagctaagattaacaactgccgccatattaaaacccggcgaactgagatattttaa

SEQ ID NO: 405 - DNA, 168 bp, synthetic construct
  misc_feature 1..168: note = Synthetic
  source 1..168: mol_type = other DNA
atgcaacccgccactctacaatggtcttcgtacgtactacagctaagagtaacaactaccgccatattaaaacccggcgaactgagattgtttaaatgcggattaggtatcacccccccttcatccgccgtagtgtgcatcgactcggtccgcactagcctgaggtaa

SEQ ID NO: 406 - DNA, 78 bp, synthetic construct
  source 1..78: mol_type = other DNA
  misc_feature 1..78: note = Synthetic
atgagcaccctcgactgcttcaccgccatcgccgagtccgcgaagaagttcgactcggtccgcactagcctgaggtaa

SEQ ID NO: 407 - DNA, 114 bp, synthetic construct
  source 1..114: mol_type = other DNA
  misc_feature 1..114: note = Synthetic
ctggtatctatgacaaggatgaagccgagcgcattgtcgaaaatactgcatacactgcagaacgtcagccggaacgcgacatcactccggttaacgcgactcggtccgcactag

SEQ ID NO: 408 - DNA, 138 bp, synthetic construct
  misc_feature 1..138: note = Synthetic
  source 1..138: mol_type = other DNA
gtgcccgtctggccttcggatttgctggtatctatgacaaggatgaagccgagcgcattgtcgaaaatactgcatacactgcagaacgtcagccggaacgcgacatcactccggttaacgcgactcggtccgcactag

SEQ ID NO: 409 - DNA, 24 bp, synthetic construct
  source 1..24: mol_type = other DNA
  misc_feature 1..24: note = Synthetic
ttgtacaatatgaacaagaaatag

SEQ ID NO: 410 - DNA, 84 bp, synthetic construct
  source 1..84: mol_type = other DNA
  misc_feature 1..84: note = Synthetic
atgaccaatataagttccataaattgctaccgtaaatataaatccgttaaaataatcgactcggtccgcactagcctgaggtaa

SEQ ID NO: 411 - DNA, 12 bp, synthetic construct
  source 1..12: mol_type = other DNA
  misc_feature 1..12: note = Synthetic
atggcaagctga

SEQ ID NO: 412 - DNA, 87 bp, synthetic construct
  source 1..87: mol_type = other DNA
  misc_feature 1..87: note = Synthetic
ctggagcccctaaacccaaggcaaatcaacaacatcaggacaacgctcggggtcttgtgcttcccgactcggtccgcactagcctga

SEQ ID NO: 413 - DNA, 159 bp, synthetic construct
  source 1..159: mol_type = other DNA
  misc_feature 1..159: note = Synthetic
aaggacgtagaagagggtgtagagggacccatctgctggatatgtagggaagaggtggggaacgagggcatacacccctgcgcctgtaccggagagctggatgtcgtccacccgcagtgtttaagcacttgcgactcggtccgcactagcctgaggtaa

SEQ ID NO: 414 - DNA, 15 bp, synthetic construct
  misc_feature 1..15: note = Synthetic
  source 1..15: mol_type = other DNA
ctgctggatatgtag

SEQ ID NO: 415 - DNA, 105 bp, synthetic construct
  source 1..105: mol_type = other DNA
  misc_feature 1..105: note = Synthetic
ctgcagatggatcttttgctttactatttgacaatgaatggtacccgactgacctccttactgttgacctggacgacgacgtcgactcggtccgcactagcctga

SEQ ID NO: 416 - DNA, 99 bp, synthetic construct
  source 1..99: mol_type = other DNA
  misc_feature 1..99: note = Synthetic
atccgcttatgtgccctctttgcactgctctcgacaaaacttcggacggacttttcacccttctgttcgacaatgaatggtacccaactgacctattga

SEQ ID NO: 417 - DNA, 186 bp, synthetic construct
  source 1..186: mol_type = other DNA
  misc_feature 1..186: note = Synthetic
attttgttgactgacaatgccgcgtgcaaacacggatatccgcttatgtgccctctttgcactgctctcgacaaaacttcggacggacttttcacccttctgttcgacaatgaatggtacccaactgacctattgactgtagacctggaggatgaagtcgactcggtccgcactagcctgaggtaa

SEQ ID NO: 418 - DNA, 120 bp, synthetic construct
  misc_feature 1..120: note = Synthetic
  source 1..120: mol_type = other DNA
atgccgcgtgcaaacacggatatccgcttatgtgccctctttgcactgctctcgacaaaacttcggacggacttttcacccttctgttcgacaatgaatggtacccaactgacctattga

SEQ ID NO: 419 - DNA, 30 bp, synthetic construct
  source 1..30: mol_type = other DNA
  misc_feature 1..30: note = Synthetic
gtgttgttctcggaaatgcctcaggcttag

SEQ ID NO: 420 - DNA, 54 bp, synthetic construct
  source 1..54: mol_type = other DNA
  misc_feature 1..54: note = Synthetic
atgaagagaaagaggctgcagaacatttcttcgactcggtccgcactagcctga

SEQ ID NO: 421 - DNA, 15 bp, synthetic construct
  source 1..15: mol_type = other DNA
  misc_feature 1..15: note = Synthetic
atatacattacttaa

SEQ ID NO: 422 - DNA, 150 bp, synthetic construct
  source 1..150: mol_type = other DNA
  misc_feature 1..150: note = Synthetic
ttgacttcaacgcagttgactacagcgtactctacaatccgggtggccagctggtccaaccaaccgccatcgttggatcacctgtccactatgaagctgtttatcccacaccaatgttgccttacaccgactcggtccgcactagcctga

SEQ ID NO: 423 - DNA, 78 bp, synthetic construct
  misc_feature 1..78: note = Synthetic
  source 1..78: mol_type = other DNA
ttggatcacctgtccactatgaagctgtttatcccacaccaatgttgccttacaccgactcggtccgcactagcctga

SEQ ID NO: 424 - DNA, 30 bp, synthetic construct
  misc_feature 1..30: note = Synthetic
  source 1..30: mol_type = other DNA
atgacaacgactcggtccgcactagcctga

SEQ ID NO: 425 - DNA, 168 bp, synthetic construct
  source 1..168: mol_type = other DNA
  misc_feature 1..168: note = Synthetic
atgttgagtctattcgacacattcagtgcgcgtaggcaggagaacataacgaaatcagctggtggggctgttattcccgggcaaaaaaacactgtgtctatatttgctcttggaccatcaataacagatgacaatgataacgactcggtccgcactagcctgaggtaa

SEQ ID NO: 426 - DNA, 216 bp, synthetic construct
  misc_feature 1..216: note = Synthetic
  source 1..216: mol_type = other DNA
aagacattgactagaaggtcaagaaaagggaactctataatttcaaaaatgttgagcctatttgatacatttaatgcacgtaggcaagaaaacataacaaaatcagccggtggagctatcattcctggacagaaaaatactgtctctatatttgctcttggaccgacaataactgatgataatgagaacgactcggtccgcactagcctgaggtaa

SEQ ID NO: 427 - DNA, 216 bp, synthetic construct
  misc_feature 1..216: note = Synthetic
  source 1..216: mol_type = other DNA
aagacattgactagaaggtcaagaaaagggaactctataatttcaaaagccttgagcctatttgatacatttaatgcacgtaggcaagaaaacataacaaaatcagccggtggagctatcattcctggacagaaaaatactgtctctatatttgctcttggaccgacaataactgatgataatgagaacgactcggtccgcactagcctgaggtaa

SEQ ID NO: 428 - DNA, 33 bp, synthetic construct
  misc_feature 1..33: note = Synthetic
  source 1..33: mol_type = other DNA
ataatgagaacgactcggtccgcactagcctga

SEQ ID NO: 429 - DNA, 21 bp, synthetic construct
  misc_feature 1..21: note = Synthetic
  source 1..21: mol_type = other DNA
atgcactttagagtcccctag

SEQ ID NO: 430 - DNA, 30 bp, synthetic construct
  source 1..30: mol_type = other DNA
  misc_feature 1..30: note = Synthetic
ttgggcatgaaggggatgacacgagcgtag

SEQ ID NO: 431 - DNA, 216 bp, synthetic construct
  source 1..216: mol_type = other DNA
  misc_feature 1..216: note = Synthetic
ctggtagcgtaccaagccaccgtgtgcgctagggctcaagcccctcccccatcgtgggaccagatgtggaagtgtttgatccgccttaaacccaccctccatgggccaacacccctgctatacagactgggcgctgttcagaatgaagtcaccctgacgcacccaatcaccaaatacatcatgacatgcgactcggtccgcactagcctgaggtaa

SEQ ID NO: 432 - DNA, 216 bp, synthetic construct
  misc_feature 1..216: note = Synthetic
  source 1..216: mol_type = other DNA
ctggtagcgtaccaagccaccgtgtgcgctagggctcaagcccctcccccatcgtgggaccagatgtggaagtgtttgatccgccttaaacccaccctccatgggccaacacccctgctatacagactgggcgctgttcagaatgaagtcaccctgacgcacccagccaccaaatacatcatgacatgcgactcggtccgcactagcctgaggtaa

SEQ ID NO: 433 - DNA, 27 bp, synthetic construct
  source 1..27: mol_type = other DNA
  misc_feature 1..27: note = Synthetic
ttgacgttcgctcatagatacatgtga

SEQ ID NO: 434 - DNA, 51 bp, synthetic construct
  misc_feature 1..51: note = Synthetic
  source 1..51: mol_type = other DNA
ttgattaccttaagagaagagggaccccccataaaaaaactaagactgtga

SEQ ID NO: 435 - DNA, 168 bp, synthetic construct
  misc_feature 1..168: note = Synthetic
  source 1..168: mol_type = other DNA
atggcaagattacgacgacgacgacctcgtggacgctttggcttctaccacagaggacgatggcactggagacacagactgcgacgaagacgctattcccggaggggtaaatttcgatatgcgcgtagaagatcctttgacgactcggtccgcactagcctgaggtaa

SEQ ID NO: 436 - DNA, 57 bp, synthetic construct
  source 1..57: mol_type = other DNA
  misc_feature 1..57: note = Synthetic
aagaaagcggtgacagcctggccggcggccacgcaggaggccaacaggaggagctga

SEQ ID NO: 437 - DNA, 168 bp, synthetic construct
  misc_feature 1..168: note = Synthetic
  source 1..168: mol_type = other DNA
atgaacctggccattgctctggactctcctcacccaggcctcgcgtcttatactattctgccacgcccattttatcatataagcctgaagcccgtgagctggcctgacgagaccatgaggccagccaagtctacagattccgactcggtccgcactagcctgaggtaa

SEQ ID NO: 438 - DNA, 111 bp, synthetic construct
  source 1..111: mol_type = other DNA
  misc_feature 1..111: note = Synthetic
ctgccacgcccattttatcatataagcctgaagcccgtgagctggcctgacgagaccatgaggccagccaagtctacagattccgactcggtccgcactagcctgaggtaa

SEQ ID NO: 439 - DNA, 132 bp, synthetic construct
  misc_feature 1..132: note = Synthetic
  source 1..132: mol_type = other DNA
atgacaacggaggaaaacccacacctgatatgctcaacttcgcacgaagagcagtcagctctttgcagtcacttcgtgagaaaacaatcggcaaatacgctaaagcagaatttgataaatgaccaggtttga

SEQ ID NO: 440 - DNA, 108 bp, synthetic construct
  source 1..108: mol_type = other DNA
  misc_feature 1..108: note = Synthetic
attgcaaaatatggacactcatttaacgtgaaaagatttacgaatgaagaaatgtgtcttaagaatgattatccacgaattatatcatataatcctccaccaaaatag

SEQ ID NO: 441 - DNA, 21 bp, synthetic construct
  misc_feature 1..21: note = Synthetic
  source 1..21: mol_type = other DNA
atggacactcatttaacgtga

SEQ ID NO: 442 - DNA, 159 bp, synthetic construct
  source 1..159: mol_type = other DNA
  misc_feature 1..159: note = Synthetic
ctggcggcatcattttccgcaaaatacggtaatttatttttcgccgtggaaagccctgccagcgccgtcagtgtcgcattcttcggttgtttacccgcaagcgcgttagtcatggtggtagcaaaatctggatcatcgactcggtccgcactagcctga

SEQ ID NO: 443 - DNA, 33 bp, synthetic construct
  source 1..33: mol_type = other DNA
  misc_feature 1..33: note = Synthetic
acgctctttaacaatctggtaaatagctcttga

SEQ ID NO: 444 - DNA, 15 bp, synthetic construct
  misc_feature 1..15: note = Synthetic
  source 1..15: mol_type = other DNA
atgactagcggataa

SEQ ID NO: 445 - DNA, 36 bp, synthetic construct
  misc_feature 1..36: note = Synthetic
  source 1..36: mol_type = other DNA
atgatattcactaagcttgcgcgctgcacgaggtaa

SEQ ID NO: 446 - DNA, 105 bp, synthetic construct
  source 1..105: mol_type = other DNA
  misc_feature 1..105: note = Synthetic
atggctatgtctaacatgacttacaacaacgttttcgaccacgcttacgaaatgctgaaagaaaacatccgttgccacgactcggtccgcactagcctgaggtaa

SEQ ID NO: 447 - DNA, 108 bp, synthetic construct
  misc_feature 1..108: note = Synthetic
  source 1..108: mol_type = other DNA
aagatggctgcctctaacatgacttacaacaacgttttcgaccacgcttacgaaatgctgaaagaaaacatccgttatgacgactcggtccgcactagcctgaggtaa

SEQ ID NO: 448 - DNA, 114 bp, synthetic construct
  misc_feature 1..114: note = Synthetic
  source 1..114: mol_type = other DNA
gtggcgcattcagcatcgaccctgaggaactcatcaaggaagtcgaggaagtcgcacgacagaaagaaattgaccgcgctaaggcccgtaaagaacgtcacgaggggcgcttag

SEQ ID NO: 449 - DNA, 114 bp, synthetic construct
  misc_feature 1..114: note = Synthetic
  source 1..114: mol_type = other DNA
gtggcgcattcagcatcgaccgccaggaactcatcaaggaagtcgaggaagtcgcacgacagaaagaaattgaccgcgctaaggcccgtaaagaacgtcacgaggggcgcttag

SEQ ID NO: 450 - DNA, 204 bp, synthetic construct
  source 1..204: mol_type = other DNA
  misc_feature 1..204: note = Synthetic
atcgatttccgcgacctgcctaccgtctacctggtctcggccatcttccgcgagcgcgaggaaagcgaactgggctgcgagttgctggccggcggtcgcgttttccactgcgaccacatcccgctcctgctcatcgtcacgcccgtggtctttgaccctcagtttacgcgccatgccgactcggtccgcactagcctgaggtaa

SEQ ID NO: 451 - DNA, 33 bp, synthetic construct
  misc_feature 1..33: note = Synthetic
  source 1..33: mol_type = other DNA
atgcagcctgtagctccacctgagaaggtgtaa

SEQ ID NO: 452 - DNA, 24 bp, synthetic construct
  misc_feature 1..24: note = Synthetic
  source 1..24: mol_type = other DNA
atggaagctgtacgcatggcgtag

SEQ ID NO: 453 - DNA, 30 bp, synthetic construct
  misc_feature 1..30: note = Synthetic
  source 1..30: mol_type = other DNA
ttgtttatgtcttttctaagcggtaaataa

SEQ ID NO: 454 - DNA, 57 bp, synthetic construct
  source 1..57: mol_type = other DNA
  misc_feature 1..57: note = Synthetic
atgactggtttttatttggtgatagtcgttctgattgtaaccatattaataatttaa

SEQ ID NO: 455 - DNA, 51 bp, synthetic construct
  source 1..51: mol_type = other DNA
  misc_feature 1..51: note = Synthetic
atgtaccatatgaaaaaaattaacagaattcctacgaattcagaaacatga

SEQ ID NO: 456 - DNA, 69 bp, synthetic construct
  source 1..69: mol_type = other DNA
  misc_feature 1..69: note = Synthetic
attgaaatgtaccatatgaaaaaaattaacagaattcctacgaattcagaaacgccacttcttcagtga

SEQ ID NO: 457 - DNA, 87 bp, synthetic construct
  misc_feature 1..87: note = Synthetic
  source 1..87: mol_type = other DNA
atcatgacgaagaggatgatgccgcggcagcagctgggatgggaggaatctaagatcacacgaggatttaggatacatgacccgtag

SEQ ID NO: 458 - DNA, 183 bp, synthetic construct
  misc_feature 1..183: note = Synthetic
  source 1..183: mol_type = other DNA
atgctgcctgtgagccccgtccaaggacgtaaaatgaagtcaggccgaaagccacggttcgagcaagccgtgctgcctgtagctccatcgtggggatgtaaaaacccgggaggctgcaaaccatggaagctgtacgcatggggtagcagactagtggttacgactcggtccgcactagcctga

SEQ ID NO: 459 - DNA, 24 bp, synthetic construct
  source 1..24: mol_type = other DNA
  misc_feature 1..24: note = Synthetic
atggaagctgtacgcatggggtag

SEQ ID NO: 460 - DNA, 54 bp, synthetic construct
  misc_feature 1..54: note = Synthetic
  source 1..54: mol_type = other DNA
atgatcctgaataaaaaggcgaaaaaggagatgggccaggcgtcctctgcgtga

SEQ ID NO: 461 - DNA, 168 bp, synthetic construct
  misc_feature 1..168: note = Synthetic
  source 1..168: mol_type = other DNA
atgagcgccaactcgtttgatggaagcattgtgagctcatatttgacaacgcgcatgcccccatgggccggggtgcgtcagaatgtgatgggctccagcattgatggtcgccccgtcctgcccgcaaactctactaccttcgactcggtccgcactagcctgaggtaa

SEQ ID NO: 462 - DNA, 141 bp, synthetic construct
  source 1..141: mol_type = other DNA
  misc_feature 1..141: note = Synthetic
attgtgagctcatatttgacaacgcgcatgcccccatgggccggggtgcgtcagaatgtgatgggctccagcattgatggtcgccccgtcctgcccgcaaactctactaccttcgactcggtccgcactagcctgaggtaa

SEQ ID NO: 463 - DNA, 168 bp, synthetic construct
  misc_feature 1..168: note = Synthetic
  source 1..168: mol_type = other DNA
atgtctgttacagtcaagagaatcattgacaacacagtcatagttccaaaacttcctgcaaatgaggatccagtggaatacccggcagattacttcagaaaatcaaaggagattcctctttacatcaatactacaaaaagcgactcggtccgcactagcctgaggtaa

SEQ ID NO: 464 - DNA, 153 bp, synthetic construct
  source 1..153: mol_type = other DNA
  misc_feature 1..153: note = Synthetic
aagagaatcattgacaacacagtcatagttccaaaacttcctgcaaatgaggatccagtggaatacccggcagattacttcagaaaatcaaaggagattcctctttacatcaatactacaaaaagcgactcggtccgcactagcctgaggtaa

SEQ ID NO: 465 - DNA, 135 bp, synthetic construct
  misc_feature 1..135: note = Synthetic
  source 1..135: mol_type = other DNA
atggtggaggctatggtttccagagcccgaattgatgcacggattgatttcgaatctggaaggataaagaaagaagagttcactgagatcatgaagatctgttccaccattgaagagctcagacggcaaaaatag

SEQ ID NO: 466 - DNA, 135 bp, synthetic construct
  misc_feature 1..135: note = Synthetic
  source 1..135: mol_type = other DNA
atggtggaggctatggtttccagagcccgagccgatgcacggattgatttcgaatctggaaggataaagaaagaagagttcactgagatcatgaagatctgttccaccattgaagagctcagacggcaaaaatag

SEQ ID NO: 467 - DNA, 168 bp, synthetic construct
  source 1..168: mol_type = other DNA
  misc_feature 1..168: note = Synthetic
atgcatccggtgctgcggcagatgcgcccccctcctcagcagcggcaagagcaagagcagcggcagacatgcagggcaccctccccttctcctaccgcgtcaggaggggcaacatccgcggctgacgcggcggcagatggcgactcggtccgcactagcctgaggtaa

SEQ ID NO: 468 - DNA, 90 bp, synthetic construct
  source 1..90: mol_type = other DNA
  misc_feature 1..90: note = Synthetic
attctatcaaagatgttatacacgattacatttgttggctcagtatgcctgatgaagcaagaccatctatcggaaacgtctttaacgtga

SEQ ID NO: 469 - DNA, 132 bp, synthetic construct
  misc_feature 1..132: note = Synthetic
  source 1..132: mol_type = other DNA
atggagatcattaagcaagacagcgtcagacgcacgctggaaaagagctgctccagccggtgcggcaacaccagccagcaaaaggcgcagacgctcataaggatgaggcattgcacccagataaggatgtag

SEQ ID NO: 470 - DNA, 156 bp, synthetic construct
  misc_feature 1..156: note = Synthetic
  source 1..156: mol_type = other DNA
ctgcggcagatgcgcccccctcctcagcagcggcaagagcaagagcagcggcagacatgcagggcaccctccccttctcctaccgcgtcaggaggggcaacatccgcggctgacgcggcggcagatggcgactcggtccgcactagcctgaggtaa

SEQ ID NO: 471 - DNA, 213 bp, synthetic construct
  source 1..213: mol_type = other DNA
  misc_feature 1..213: note = Synthetic
atggaaaacctcagcagtcgcttagacttactgcaagagcagctaatgaacctatatgaacaggacagtaaattgatagaagatcaaattaagcagtggaatctaattagacaagaacaagttcttttccatttcgccagaaaaaatggggtaatgagaattggattgcaggcagttccatctttcgactcggtccgcactagcctgaggtaa

SEQ ID NO: 472 - DNA, 213 bp, synthetic construct
  misc_feature 1..213: note = Synthetic
  source 1..213: mol_type = other DNA
atggaaaacctcagcagtcgcttagacttactgcaagagcagctagccaacctatatgaacaggacagtaaattgatagaagatcaaattaagcagtggaatctaattagacaagaacaagttcttttccatttcgccagaaaaaatggggtaatgagaattggattgcaggcagttccatctttcgactcggtccgcactagcctgaggtaa

SEQ ID NO: 473 - DNA, 105 bp, synthetic construct
  misc_feature 1..105: note = Synthetic
  source 1..105: mol_type = other DNA
atggctatgtctaacatgacttacaacaacgttttcgaccacgcttacgaaatgctgaaagaaaacatccgttatgacgactcggtccgcactagcctgaggtaa

SEQ ID NO: 474 - DNA, 165 bp, synthetic construct
  source 1..165: mol_type = other DNA
  misc_feature 1..165: note = Synthetic
acgaccatacgtagtgatgatttgtcgaatcagatcactcagatttcaggttcttcaaaaaaagaagaagaaaagaaaaagcagcagatgcttaccggtgttttggggctgcagcctaatatggccagtcatcccgtcgactcggtccgcactagcctgaggtaa

SEQ ID NO: 475 - DNA, 144 bp, synthetic construct
  source 1..144: mol_type = other DNA
  misc_feature 1..144: note = Synthetic
atgatttgtcgaatcagatcactcagatttcaggttcttcaaaaaaagaagaagaaaagaaaaagcagcagatgcttaccggtgttttggggctgcagcctaatatggccagtcatcccgtcgactcggtccgcactagcctga

SEQ ID NO: 476 - DNA, 159 bp, synthetic construct
  source 1..159: mol_type = other DNA
  misc_feature 1..159: note = Synthetic
atacgtagtgatgatttgtcgaatcagatcactcagatttcaggttcttcaaaaaaagaagaagaaaagaaaaagcagcagatgcttaccggtgttttggggctgcagcctaatatggccagtcatcccgtcgactcggtccgcactagcctgaggtaa

SEQ ID NO: 477 - DNA, 123 bp, synthetic construct
  misc_feature 1..123: note = Synthetic
  source 1..123: mol_type = other DNA
atttcaggaagttcttcaaaaaaagaggaggaaaagaagaagcagcagatgcttaccggtgttttagggctgcagcctaccatggccaatcatcccgactcggtccgcactagcctgaggtaa

SEQ ID NO: 478 - DNA, 147 bp, synthetic construct
  source 1..147: mol_type = other DNA
  misc_feature 1..147: note = Synthetic
ttgtcagatttcccaaaacgtgaggtgtatttgaagccacgaccatacgtggtgatgatttgtcgaatcagatcactcagatttcaggaagttcttcaaaaaaagaggaggaaaagaagaagcagcagatgcttaccggtgttttag

SEQ ID NO: 479 - DNA, 15 bp, synthetic construct
  misc_feature 1..15: note = Synthetic
  source 1..15: mol_type = other DNA
acgcaacagacctag

SEQ ID NO: 480 - DNA, 123 bp, synthetic construct
  source 1..123: mol_type = other DNA
  misc_feature 1..123: note = Synthetic
attaagcaagacagcgtcagacgcacgctggaaaagagctgctccagccggtgcggcaacaccagccagcaaaaggcgcagacgctcataaggatgaggcattgcacccagataaggatgtag

SEQ ID NO: 481 - DNA, 135 bp, synthetic construct
  source 1..135: mol_type = other DNA
  misc_feature 1..135: note = Synthetic
acgatagagatcattaagcaagacagcgtcagacgcacgctggaaaagagctgctccagccggtgcggcaacaccagccagcaaaaggcgcagacgctcataaggatgaggcattgcacccagataaggatgtag

SEQ ID NO: 482 - DNA, 132 bp, synthetic construct
  misc_feature 1..132: note = Synthetic
  source 1..132: mol_type = other DNA
atgcagatcattaagcaagacagcgtcagacgcacgctggaaaagagctgctccagccggtgcggcaacaccagccagcaaaaggcgcagacgctcataaggatgaggcattgcacccagataaggatgtag

SEQ ID NO: 483 - DNA, 225 bp, synthetic construct
  misc_feature 1..225: note = Synthetic
  source 1..225: mol_type = other DNA
attatttcttgttgtttaaacaaattccttttgtgtgagacatcctcaaggcacaagatggctaaagccacaggccgatacaatctcgtgcccccaaagaaagatatggaaaagggagtgatttttagtgatctttgtaatttcttgattactcaaaccctgcaaggttggaaggtttattgggcaggaattgagttcgactcggtccgcactagcctgaggtaa

SEQ ID NO: 484 - DNA, 225 bp, synthetic construct
  source 1..225: mol_type = other DNA
  misc_feature 1..225: note = Synthetic
attatttcttgttgtttaaacaaattccttttgtgtgagacatcctcaaggcacaaggccgctaaagccacaggccgatacaatctcgtgcccccaaagaaagatatggaaaagggagtgatttttagtgatctttgtaatttcttgattactcaaaccctgcaaggttggaaggtttattgggcaggaattgagttcgactcggtccgcactagcctgaggtaa

SEQ ID NO: 485 - DNA, 72 bp, synthetic construct
  misc_feature 1..72: note = Synthetic
  source 1..72: mol_type = other DNA
ctgcgcaccgaagacctaacaacgatggcggacgattcaggtacagaaacgactcggtccgcactagcctga

SEQ ID NO: 486 - DNA, 156 bp, synthetic construct
  source 1..156: mol_type = other DNA
  misc_feature 1..156: note = Synthetic
atgtccgacgagggctaccgagagctcgtggagagtaagagtgctcccacgaccccgggaccctggagcccggacagggagagatggaagcgtcacgaggcagcgtggaagcagcactgtagctggagcgactcggtccgcactagcctgaggtaa

SEQ ID NO: 487 - DNA, 48 bp, synthetic construct
  misc_feature 1..48: note = Synthetic
  source 1..48: mol_type = other DNA
atgatcatgttaccatacatcatatcgactcggtccgcactagcctga

SEQ ID NO: 488 - DNA, 144 bp, synthetic construct
  misc_feature 1..144: note = Synthetic
  source 1..144: mol_type = other DNA
attgccagcattgtcactgtcgctcacgggcaaacaattgtccatattaccttaggacataatcacactcttgtagggcccccaattacttcagaggttatttggaccaaacttggcgactcggtccgcactagcctgaggtaa

SEQ ID NO: 489 - DNA, 36 bp, synthetic construct
  source 1..36: mol_type = other DNA
  misc_feature 1..36: note = Synthetic
atgacagctgagcatacacgacgaatctatcactag

SEQ ID NO: 490 - DNA, 27 bp, synthetic construct
  source 1..27: mol_type = other DNA
  misc_feature 1..27: note = Synthetic
atgtcaagcggttcttgccctgcatag

SEQ ID NO: 491 - DNA, 132 bp, synthetic construct
  misc_feature 1..132: note = Synthetic
  source 1..132: mol_type = other DNA
atggagaccattaagcaagacagcgtcagacgcacgctggaaaagagctgctccagccggtgcggcaacaccagccagcaaaaggcgcagacgctcataaggatgaggcattgcacccagataaggatgtag

SEQ ID NO: 492 - DNA, 132 bp, synthetic construct
  misc_feature 1..132: note = Synthetic
  source 1..132: mol_type = other DNA
atggagatcagtaagcaagacagcgtcagacgcacgctggaaaagagctgctccagccggtgcggcaacaccagccagcaaaaggcgcagacgctcataaggatgaggcattgcacccagataaggatgtag

SEQ ID NO: 493 - DNA, 132 bp, synthetic construct
  source 1..132: mol_type = other DNA
  misc_feature 1..132: note = Synthetic
atggagatcatgaagcaagacagcgtcagacgcacgctggaaaagagctgctccagccggtgcggcaacaccagccagcaaaaggcgcagacgctcataaggatgaggcattgcacccagataaggatgtag

SEQ ID NO: 494 - DNA, 135 bp, synthetic construct
  source 1..135: mol_type = other DNA
  misc_feature 1..135: note = Synthetic
acgatggagatcattaagcaagacagcgtcagacgcacgctggaaaagagctgctccagccggtgcggcaacaccagccagcaaaaggcgcagacgctcataaggatgaggcattgcacccagataaggatgtag

SEQ ID NO: 495 - DNA, 168 bp, synthetic construct
  source 1..168: mol_type = other DNA
  misc_feature 1..168: note = Synthetic
atgtcttggtttactggagcatctctggctgccggttcactcgtggacatggcaggcaccatttcatcaattgtggcacaacaaagacaaattgatctgatggcagaagcaaatagaatccaggcagattgggtgcgccgcgactcggtccgcactagcctgaggtaa

SEQ ID NO: 496 - DNA, 144 bp, synthetic construct
  source 1..144: mol_type = other DNA
  misc_feature 1..144: note = Synthetic
ctggctgccggttcactcgtggacatggcaggcaccatttcatcaattgtggcacaacaaagacaaattgatctgatggcagaagcaaatagaatccaggcagattgggtgcgccgcgactcggtccgcactagcctgaggtaa

SEQ ID NO: 497 - DNA, 21 bp, synthetic construct
  misc_feature 1..21: note = Synthetic
  source 1..21: mol_type = other DNA
atgggaccgataacgaagtag

SEQ ID NO: 498 - DNA, 93 bp, synthetic construct
  misc_feature 1..93: note = Synthetic
  source 1..93: mol_type = other DNA
atgagaacactggtgaaatctctgagaaagtcaagctgggcactaaggcactggctggtcaatggctggcttacggtgttactcgcagtgtga

SEQ ID NO: 499 - DNA, 36 bp, synthetic construct
  source 1..36: mol_type = other DNA
  misc_feature 1..36: note = Synthetic
atggctggcttacggtgttactcgcagtgtgactaa

SEQ ID NO: 500 - DNA, 63 bp, synthetic construct
  source 1..63: mol_type = other DNA
  misc_feature 1..63: note = Synthetic
atggccctggcttacgggtccaaagagttcggcttccgtcaacaacgactcggtccgcactag

SEQ ID NO: 501 - DNA, 93 bp, synthetic construct
  source 1..93: mol_type = other DNA
  misc_feature 1..93: note = Synthetic
atgagaacactggtgaaatctctgagaaagtcaagctgggcactaaggcactggctggtcagccgctggcttacggtgttactcgcagtgtga

SEQ ID NO: 502 - DNA, 63 bp, synthetic construct
  misc_feature 1..63: note = Synthetic
  source 1..63: mol_type = other DNA
atgacgctggcttacgggtccaaagagttcggcttccgtcaacaacgactcggtccgcactag

SEQ ID NO: 503 - DNA, 21 bp, synthetic construct
  source 1..21: mol_type = other DNA
  misc_feature 1..21: note = Synthetic
atgtattttaacactaattag

SEQ ID NO: 504 - DNA, 198 bp, synthetic construct
  source 1..198: mol_type = other DNA
  misc_feature 1..198: note = Synthetic
aagcgcccgacagccttccagttcctgcaagaaatcaagccggaagccgtagcgtacatcaccattaagaccactctggcttgcctaaccagtgctgacaatacaaccgttcaggctgtagcaagcgcaatcggtcgggccattgaggacgaggctcgcttcggtcgtatccgtgaccttcgactcggtccgcactag

SEQ ID NO: 505 - DNA, 132 bp, synthetic construct
  source 1..132: mol_type = other DNA
  misc_feature 1..132: note = Synthetic
atggagatctttaagcaagacagcgtcagacgcacgctggaaaagagctgctccagccggtgcggcaacaccagccagcaaaaggcgcagacgctcataaggatgaggcattgcacccagataaggatgtag

SEQ ID NO: 506 - DNA, 171 bp, synthetic construct
  source 1..171: mol_type = other DNA
  misc_feature 1..171: note = Synthetic
aagttgggctcggcccaacgcaacagacctaggcacacgatggagatgattaagcaagacagcgtcagacgcacgctggaaaagagctgctccagccggtgcggcaacaccagccagcaaaaggcgcagacgctcataaggatgaggcattgcacccagataaggatgtag

SEQ ID NO: 507 - DNA, 132 bp, synthetic construct
  source 1..132: mol_type = other DNA
  misc_feature 1..132: note = Synthetic
atggaggtcattaagcaagacagcgtcagacgcacgctggaaaagagctgctccagccggtgcggcaacaccagccagcaaaaggcgcagacgctcataaggatgaggcattgcacccagataaggatgtag

SEQ ID NO: 508 - DNA, 132 bp, synthetic construct
  misc_feature 1..132: note = Synthetic
  source 1..132: mol_type = other DNA
atggatatcattaagcaagacagcgtcagacgcacgctggaaaagagctgctccagccggtgcggcaacaccagccagcaaaaggcgcagacgctcataaggatgaggcattgcacccagataaggatgtag

SEQ ID NO: 509 - DNA, 132 bp, synthetic construct
  source 1..132: mol_type = other DNA
  misc_feature 1..132: note = Synthetic
atggcgatcattaagcaagacagcgtcagacgcacgctggaaaagagctgctccagccggtgcggcaacaccagccagcaaaaggcgcagacgctcataaggatgaggcattgcacccagataaggatgtag

SEQ ID NO: 510 - DNA, 132 bp, synthetic construct
  source 1..132: mol_type = other DNA
  misc_feature 1..132: note = Synthetic
ctggagatcattaagcaagacagcgtcagacgcacgctggaaaagagctgctccagccggtgcggcaacaccagccagcaaaaggcgcagacgctcataaggatgaggcattgcacccagataaggatgtag

SEQ ID NO: 511 - DNA, 165 bp, synthetic construct
  source 1..165: mol_type = other DNA
  misc_feature 1..165: note = Synthetic
atgatctgccttgttttcttatgcgtcttgacgttagctcggggtgaaatctatcctcccatttgtccggcccctggcgtagggaacgatgaagcggttagagctggggagttgctgttagagatatctgcatacagcgactcggtccgcactagcctgaggtaa

SEQ ID NO: 512 - DNA, 228 bp, synthetic construct
  misc_feature 1..228: note = Synthetic
  source 1..228: mol_type = other DNA
aagatcgtcttgtccttcagcgtgctcattacctgtctagccgtctcgcatttccacgaagcggccctggctgtacgctacgagacgccgctggaacgcgcgcttttggcggccgtcaaggtgtttctcagcctggttttcactctgctgatggtgctgagaatcatgaccctgcgcacctttttgcaaacctacttttccgactcggtccgcactagcctgaggtaa

SEQ ID NO: 513 - DNA, 141 bp, synthetic construct
  misc_feature 1..141: note = Synthetic
  source 1..141: mol_type = other DNA
atgcacacgatggagatcattaagcaagacagcgtcagacgcacgctggaaaagagctgctccagccggtgcggcaacaccagccagcaaaaggcgcagacgctcataaggatgaggcattgcacccagataaggatgtag

SEQ ID NO: 514 - DNA, 225 bp, synthetic construct
  misc_feature 1..225: note = Synthetic
  source 1..225: mol_type = other DNA
atccctcgcacgcgcctcaaagtgttagtcgaggtgctgggcgtgttgcagagtatcagcggtacgccgcacacgcgcgaagtgatccaccagacgttgtttcgattgtgctcggcggccgcagccacatcgggcctgtgttcatcccctcccccattgtgtgtgtcctcatcttcctccgtcccttctgtcccaaccgactcggtccgcactagcctgaggtaa

SEQ ID NO: 515 - DNA, 111 bp, synthetic construct
  source 1..111: mol_type = other DNA
  misc_feature 1..111: note = Synthetic
attgtgctcggcggccgcagccacatcgggcctgtgttcatcccctcccccattgtgtgtgtcctcatcttcctccgtcccttctgtcccaaccgactcggtccgcactag

SEQ ID NO: 516 - DNA, 168 bp, synthetic construct
  misc_feature 1..168: note = Synthetic
  source 1..168: mol_type = other DNA
atgatgatctgccttgttttcttatgcgtcttgacgttagctcggggtgaaatctatcctcccatttgtccggcccctggcgtagggaacgatgaagcggttagagctggggagttgctgttagagatatctgcatacagcgactcggtccgcactagcctgaggtaa

SEQ ID NO: 517 - DNA, 132 bp, synthetic construct
  source 1..132: mol_type = other DNA
  misc_feature 1..132: note = Synthetic
atgggaacgctggacgggccgtcagattccttgaataatgtcttggttcacaggagcagctcttgcagccgggtccctcgtggacatggctggtactgtatcatccattgtggcacaacaccgccaaattga

SEQ ID NO: 518 - DNA, 132 bp, synthetic construct
  misc_feature 1..132: note = Synthetic
  source 1..132: mol_type = other DNA
atgggaacgctggacgggccgtcagattccttgaatagcctcttggttcacaggagcagctcttgcagccgggtccctcgtggacatggctggtactgtatcatccattgtggcacaacaccgccaaattga

SEQ ID NO: 519 - DNA, 201 bp, synthetic construct
  misc_feature 1..201: note = Synthetic
  source 1..201: mol_type = other DNA
gtgagcggagccgagcagcggaccttcggagccatgaagccggtgttggtgctcgcgatcctggccgtcctgttcctgagactcgcggactcggtgccccggcccctgaatgtggtggtatcggagatcaaatcggcccactttcgggtggaggagaaccaatgctggttccacgactcggtccgcactagcctgaggtaa

SEQ ID NO: 520 - DNA, 201 bp, synthetic construct
  misc_feature 1..201: note = Synthetic
  source 1..201: mol_type = other DNA
gtgagcggagccgagcagcggaccttcggagccgccaagccggtgttggtgctcgcgatcctggccgtcctgttcctgagactcgcggactcggtgccccggcccctgaatgtggtggtatcggagatcaaatcggcccactttcgggtggaggagaaccaatgctggttccacgactcggtccgcactagcctgaggtaa

SEQ ID NO: 521 - DNA, 222 bp, synthetic construct
  source 1..222: mol_type = other DNA
  misc_feature 1..222: note = Synthetic
aaggagaggcaccacgaaaacaagaatcactctcagatgtcatcggactccttgacgtcgtcttatcctacaagcccacagaaattggagaagacagaagctggctccatggtatcatcgacaacccaaaagaaaacaagccatcatgcaaagccgacgataacaacaaagacagagcaatctcaacgtcgacccgactcggtccgcactagcctgaggtaa

SEQ ID NO: 522 - DNA, 222 bp, synthetic construct
  misc_feature 1..222: note = Synthetic
  source 1..222: mol_type = other DNA
aaggagaggcaccacgaaaacaagaatcactctcagatgtcatcggactccttggcctcgtcttatcctacaagcccacagaaattggagaagacagaagctggctccatggtatcatcgacaacccaaaagaaaacaagccatcatgcaaagccgacgataacaacaaagacagagcaatctcaacgtcgacccgactcggtccgcactagcctgaggtaa

SEQ ID NO: 523 - DNA, 222 bp, synthetic construct
  source 1..222: mol_type = other DNA
  misc_feature 1..222: note = Synthetic
acgtccctgattcccttcataaagctgttgaccggccctagaaagaccaagagcatgctgtgggcccactgcggtcgcttcttgcgttatcatctgctcccgctgctactgtgtagactgccattcttactcttttttcagcggccgcagtgggcccacggcttggacattgtcgaggaggacgagtggctacgcgactcggtccgcactagcctgaggtaa

SEQ ID NO: 524 - DNA, 45 bp, synthetic construct
  source 1..45: mol_type = other DNA
  misc_feature 1..45: note = Synthetic
aagggacatctgggactggatatgcgaggtgctgagcgactttaa

SEQ ID NO: 525 - DNA, 117 bp, synthetic construct
  source 1..117: mol_type = other DNA
  misc_feature 1..117: note = Synthetic
atgccacaactgcctgggattccctttgtgtcctgccagcgcgggtataggggggtctggcgaggagacggcattatgcacactcgctgccactcgactcggtccgcactagcctga

SEQ ID NO: 526 - DNA, 168 bp, synthetic construct
  misc_feature 1..168: note = Synthetic
  source 1..168: mol_type = other DNA
atgagcaagatctttgtcaaccccagtgcaatcagagctggtctggcagatctggagatggcggaggagactattgatttgatcaatagaaccatagaggataatcaggcccatctgcaaggagtccccatagaggtcgacgactcggtccgcactagcctgaggtaa

SEQ ID NO: 527 - DNA, 171 bp, synthetic construct
  misc_feature 1..171: note = Synthetic
  source 1..171: mol_type = other DNA
atcgccagcaagatctttgtcaaccccagtgcaatcagagctggtctggcagatctggagatggcggaggagactattgatttgatcaatagaaccatagaggataatcaggcccatctgcaaggagtccccatagaggtcgacgactcggtccgcactagcctgaggtaa

SEQ ID NO: 528 - DNA, 48 bp, synthetic construct
  source 1..48: mol_type = other DNA
  misc_feature 1..48: note = Synthetic
atgcgaatcgacctctaccacaaccattcaaccgacggctactgttga

SEQ ID NO: 529 - DNA, 48 bp, synthetic construct
  misc_feature 1..48: note = Synthetic
  source 1..48: mol_type = other DNA
atgctagtgggtctgctgatactgcagctcttctcactatgttcctag

SEQ ID NO: 530 - DNA, 30 bp, synthetic construct
  source 1..30: mol_type = other DNA
  misc_feature 1..30: note = Synthetic
atgttcctagcagcaataatcaagctttga

SEQ ID NO: 531 - DNA, 153 bp, synthetic construct
  misc_feature 1..153: note = Synthetic
  source 1..153: mol_type = other DNA
atcaacatcatcattcttcacttcccctcctggagtatacatctgttcccagcatgttccttgagtcaaatgcaacacttcaatgtacacactgcttgttccaccagccactgggaggaatctcgttttgcgactcggtccgcactagcctga

SEQ ID NO: 532 - DNA, 129 bp, synthetic construct
  source 1..129: mol_type = other DNA
  misc_feature 1..129: note = Synthetic
ctggagtatacatctgttcccagcatgttccttgagtcaaatgcaacacttcaatgtacacactgcttgttccaccagccactgggaggaatctcgttttgcgactcggtccgcactagcctgaggtaa

SEQ ID NO: 533 - DNA, 39 bp, synthetic construct
  misc_feature 1..39: note = Synthetic
  source 1..39: mol_type = other DNA
atggaggagatcgaggaggccgccgaggaggagttctag

SEQ ID NO: 534 - DNA, 186 bp, synthetic construct
  source 1..186: mol_type = other DNA
  misc_feature 1..186: note = Synthetic
atgagaaggaattatttcacatcagaggtgtctcactgcagagccacagaatacataatgaagggggtgtacatcaatactgccttacttaatgcatcttgtgcagcaatggatgatttccaattaattccaatgataagcaagtgtagaactaaggagggaaggcgacgactcggtccgcactag

SEQ ID NO: 535 - DNA, 129 bp, synthetic construct
  misc_feature 1..129: note = Synthetic
  source 1..129: mol_type = other DNA
atgtttccctgctgcaaagaactcaaggactacctcgacgaggaggagagcgccgggctgtacgacgccgtgacgtggagccactcgaaccccggcttccggctcgtcacgcgcacagaccccagatga

SEQ ID NO: 536 - DNA, 99 bp, synthetic construct
  misc_feature 1..99: note = Synthetic
  source 1..99: mol_type = other DNA
atgaagctatcaaacgtgttagagcctgggttggcttcgatgcagaaggtgcccatgcgatacgtgatagcattgggacaaatttcccattacaattag

SEQ ID NO: 537 - DNA, 132 bp, synthetic construct
  misc_feature 1..132: note = Synthetic
  source 1..132: mol_type = other DNA
ttgagtcaagctctcatgtcgcctgtaccatctgagcagatggcccatcctatgttaccgttgtatcattccaaacttctacgacacactttccgcggttcggaatctcgacccgccctctctcccctgtag

SEQ ID NO: 538 - DNA, 222 bp, synthetic construct
  misc_feature 1..222: note = Synthetic
  source 1..222: mol_type = other DNA
acgtccctgattcccttcataaagctgttgaccggccctagaaagaccaagagcgccctgtgggcccactgcggtcgcttcttgcgttatcatctgctcccgctgctactgtgtagactgccattcttactcttttttcagcggccgcagtgggcccacggcttggacattgtcgaggaggacgagtggctacgcgactcggtccgcactagcctgaggtaa

SEQ ID NO: 539 - DNA, 114 bp, synthetic construct
  misc_feature 1..114: note = Synthetic
  source 1..114: mol_type = other DNA
atgagaaccattgggactcatcctagctccagtgctggtctgaaaaatgatcttcttgaaaatttgcaggcctatcagaaacgaatgggggtgcagatgcaacggttcaagtga

SEQ ID NO: 540 - DNA, 168 bp, synthetic construct
  source 1..168: mol_type = other DNA
  misc_feature 1..168: note = Synthetic
atggatctggtgtccttctttaatccgtatctagagaatgtacgaactaagaaaaaaacaaaatctacttttctccggatttttccgcgcggtataatgcacgatggagcacccggcttaatgaagactctttgtgactccgactcggtccgcactagcctgaggtaa

SEQ ID NO: 541 - DNA, 171 bp, synthetic construct
  misc_feature 1..171: note = Synthetic
  source 1..171: mol_type = other DNA
gtggccgatctggtgtccttctttaatccgtatctagagaatgtacgaactaagaaaaaaacaaaatctacttttctccggatttttccgcgcggtataatgcacgatggagcacccggcttaatgaagactctttgtgactccgactcggtccgcactagcctgaggtaa

SEQ ID NO: 542 - DNA, 84 bp, synthetic construct
  misc_feature 1..84: note = Synthetic
  source 1..84: mol_type = other DNA
atgacaagttcatccaacacaaccgctcaacaacgccatatctatcagtgtccaaaaactatcttctatcctttgaaactataa

SEQ ID NO: 543 - DNA, 33 bp, synthetic construct
  source 1..33: mol_type = other DNA
  misc_feature 1..33: note = Synthetic
atgctgcctacgactcggtccgcactagcctga

SEQ ID NO: 544 - DNA, 168 bp, synthetic construct
  misc_feature 1..168: note = Synthetic
  source 1..168: mol_type = other DNA
atggcggcggcgccgctgcggttgacgccggccacgcagtgcacgagcgtgggcttcttctcggcctcgaggcgcgccagcagcttcacgagcgcgggcatgatggaagtgatgttcgtcttatcgtcgtctctcagcggcgactcggtccgcactagcctgaggtaa

SEQ ID NO: 545 - DNA, 120 bp, synthetic construct
  source 1..120: mol_type = other DNA
  misc_feature 1..120: note = Synthetic
gtgggcttcttctcggcctcgaggcgcgccagcagcttcacgagcgcgggcatgatggaagtgatgttcgtcttatcgtcgtctctcagcggcgactcggtccgcactagcctgaggtaa

SEQ ID NO: 546 - DNA, 60 bp, synthetic construct
  misc_feature 1..60: note = Synthetic
  source 1..60: mol_type = other DNA
ataacctcccgaataaatagtctgctcccgccggagcccgagaagccggcggcgccatga

SEQ ID NO: 547 - DNA, 168 bp, synthetic construct
  misc_feature 1..168: note = Synthetic
  source 1..168: mol_type = other DNA
atgaaccacttcttcaagcagatcggcgccggcgtgcgcaagcccgcgacgcggctcacgcccagcggcgcgcacgagattcggctgttcacggtgcccgtggagctccccgagttcatatacaacaacgagaacctcttcgactcggtccgcactagcctgaggtaa

SEQ ID NO: 548 - DNA, 36 bp, synthetic construct
  source 1..36: mol_type = other DNA
  misc_feature 1..36: note = Synthetic
acgagaacctcttcgactcggtccgcactagcctga

SEQ ID NO: 549 - DNA, 21 bp, synthetic construct
  misc_feature 1..21: note = Synthetic
  source 1..21: mol_type = other DNA
atggtactacgtatactttaa

SEQ ID NO: 550 - DNA, 84 bp, synthetic construct
  misc_feature 1..84: note = Synthetic
  source 1..84: mol_type = other DNA
acgaagatattgcagaatttgttaaagaaaatgagagagttaatgtatcgagagtggttgacgactcggtccgcactagcctga

SEQ ID NO: 551 - DNA, 36 bp, synthetic construct
  misc_feature 1..36: note = Synthetic
  source 1..36: mol_type = other DNA
ctgctgatactgcagctcttctcactatgttcctag

SEQ ID NO: 552 - DNA, 72 bp, synthetic construct
  source 1..72: mol_type = other DNA
  misc_feature 1..72: note = Synthetic
acgaaaccccgcctctgcataatggcgcactacttactatcagttctatcgactcggtccgcactagcctga

SEQ ID NO: 553 - DNA, 168 bp, synthetic construct
  misc_feature 1..168: note = Synthetic
  source 1..168: mol_type = other DNA
atggcccagggatcgcgagccccatcgggcccgccactgcccgttctccccgtggacgactggctcaactttcgggttgacctgtttggagacgagcaccggcgcctgctgctcgagatgttgacccagggctgctccaacgactcggtccgcactagcctgaggtaa

SEQ ID NO: 554 - DNA, 117 bp, synthetic construct
  misc_feature 1..117: note = Synthetic
  source 1..117: mol_type = other DNA
gtggacgactggctcaactttcgggttgacctgtttggagacgagcaccggcgcctgctgctcgagatgttgacccagggctgctccaacgactcggtccgcactagcctgaggtaa

SEQ ID NO: 555 - DNA, 27 bp, synthetic construct
  source 1..27: mol_type = other DNA
  misc_feature 1..27: note = Synthetic
atgggatgctgtacctccgggatttga

SEQ ID NO: 556 - DNA, 147 bp, synthetic construct
  source 1..147: mol_type = other DNA
  misc_feature 1..147: note = Synthetic
atcccagaaggagcaggagaggtggatctaaatacctggttggaaagatctctggagaaaatcaatcaggaggcaagattacacttccacccagagttccttttccgtctctggaacgccgactcggtccgcactagcctgaggtaa

SEQ ID NO: 557 - DNA, 27 bp, synthetic construct
  source 1..27: mol_type = other DNA
  misc_feature 1..27: note = Synthetic
atgcctgattgcagcaggaaaacttag

SEQ ID NO: 558 - DNA, 27 bp, synthetic construct
  source 1..27: mol_type = other DNA
  misc_feature 1..27: note = Synthetic
atgctacggagacacagtggagactga

SEQ ID NO: 559 - DNA, 225 bp, synthetic construct
  source 1..225: mol_type = other DNA
  misc_feature 1..225: note = Synthetic
gtgcgcagcctcgagcgccgtgcagttgagagcagcggctacttggacgcgatccttgcgtacttggaagagtcgcgctacccgttgctgcgccacgccaagcgcttgctcttcgacctctgcttcacgctgctcgtgctgctctgcgtgcttgtgcgcctgtgctggcgaaacctgggcgccgcgctgatgctagccgactcggtccgcactagcctgaggtaa

SEQ ID NO: 560 - DNA, 51 bp, synthetic construct
  source 1..51: mol_type = other DNA
  misc_feature 1..51: note = Synthetic
atgaagattgatccttcacgccccgactcggtccgcactagcctgaggtaa

SEQ ID NO: 561 - DNA, 174 bp, synthetic construct
  source 1..174: mol_type = other DNA
  misc_feature 1..174: note = Synthetic
attctaatgcagagtgacatggagggcagtcgtgataacctcacagtggatgatgagttaaagacaacatggaggttagcttacagagttgtatctctcctattaatggtgagtgctttgataatttctatagtaatcttgacgagcgactcggtccgcactagcctgaggtaa

SEQ ID NO: 562 - DNA, 174 bp, synthetic construct
  misc_feature 1..174: note = Synthetic
  source 1..174: mol_type = other DNA
attctagcccagagtgacatggagggcagtcgtgataacctcacagtggatgatgagttaaagacaacatggaggttagcttacagagttgtatctctcctattaatggtgagtgctttgataatttctatagtaatcttgacgagcgactcggtccgcactagcctgaggtaa

SEQ ID NO: 563 - DNA, 21 bp, synthetic construct
  source 1..21: mol_type = other DNA
  misc_feature 1..21: note = Synthetic
ataagattagcgatgttttag

SEQ ID NO: 564 - DNA, 60 bp, synthetic construct
  misc_feature 1..60: note = Synthetic
  source 1..60: mol_type = other DNA
atgaaggtgccaaacatcatcttcataaggaaacggatgaagttaaaaaatcagtcatga

SEQ ID NO: 565 - DNA, 135 bp, synthetic construct
  misc_feature 1..135: note = Synthetic
  source 1..135: mol_type = other DNA
atgattgagatatcaagatcatcatacaatgtatctgttatagtcaacacacccattggagtaataacaaacgcggcgtccatggcggcgttcgttaaaggcctattcgactcggtccgcactagcctgaggtaa

SEQ ID NO: 566 - DNA, 156 bp, synthetic construct
  source 1..156: mol_type = other DNA
  misc_feature 1..156: note = Synthetic
atgtatggtcctataaagtccatgattgagatatcaagatcatcatacaatgtatctgttatagtcaacacacccattggagtaataacaaacgcggcgtccatggcggcgttcgttaaaggcctattcgactcggtccgcactagcctgaggtaa

SEQ ID NO: 567 - DNA, 36 bp, synthetic construct
  misc_feature 1..36: note = Synthetic
  source 1..36: mol_type = other DNA
attagtatacacgttagattattctcaaactcctaa

SEQ ID NO: 568 - DNA, 21 bp, synthetic construct
  source 1..21: mol_type = other DNA
  misc_feature 1..21: note = Synthetic
atgaaagactacgtagactag

SEQ ID NO: 569 - DNA, 219 bp, synthetic construct
  misc_feature 1..219: note = Synthetic
  source 1..219: mol_type = other DNA
atgcgcctggtccgaggccttatccggcatgagcatcacgacctcttgaatctcttccaggagatggtgccggatgagatagcccggatagacctggatgacctgtcagtggcggatgatttatcacgcatgcgtgtgatgatgacctacctacagtctttggcatcactatttaatttggggcctcgcttggccacgactcggtccgcactagcctga

SEQ ID NO: 570 - DNA, 63 bp, synthetic construct
  misc_feature 1..63: note = Synthetic
  source 1..63: mol_type = other DNA
atgctccggttcctggctaagggacatctgggactggatatgcgaggtgctgagcgactttaa

SEQ ID NO: 571 - DNA, 66 bp, synthetic construct
  source 1..66: mol_type = other DNA
  misc_feature 1..66: note = Synthetic
acgatgaggagctcacccggctgctggcggtttgggacgatgagcccctcagtctctttctcatga

SEQ ID NO: 572 - DNA, 144 bp, synthetic construct
  source 1..144: mol_type = other DNA
  misc_feature 1..144: note = Synthetic
aggtacaaacccaccggcggggaaaatactgaggcgccgccatcatcgcctggggcgtctcgagtttggactacgacgacgatgaggagctcacccggctgctggcggtttgggacgatgagcccctcagtctctttctcatga

SEQ ID NO: 573 - DNA, 171 bp, synthetic construct
  misc_feature 1..171: note = Synthetic
  source 1..171: mol_type = other DNA
atcgcctggggcgtctcgagtttggactacgacgacgatgaggagctcacccggctgctggcggtttgggacgatgagcccctcagtctctttctcatgaacacctttttgctgcaccaggagggcttccgtaatctgcccttcgactcggtccgcactagcctgaggtaa

SEQ ID NO: 574 - DNA, 180 bp, synthetic construct
  misc_feature 1..180: note = Synthetic
  source 1..180: mol_type = other DNA
atgatcaacactaccttaactggcaatggtactcaagtatacttagctcccacgctgctatgtgcgggtgtcccgacgctgtcgctcattttaatcatcttgcttctgtgcttcgtgccccgcaaaacccaccccctcccggtccccagcgaaacctcgactcggtccgcactagcctga

SEQ ID NO: 575 - DNA, 168 bp, synthetic construct
  misc_feature 1..168: note = Synthetic
  source 1..168: mol_type = other DNA
atggcagaaggggccccagagatcccagaaggagcaggagaggtggatctaaatacctggttggaaagatctctggagaaaatcaatcaggaggcaagattacacttccacccagagttccttttccgtctctggaacgccgactcggtccgcactagcctgaggtaa

SEQ ID NO: 576 - DNA, 30 bp, synthetic construct
  source 1..30: mol_type = other DNA
  misc_feature 1..30: note = Synthetic
atgccgacgaaatcaaatgtcctaacctaa

SEQ ID NO: 577 - DNA, 15 bp, synthetic construct
  source 1..15: mol_type = other DNA
  misc_feature 1..15: note = Synthetic
atgccccatccatag

SEQ ID NO: 578 - DNA, 174 bp, synthetic construct
  misc_feature 1..174: note = Synthetic
  source 1..174: mol_type = other DNA
atggcttgcgctaagtctccactggagaacacttggtgggctgagcaagattctccgttctgcttccttgcgttctgctttgagtatgctggggtacagcaccacggcctgagctataactgctcccttccgctggcgtttgacggcgactcggtccgcactagcctgaggtaa

SEQ ID NO: 579 - DNA, 123 bp, synthetic construct
  misc_feature 1..123: note = Synthetic
  source 1..123: mol_type = other DNA
acgagaacatcatggcttgcgctaagtctccactggagaacacttggtgggctgagcaagattctccgttctgcttccttgcgttctgctttgagtatgctggggtacagcaccacggcctga

SEQ ID NO: 580 - DNA, 15 bp, synthetic construct
  misc_feature 1..15: note = Synthetic
  source 1..15: mol_type = other DNA
atactatatgcgtga

SEQ ID NO: 581 - DNA, 111 bp, synthetic construct
  source 1..111: mol_type = other DNA
  misc_feature 1..111: note = Synthetic
atggcagtccttcaaatcttgcaagggcataaggcgttagtgttaatccggtacagagacccctgcctcctggacctatcgccgttatcggcccgtgaagatgaaccgtga

SEQ ID NO: 582 - DNA, 207 bp, synthetic construct
  source 1..207: mol_type = other DNA
  misc_feature 1..207: note = Synthetic
aagcgcggcaagcgcccgacagccttccagttcctgcaagaaatcaagccggaagccgtagcgtacatcaccattaagaccactctggcttgcctaaccagtgctgacaatacaaccgttcaggctgtagcaagcgcaatcggtcgggccattgaggacgaggctcgcttcggtcgtatccgtgaccttcgactcggtccgcactag

SEQ ID NO: 583 - DNA, 45 bp, synthetic construct
  misc_feature 1..45: note = Synthetic
  source 1..45: mol_type = other DNA
atagtttaccaaattataccgacgactcggtccgcactagcctga

SEQ ID NO: 584 - DNA, 27 bp, synthetic construct
  misc_feature 1..27: note = Synthetic
  source 1..27: mol_type = other DNA
gtggcgccgaccctgattaggagttga

SEQ ID NO: 585 - DNA, 24 bp, synthetic construct
  misc_feature 1..24: note = Synthetic
  source 1..24: mol_type = other DNA
atgcagacctcaggcaaactataa

SEQ ID NO: 586 - DNA, 21 bp, synthetic construct
  misc_feature 1..21: note = Synthetic
  source 1..21: mol_type = other DNA
atgcgagacgtaagccgttaa

SEQ ID NO: 587 - DNA, 144 bp, synthetic construct
  source 1..144: mol_type = other DNA
  misc_feature 1..144: note = Synthetic
gtgttcaactttcaaagaatagcagaaccctttcacatttcatcgatgaagaacaactatgctcttccgactctgggtctttgttctgttgactccctgttacagttggagaccgtggaccatatcggacgagagccattgtaa

SEQ ID NO: 588 - DNA, 168 bp, synthetic construct
  misc_feature 1..168: note = Synthetic
  source 1..168: mol_type = other DNA
atgctcttccgactctgggtctttgttctgttgactccctgttacagttggagaccgtggaccatatcggacgagagccattgtaaaaatggaaactctgaaaatccaattgttcgcccgggctttataacttttaacttcgactcggtccgcactagcctgaggtaa

SEQ ID NO: 589 - DNA, 42 bp, synthetic construct
  misc_feature 1..42: note = Synthetic
  source 1..42: mol_type = other DNA
atggaaactctgaaaatccaattgttcgcccgggctttataa

SEQ ID NO: 590 - DNA, 144 bp, synthetic construct
  source 1..144: mol_type = other DNA
  misc_feature 1..144: note = Synthetic
gtgttcaactttcaaagaatagcagaaccctttcacatttcatcgatgaagaacaactgccctcttccgactctgggtctttgttctgttgactccctgttacagttggagaccgtggaccatatcggacgagagccattgtaa

SEQ ID NO: 591 - DNA, 105 bp, synthetic construct
  misc_feature 1..105: note = Synthetic
  source 1..105: mol_type = other DNA
atatcggacgagagccattgtaaaaatggaaactctgaaaatccaattgttcgcccgggctttataacttttaacttcgactcggtccgcactagcctgaggtaa

SEQ ID NO: 592 - DNA, 144 bp, synthetic construct
  misc_feature 1..144: note = Synthetic
  source 1..144: mol_type = other DNA
gtgttcaactttcaaagaatagcagaaccgtttcacacttcatcgatgaagaacaactatgctcctccgactctgggtctttgtcctgttgactccctgttacggttggagaccgttgaacatatcgaactcgagccattgtag

SEQ ID NO: 593 - DNA, 144 bp, synthetic construct
  source 1..144: mol_type = other DNA
  misc_feature 1..144: note = Synthetic
gtgttcaactttcaaagaatagcagaaccgtttcacacttcatcgatgaagaacaactgccctcctccgactctgggtctttgtcctgttgactccctgttacggttggagaccgttgaacatatcgaactcgagccattgtag

SEQ ID NO: 594 - DNA, 12 bp, synthetic construct
  misc_feature 1..12: note = Synthetic
  source 1..12: mol_type = other DNA
atgatgtcttaa

SEQ ID NO: 595 - DNA, 60 bp, synthetic construct
  source 1..60: mol_type = other DNA
  misc_feature 1..60: note = Synthetic
aaggaattgtcacagttaaagatgcagactttacagtatttttaccagagtttgggttag

SEQ ID NO: 596 - DNA, 168 bp, synthetic construct
  source 1..168: mol_type = other DNA
  misc_feature 1..168: note = Synthetic
atggtaactcctcttctcctgcttgtctgtctgccaattatctacgcctccaccaccttcgccgcagtctcccaccttgatacggattgtcttcccgccttgctgacttatctcatcttcacctctgtttgctgcactgccgactcggtccgcactagcctgaggtaa

SEQ ID NO: 597 - DNA, 150 bp, synthetic construct
  source 1..150: mol_type = other DNA
  misc_feature 1..150: note = Synthetic
ctgcttgtctgtctgccaattatctacgcctccaccaccttcgccgcagtctcccaccttgatacggattgtcttcccgccttgctgacttatctcatcttcacctctgtttgctgcactgccgactcggtccgcactagcctgaggtaa

SEQ ID NO: 598 - DNA, 168 bp, synthetic construct
  source 1..168: mol_type = other DNA
  misc_feature 1..168: note = Synthetic
atggccggcggcagtcaggacgtgcgccggtttatggaccgagaggccactccgccccggggccacgggtcggcgcgctatccgccggagcaggaaaggagcccctcgccgccgctacctcctctgcccaccaagcgccgcgactcggtccgcactagcctgaggtaa

SEQ ID NO: 599 - DNA, 147 bp, synthetic construct
  source 1..147: mol_type = other DNA
  misc_feature 1..147: note = Synthetic
gtgcgccggtttatggaccgagaggccactccgccccggggccacgggtcggcgcgctatccgccggagcaggaaaggagcccctcgccgccgctacctcctctgcccaccaagcgccgcgactcggtccgcactagcctgaggtaa

SEQ ID NO: 600 - DNA, 30 bp, synthetic construct
  source 1..30: mol_type = other DNA
  misc_feature 1..30: note = Synthetic
atgattgggatcacaaagtttccactgtag

SEQ ID NO: 601 - DNA, 168 bp, synthetic construct
  source 1..168: mol_type = other DNA
  misc_feature 1..168: note = Synthetic
atggctttggaattgtttaacccagatgagtactatgatattctgtttcctggtgtaaatacttttgttaataatattcaataccttgatcctaggcattggggtccttctttgtttgctactatttcccaggctttgtgcgactcggtccgcactagcctgaggtaa

SEQ ID NO: 602 - DNA, 162 bp, synthetic construct
  misc_feature 1..162: note = Synthetic
  source 1..162: mol_type = other DNA
ttggaattgtttaacccagatgagtactatgatattctgtttcctggtgtaaatacttttgttaataatattcaataccttgatcctaggcattggggtccttctttgtttgctactatttcccaggctttgtgcgactcggtccgcactagcctgaggtaa

SEQ ID NO: 603 - DNA, 27 bp, synthetic construct
  source 1..27: mol_type = other DNA
  misc_feature 1..27: note = Synthetic
gtgctagaagcgatctctctgacctaa

SEQ ID NO: 604 - DNA, 42 bp, synthetic construct
  misc_feature 1..42: note = Synthetic
  source 1..42: mol_type = other DNA
atgttcaagcagctggtatctctagacaatttacttctatga

SEQ ID NO: 605 - DNA, 21 bp, synthetic construct
  source 1..21: mol_type = other DNA
  misc_feature 1..21: note = Synthetic
aagataaggaaaaggtcataa

SEQ ID NO: 606 - DNA, 15 bp, synthetic construct
  misc_feature 1..15: note = Synthetic
  source 1..15: mol_type = other DNA
aagctgttactttaa

SEQ ID NO: 607 - DNA, 24 bp, synthetic construct
  source 1..24: mol_type = other DNA
  misc_feature 1..24: note = Synthetic
atgtgtccgataatacattcttaa

SEQ ID NO: 608 - DNA, 45 bp, synthetic construct
  source 1..45: mol_type = other DNA
  misc_feature 1..45: note = Synthetic
ttgatgaggtgcatgctaaccacggatttgactgtgtggagatga

SEQ ID NO: 609 - DNA, 99 bp, synthetic construct
  source 1..99: mol_type = other DNA
  misc_feature 1..99: note = Synthetic
atcgaaggagctactgctgcacaactaactagacaacttaatatggagaagcgagaagttaataaagctctcgactcggtccgcactagcctgaggtaa

SEQ ID NO: 610 - DNA, 66 bp, synthetic construct
  misc_feature 1..66: note = Synthetic
  source 1..66: mol_type = other DNA
atgggaaatttcaggagcagagtttacatcttccaagtcacatacagcgaatggaatatcaattag

SEQ ID NO: 611 - DNA, 54 bp, synthetic construct
  source 1..54: mol_type = other DNA
  misc_feature 1..54: note = Synthetic
atgctaggaccacaaatacacttgatgaagattaagaaaaagataatcttatga

SEQ ID NO: 612 - DNA, 15 bp, synthetic construct
  misc_feature 1..15: note = Synthetic
  source 1..15: mol_type = other DNA
atgaatggacactag

SEQ ID NO: 613 - DNA, 45 bp, synthetic construct
  source 1..45: mol_type = other DNA
  misc_feature 1..45: note = Synthetic
atgaagctgttagacattttcctaggatttggctccatggcttag

SEQ ID NO: 614 - DNA, 51 bp, synthetic construct
  source 1..51: mol_type = other DNA
  misc_feature 1..51: note = Synthetic
atgattacaagtattatgaatacacgccaccggattgtcccggcgaactga

SEQ ID NO: 615 - DNA, 45 bp, synthetic construct
  source 1..45: mol_type = other DNA
  misc_feature 1..45: note = Synthetic
atggacatggtggggatgagtgattgtgtgctttctcgattgtga

SEQ ID NO: 616 - DNA, 159 bp, synthetic construct
  source 1..159: mol_type = other DNA
  misc_feature 1..159: note = Synthetic
atggttaccatgatggtctcctttaagtggctttggcgcatgacgcgtcgaggtgcttatcttctcgatcgctgtcttgtagctgcaattcgcgccatccccaaaaccactcaagttctggtctcaacggttaggtcgactcggtccgcactagcctga

SEQ ID NO: 617 - DNA, 177 bp, synthetic construct
  source 1..177: mol_type = other DNA
  misc_feature 1..177: note = Synthetic
ttggattctttccagacaatggttaccatgatggtctcctttaagtggctttggcgcatgacgcgtcgaggtgcttatcttctcgatcgctgtcttgtagctgcaattcgcgccatccccaaaaccactcaagttctggtctcaacggttaggtcgactcggtccgcactagcctga

SEQ ID NO: 618 - DNA, 27 bp, synthetic construct
  source 1..27: mol_type = other DNA
  misc_feature 1..27: note = Synthetic
atgaggaaactctcaaacaacggctaa

SEQ ID NO: 619 - DNA, 42 bp, synthetic construct
  misc_feature 1..42: note = Synthetic
  source 1..42: mol_type = other DNA
atgacgttctatttaggttggaaaatcacgctgaaactctaa

SEQ ID NO: 620 - DNA, 39 bp, synthetic construct
  misc_feature 1..39: note = Synthetic
  source 1..39: mol_type = other DNA
atgaatgcgactttgacgactcggtccgcactagcctga

SEQ ID NO: 621 - DNA, 66 bp, synthetic construct
  source 1..66: mol_type = other DNA
  misc_feature 1..66: note = Synthetic
atcctctccattggtcaagcacaaattgctatactactggaaattgactgggctaccgcttcctga

SEQ ID NO: 622 - DNA, 42 bp, synthetic construct
  source 1..42: mol_type = other DNA
  misc_feature 1..42: note = Synthetic
atacagaccacgccggtagcaacgacaatattgctttgctag

SEQ ID NO: 623 - DNA, 108 bp, synthetic construct
  source 1..108: mol_type = other DNA
  misc_feature 1..108: note = Synthetic
atgaggactttcaggattgctatttggaatcttgacgttataataagttcaatagtgagacaattatttaagcctctaactaagacgactcggtccgcactagcctga

SEQ ID NO: 624 - DNA, 168 bp, synthetic construct
  misc_feature 1..168: note = Synthetic
  source 1..168: mol_type = other DNA
atgggtaacaaaaatattaaaccatctaaggaaaatagactgtccatcttgtccaaggataagatggattcatttaagagaggatcttgggcaacgtcatcctttagagaaaagtcgcgtgcaaccatccaaagattttccgactcggtccgcactagcctgaggtaa

SEQ ID NO: 625 - DNA, 153 bp, synthetic construct
  source 1..153: mol_type = other DNA
  misc_feature 1..153: note = Synthetic
attaaaccatctaaggaaaatagactgtccatcttgtccaaggataagatggattcatttaagagaggatcttgggcaacgtcatcctttagagaaaagtcgcgtgcaaccatccaaagattttccgactcggtccgcactagcctgaggtaa

SEQ ID NO: 626 - DNA, 69 bp, synthetic construct
  misc_feature 1..69: note = Synthetic
  source 1..69: mol_type = other DNA
ttggatgattactttacatggagagccatggttggaagaatcgactcggtccgcactagcctgaggtaa

SEQ ID NO: 627 - DNA, 201 bp, synthetic construct
  source 1..201: mol_type = other DNA
  misc_feature 1..201: note = Synthetic
ctgggcaaaacaacacccaagagacaaataacaatggatcctctcaatgaatccactgttaatgtctatcttcctgactcatatcttaaaggagtgatttcctttagtgagactaatgcaattggttcatgtctcttaaaaagaccttacctaaaaaatgacaacactgcaaacgactcggtccgcactagcctgaggtaa

SEQ ID NO: 628 - DNA, 198 bp, synthetic construct
  misc_feature 1..198: note = Synthetic
  source 1..198: mol_type = other DNA
atgaaacacaaagtatattctgaagggttggaaattagtactgattttaactcaataatcagtcaattatctacatccgatatggatatagaaatcgatgaagataatatcacggaacttcttaatatattgactgagctaggttgtgatgtcgactttgatgaagattttagcgatatacgactcggtccgcactag

SEQ ID NO: 629 - DNA, 36 bp, synthetic construct
  misc_feature 1..36: note = Synthetic
  source 1..36: mol_type = other DNA
atgatgatattggaacagttaaagatggacgattag

SEQ ID NO: 630 - DNA, 168 bp, synthetic construct
  misc_feature 1..168: note = Synthetic
  source 1..168: mol_type = other DNA
atggaattggatattaatcgaacattgttggttctactgggtcaagtttatacgtacatctttcaggttgaactgctacgtcgatgtgatccaagggtggcgtgtcgctttttatatcggttagcggctaactgtttgaccgactcggtccgcactagcctgaggtaa

SEQ ID NO: 631 - DNA, 162 bp, synthetic construct
  source 1..162: mol_type = other DNA
  misc_feature 1..162: note = Synthetic
ttggatattaatcgaacattgttggttctactgggtcaagtttatacgtacatctttcaggttgaactgctacgtcgatgtgatccaagggtggcgtgtcgctttttatatcggttagcggctaactgtttgaccgactcggtccgcactagcctgaggtaa

SEQ ID NO: 632 - DNA, 72 bp, synthetic construct
  source 1..72: mol_type = other DNA
  misc_feature 1..72: note = Synthetic
atggacaacacaacattatgtcggtcgagtattatctatctctttatgccaaatataatagtaaaaatttag

SEQ ID NO: 633 - DNA, 72 bp, synthetic construct
  source 1..72: mol_type = other DNA
  misc_feature 1..72: note = Synthetic
atggacaacacaacattgcctcggtcgagtattatctatctctttatgccaaatataatagtaaaaatttag

SEQ ID NO: 634 - DNA, 51 bp, synthetic construct
  misc_feature 1..51: note = Synthetic
  source 1..51: mol_type = other DNA
attatggaaaacataccgtttgcgcctccgactcggtccgcactagcctga

SEQ ID NO: 635 - DNA, 51 bp, synthetic construct
  misc_feature 1..51: note = Synthetic
  source 1..51: mol_type = other DNA
attatggaaaacataccgtttgtgccttcgactcggtccgcactagcctga

SEQ ID NO: 636 - DNA, 225 bp, synthetic construct
  source 1..225: mol_type = other DNA
  misc_feature 1..225: note = Synthetic
atgaaaaaaattaacagaaatcccagattctctgttgcttaccactattgcatcaaaatgcaacgtctgaagaaatttatagccaagagagaaaagggcgataaaggaaagatgaaatggaacagctcgatggattatgactccccccctagttaccaagatgtaagaaggggtatttttcctacagcgcctttattcgactcggtccgcactagcctgaggtaa

SEQ ID NO: 637 - DNA, 225 bp, synthetic construct
  misc_feature 1..225: note = Synthetic
  source 1..225: mol_type = other DNA
atgaaaaaaattaacagaaatcccagattctctgttgcttaccactattgcatcaaagcccaacgtctgaagaaatttatagccaagagagaaaagggcgataaaggaaagatgaaatggaacagctcgatggattatgactccccccctagttaccaagatgtaagaaggggtatttttcctacagcgcctttattcgactcggtccgcactagcctgaggtaa

SEQ ID NO: 638 - DNA, 168 bp, synthetic construct
  misc_feature 1..168: note = Synthetic
  source 1..168: mol_type = other DNA
atgccttggtggtacagacgccgtagctacaacccgtggagacgaagaaattggtttagaagacctagaaaaactatttacagaagatacagaagaagacgccgctgggtaagaagaaaacctttttacaaacgtaaaatcgactcggtccgcactagcctgaggtaa

SEQ ID NO: 639 - DNA, 168 bp, synthetic construct
  source 1..168: mol_type = other DNA
  misc_feature 1..168: note = Synthetic
atgaatccggataatacaatcgcagtgattacagagactattcctataggtatgcaatttgataaagtatatttgactacatttaacatgtggagggaaattctatccaataccataaaaacactagatatatcatctttcgactcggtccgcactagcctgaggtaa

SEQ ID NO: 640 - DNA, 117 bp, synthetic construct
  misc_feature 1..117: note = Synthetic
  source 1..117: mol_type = other DNA
atgcaatttgataaagtatatttgactacatttaacatgtggagggaaattctatccaataccataaaaacactagatatatcatctttcgactcggtccgcactagcctgaggtaa

SEQ ID NO: 641 - DNA, 33 bp, synthetic construct
  misc_feature 1..33: note = Synthetic
  source 1..33: mol_type = other DNA
aagttactaacgactcggtccgcactagcctga

SEQ ID NO: 642 - DNA, 15 bp, synthetic construct
  misc_feature 1..15: note = Synthetic
  source 1..15: mol_type = other DNA
atgcgaaatcgttag

SEQ ID NO: 643 - DNA, 36 bp, synthetic construct
  misc_feature 1..36: note = Synthetic
  source 1..36: mol_type = other DNA
atgaaatacctcaactcggacgagtggtggttatag

SEQ ID NO: 644 - DNA, 186 bp, synthetic construct
  source 1..186: mol_type = other DNA
  misc_feature 1..186: note = Synthetic
attaagaaaaaatacgggcagaagtgtgtttctcctgctctggtattatggatagctcaaaaattattgggttggaggtggaccctagttcaccttcaaacacactacttgctttccctgtggtgctccaagagatcgatggaggaaggaaagaaattacaccacagtttcgcacccaaaaaatag

SEQ ID NO: 645 - DNA, 186 bp, synthetic construct
  misc_feature 1..186: note = Synthetic
  source 1..186: mol_type = other DNA
attaagaaaaaatacgggcagaagtgtgtttctcctgctctggtattgccgatagctcaaaaattattgggttggaggtggaccctagttcaccttcaaacacactacttgctttccctgtggtgctccaagagatcgatggaggaaggaaagaaattacaccacagtttcgcacccaaaaaatag

SEQ ID NO: 646 - DNA, 54 bp, synthetic construct
  source 1..54: mol_type = other DNA
  misc_feature 1..54: note = Synthetic
atggggcaaataaatcaattcagccgacccaaccatggacacaacacacaatga

SEQ ID NO: 647 - DNA, 138 bp, synthetic construct
  source 1..138: mol_type = other DNA
  misc_feature 1..138: note = Synthetic
ctgatcaagacggcagaacactgggcgagacaagacatcagaaccatagaggattcaaaattaagagcattgttgactctatgtgctgtgatgacgaggaaattctcaaacgactcggtccgcactagcctgaggtaa

SEQ ID NO: 648 - DNA, 42 bp, synthetic construct
  source 1..42: mol_type = other DNA
  misc_feature 1..42: note = Synthetic
atgatttccagcaagaggaaggtccaaaaattaccttgttga

SEQ ID NO: 649 - DNA, 222 bp, synthetic construct
  source 1..222: mol_type = other DNA
  misc_feature 1..222: note = Synthetic
atgagaccccacttggaaaaagcaataaaaggagttgaaggcagagttggagagatgggacgaatggcaatgaaatggttagttgttataatatgtttctctataacaagtcaacctgcttctgcttgcaatctaaagacctgtctaaaactatttaacaatactgatgcggtaactgttcattgttttaatgacgactcggtccgcactagcctgaggtaa

SEQ ID NO: 650 - DNA, 222 bp, synthetic construct
  misc_feature 1..222: note = Synthetic
  source 1..222: mol_type = other DNA
atgagaccccacttggaaaaagcaataaaaggagttgaaggcagagttggagaggccggacgaatggcaatgaaatggttagttgttataatatgtttctctataacaagtcaacctgcttctgcttgcaatctaaagacctgtctaaaactatttaacaatactgatgcggtaactgttcattgttttaatgacgactcggtccgcactagcctgaggtaa

SEQ ID NO: 651 - DNA, 30 bp, synthetic construct
  source 1..30: mol_type = other DNA
  misc_feature 1..30: note = Synthetic
acgtcgacacgaagccccgcgccggcatga

SEQ ID NO: 652 - DNA, 60 bp, synthetic construct
  misc_feature 1..60: note = Synthetic
  source 1..60: mol_type = other DNA
acgaagccccgcgccggcatgatataccgcccccccatggcgtgtagtctttataaataa

SEQ ID NO: 653 - DNA, 30 bp, synthetic construct
  misc_feature 1..30: note = Synthetic
  source 1..30: mol_type = other DNA
ataatggaaaagaggtatctgctgtgttaa

SEQ ID NO: 654 - DNA, 48 bp, synthetic construct
  misc_feature 1..48: note = Synthetic
  source 1..48: mol_type = other DNA
gtgatactgaatctgaagaagagttcgactcggtccgcactagcctga

SEQ ID NO: 655 - DNA, 39 bp, synthetic construct
  source 1..39: mol_type = other DNA
  misc_feature 1..39: note = Synthetic
atcacataccacctcaggactacaccgaccacactttaa

SEQ ID NO: 656 - DNA, 99 bp, synthetic construct
  misc_feature 1..99: note = Synthetic
  source 1..99: mol_type = other DNA
atatcctctttgatggacacgatctactattcagcaccgtcacaccttgtttgcaccaaggcttttacctcatcgacgaactacgttacgttaaaataa

SEQ ID NO: 657 - DNA, 198 bp, synthetic construct
  misc_feature 1..198: note = Synthetic
  source 1..198: mol_type = other DNA
atagagttcacagtagctcattcagtcaaaatgtttgactatctggaaaatgaggaggtggctctcgatgaacttaaacagatgttgagagacagagatcctaatgataccaggaaccaattcaagaataatgctttacacgcatacctttttaatgagcattgtaataacgactcggtccgcactagcctgaggtaa

SEQ ID NO: 658 - DNA, 198 bp, synthetic construct
  source 1..198: mol_type = other DNA
  misc_feature 1..198: note = Synthetic
atagagttcacagtagctcattcagtcaaagcctttgactatctggaaaatgaggaggtggctctcgatgaacttaaacagatgttgagagacagagatcctaatgataccaggaaccaattcaagaataatgctttacacgcatacctttttaatgagcattgtaataacgactcggtccgcactagcctgaggtaa

SEQ ID NO: 659 - DNA, 42 bp, synthetic construct
  misc_feature 1..42: note = Synthetic
  source 1..42: mol_type = other DNA
atggatttagaaatagtggacgattttgtgatattaatatag

SEQ ID NO: 660 - DNA, 12 bp, synthetic construct
  source 1..12: mol_type = other DNA
  misc_feature 1..12: note = Synthetic
atgaaaggataa

SEQ ID NO: 661 - DNA, 21 bp, synthetic construct
  source 1..21: mol_type = other DNA
  misc_feature 1..21: note = Synthetic
atggaaattaaacgttattaa

SEQ ID NO: 662 - DNA, 129 bp, synthetic construct
  source 1..129: mol_type = other DNA
  misc_feature 1..129: note = Synthetic
atgaagaagaaaagtcaaatcctgaagcacgtgtacctaacaacgaagaagcagaaaaaaataataaaaatgttgacgaaaatgttaaaatcaataaagaaaacatcgactcggtccgcactagcctga

SEQ ID NO: 663 - DNA, 174 bp, synthetic construct
  misc_feature 1..174: note = Synthetic
  source 1..174: mol_type = other DNA
ctgttctttaagccgacaaaattttatccatgtttcctggggatgatgaagaagaaaagtcaaatcctgaagcacgtgtacctaacaacgaagaagcagaaaaaaataataaaaatgttgacgaaaatgttaaaatcaataaagaaaacatcgactcggtccgcactagcctga

SEQ ID NO: 664 - DNA, 204 bp, synthetic construct
  source 1..204: mol_type = other DNA
  misc_feature 1..204: note = Synthetic
atcgaggaagtaattctcccgacttatctcgcaagtatgtcatctgtgttcacagattacgacaaactccaggagtacttggtgacgccatgtaaaaaacgtgttgatggggcgacaggagggctcttaagattaaacattccagtctgtgtaaccacatcagagaatccagaggacgactcggtccgcactagcctgaggtaa

SEQ ID NO: 665 - DNA, 18 bp, synthetic construct
  source 1..18: mol_type = other DNA
  misc_feature 1..18: note = Synthetic
atgccggtggcggagtaa

SEQ ID NO: 666 - DNA, 87 bp, synthetic construct
  source 1..87: mol_type = other DNA
  misc_feature 1..87: note = Synthetic
atggacacgatctactattcagcaccgtcacaccttgtttgcaccaaggcttttacctcatcgacgaactacgttacgttaaaataa

SEQ ID NO: 667 - DNA, 75 bp, synthetic construct
  source 1..75: mol_type = other DNA
  misc_feature 1..75: note = Synthetic
ataacactgaccgaggacttcttcgtagttacggtgtccatagacgacgacacaccccgactcggtccgcactag

SEQ ID NO: 668 - DNA, 81 bp, synthetic construct
  source 1..81: mol_type = other DNA
  misc_feature 1..81: note = Synthetic
acgatctactattcagcaccgtcacaccttgtttgcaccaaggcttttacctcatcgacgaactacgttacgttaaaataa

SEQ ID NO: 669 - DNA, 129 bp, synthetic construct
  misc_feature 1..129: note = Synthetic
  source 1..129: mol_type = other DNA
atgaagccgggcgttacagcatggatgtggagtacggtcagtacagtgtcatcctgcagggccacggttttccaccatcgcacgccgggaccatcaccgtgtatgaagattcacaaccggggacgctga

SEQ ID NO: 670 - DNA, 201 bp, synthetic construct
  source 1..201: mol_type = other DNA
  misc_feature 1..201: note = Synthetic
atggatgtggagtacggtcagtacagtgtcatcctgcagggccacggttttccaccatcgcacgccgggaccatcaccgtgtatgaagattcacaaccggggacgctgaatgattttctctgtgccatgacggaggatgatgcccggccggaggtgctgcgtcgtcttgaactcgactcggtccgcactagcctgaggtaa

SEQ ID NO: 671 - DNA, 129 bp, synthetic construct
  misc_feature 1..129: note = Synthetic
  source 1..129: mol_type = other DNA
atgaagccgggcgttacagcatggatgtggagtacggtcagtacagtgtcatcctgcaggttgacggttttccaccatcgcacgccgggaccatcaccgtgtatgaagattcacaaccggggacgctga

SEQ ID NO: 672 - DNA, 18 bp, synthetic construct
  source 1..18: mol_type = other DNA
  misc_feature 1..18: note = Synthetic
atgccggtggtggagtaa

SEQ ID NO: 673 - DNA, 123 bp, synthetic construct
  source 1..123: mol_type = other DNA
  misc_feature 1..123: note = Synthetic
atggatatctttaaagaactaatcttaaaataccctgatgaaaatgttttgatttctccagtttccattttatctactttatctattctgaatcacgactcggtccgcactagcctgaggtaa

SEQ ID NO: 674 - DNA, 186 bp, synthetic construct
  source 1..186: mol_type = other DNA
  misc_feature 1..186: note = Synthetic
ataagaattgaaccgctggcggatgtaatttgctactgcacccgaaggttactgacttcgatcctcacgctcgctacgccaccaaaaacgctctcccgcagactgattcccacacggagaagctttgcttttggcctggggagatctcttcggaacttaaagctgacatttgactcatataactga

SEQ ID NO: 675 - DNA, 78 bp, synthetic construct
  source 1..78: mol_type = other DNA
  misc_feature 1..78: note = Synthetic
atctactattcagcaccgtcacaccttgtttgcaccaaggcttttacctcatcgacgaactacgttacgttaaaataa

SEQ ID NO: 676 - DNA, 99 bp, synthetic construct
  source 1..99: mol_type = other DNA
  misc_feature 1..99: note = Synthetic
atcgacgaactacgttacgttaaaataacactgaccgaggacttcttcgtagttacggtgtccatagacgacgacacaccccgactcggtccgcactag

SEQ ID NO: 677 - DNA, 15 bp, synthetic construct
  misc_feature 1..15: note = Synthetic
  source 1..15: mol_type = other DNA
ctgtatcctctttga

SEQ ID NO: 678 - DNA, 87 bp, synthetic construct
  misc_feature 1..87: note = Synthetic
  source 1..87: mol_type = other DNA
atgcacacgatctactattcagcaccgtcacaccttgtttgcaccaaggcttttacctcatcgacgaactacgttacgttaaaataa

SEQ ID NO: 679 - DNA, 12 bp, synthetic construct
  misc_feature 1..12: note = Synthetic
  source 1..12: mol_type = other DNA
atgaagctctag

SEQ ID NO: 680 - DNA, 42 bp, synthetic construct
  misc_feature 1..42: note = Synthetic
  source 1..42: mol_type = other DNA
atggtagttttaaccagaacgactcggtccgcactagcctga

SEQ ID NO: 681 - DNA, 87 bp, synthetic construct
  misc_feature 1..87: note = Synthetic
  source 1..87: mol_type = other DNA
acggaaaacggtgtggaaccctcaatctggtcatcaacccttatgaacttttcttgcctgatgacgactcggtccgcactagcctga

SEQ ID NO: 682 - DNA, 87 bp, synthetic construct
  source 1..87: mol_type = other DNA
  misc_feature 1..87: note = Synthetic
atcttaatagttacatacaaactgaaaattaaaataacactatttagttggtggtcgccatggatggtgttattgtatactgtctaa

SEQ ID NO: 683 - DNA, 87 bp, synthetic construct
  misc_feature 1..87: note = Synthetic
  source 1..87: mol_type = other DNA
atcttaatagttacatacaaactgaaaattaaaataacactatttagttggtggtcgccgccgatggtgttattgtatactgtctaa

SEQ ID NO: 684 - DNA, 36 bp, synthetic construct
  source 1..36: mol_type = other DNA
  misc_feature 1..36: note = Synthetic
atgtcctcaaataaatactctatcgtttggatataa

SEQ ID NO: 685 - DNA, 102 bp, synthetic construct
  source 1..102: mol_type = other DNA
  misc_feature 1..102: note = Synthetic
ctgaacccgacacaatcagactctggtatttatatgtgcattaccaagaacgagacctacagtgatatgatgtccgactcggtccgcactagcctgaggtaa

SEQ ID NO: 686 - DNA, 177 bp, synthetic construct
  source 1..177: mol_type = other DNA
  misc_feature 1..177: note = Synthetic
attttcaggatgaggtccctggttatagttctgctgttcccctctatcatttactccatggtcattagacgatgtgagaagatggaagaggaaacgtggaaattgaaaataggaatgtgtatacaggctaaagatttctattccaaaagcgactcggtccgcactagcctgaggtaa

SEQ ID NO: 687 - DNA, 159 bp, synthetic construct
  source 1..159: mol_type = other DNA
  misc_feature 1..159: note = Synthetic
ctggttatagttctgctgttcccctctatcatttactccatggtcattagacgatgtgagaagatggaagaggaaacgtggaaattgaaaataggaatgtgtatacaggctaaagatttctattccaaaagcgactcggtccgcactagcctgaggtaa

SEQ ID NO: 688 - DNA, 39 bp, synthetic construct
  misc_feature 1..39: note = Synthetic
  source 1..39: mol_type = other DNA
atgaacgcgccagtgctcattcaactccacttatcgtag

SEQ ID NO: 689 - DNA, 87 bp, synthetic construct
  source 1..87: mol_type = other DNA
  misc_feature 1..87: note = Synthetic
atggtcacgatctactattcagcaccgtcacaccttgtttgcaccaaggcttttacctcatcgacgaactacgttacgttaaaataa

SEQ ID NO: 690 - DNA, 27 bp, synthetic construct
  misc_feature 1..27: note = Synthetic
  source 1..27: mol_type = other DNA
ctgcgtcgtcgtagatattccgcgtaa

SEQ ID NO: 691 - DNA, 168 bp, synthetic construct
  misc_feature 1..168: note = Synthetic
  source 1..168: mol_type = other DNA
atggcgtccgaaaaaatggcgcagcgcccgcagagcagctacgacgactacgtgaacaccttgcagaagatcgcgccgcatctgcgatctctcctgactcagctcaacaacgagcaggtcattcgtggaggcgccacctccgactcggtccgcactagcctgaggtaa

SEQ ID NO: 692 - DNA, 153 bp, synthetic construct
  source 1..153: mol_type = other DNA
  misc_feature 1..153: note = Synthetic
atggcgcagcgcccgcagagcagctacgacgactacgtgaacaccttgcagaagatcgcgccgcatctgcgatctctcctgactcagctcaacaacgagcaggtcattcgtggaggcgccacctccgactcggtccgcactagcctgaggtaa

SEQ ID NO: 693 - DNA, 27 bp, synthetic construct
  misc_feature 1..27: note = Synthetic
  source 1..27: mol_type = other DNA
atgacatcgattcccgtccccacataa

SEQ ID NO: 694 - DNA, 24 bp, synthetic construct
  source 1..24: mol_type = other DNA
  misc_feature 1..24: note = Synthetic
atgtgctttactgtgaaagaatga

SEQ ID NO: 695 - DNA, 144 bp, synthetic construct
  misc_feature 1..144: note = Synthetic
  source 1..144: mol_type = other DNA
atgaagaagattcttgttcctcgtacgacggggccctcgctcgtcgtgcctcttcccccctccgggagaggggacgtcggggccctccgtcgcaccgggccgaagccagtgaaatgtttactacactgtcatcagaatatatga

SEQ ID NO: 696 - DNA, 63 bp, synthetic construct
  source 1..63: mol_type = other DNA
  misc_feature 1..63: note = Synthetic
atgtttactacactgtcatcagaatatatgatgtacgactcggtccgcactagcctgaggtaa

SEQ ID NO: 697 - DNA, 168 bp, synthetic construct
  misc_feature 1..168: note = Synthetic
  source 1..168: mol_type = other DNA
atgtccaatcaagcagctgagattatactccctacctttcacctagagtcacccttaatcgagaacaaatgcttctactatatgcaattacttggtcttatgttgccgcatgatcattggagatggagggcatttgtcaacgactcggtccgcactagcctgaggtaa

SEQ ID NO: 698 - DNA, 18 bp, synthetic construct
  misc_feature 1..18: note = Synthetic
  source 1..18: mol_type = other DNA
ataagaacggggtggtga

SEQ ID NO: 699 - DNA, 168 bp, synthetic construct
  source 1..168: mol_type = other DNA
  misc_feature 1..168: note = Synthetic
atgagcctcaggttccccgagagggcgggttacgagaaactgggataccgcccgcatgccaaacgcgtgtgggtgcatgacccgttgggattgacgcggtttatcatgaggcaactcatgatgtacccgctggtgttgcccgactcggtccgcactagcctgaggtaa

SEQ ID NO: 700 - DNA, 51 bp, synthetic construct
  source 1..51: mol_type = other DNA
  misc_feature 1..51: note = Synthetic
atgatgtacccgctggtgttgcccgactcggtccgcactagcctgaggtaa

SEQ ID NO: 701 - DNA, 129 bp, synthetic construct
  misc_feature 1..129: note = Synthetic
  source 1..129: mol_type = other DNA
atgaggacgtgggacgaactttggacttttgtgtttatggaggaaaaactgctgattattactgaactttggcccatgacgaaccggtttttctacgtggcagtgccacgagacggctcaaagtcctaa

SEQ ID NO: 702 - DNA, 108 bp, synthetic construct
  misc_feature 1..108: note = Synthetic
  source 1..108: mol_type = other DNA
ctgaaggatgcaatggagagctatacgatcacctatatagaaaaacagaagaaggggaaggtgaagaggatgaagaagactgaaaccaagtcgtggaagctgttttga

SEQ ID NO: 703 - DNA, 33 bp, synthetic construct
  misc_feature 1..33: note = Synthetic
  source 1..33: mol_type = other DNA
atgaatagtacgactcggtccgcactagcctga

SEQ ID NO: 704 - DNA, 18 bp, synthetic construct
  source 1..18: mol_type = other DNA
  misc_feature 1..18: note = Synthetic
atgagacagaatatatag

SEQ ID NO: 705 - DNA, 168 bp, synthetic construct
  source 1..168: mol_type = other DNA
  misc_feature 1..168: note = Synthetic
atgaacggagttttaaacgatataaagactgagtttttatgtaatactaaaacagatcttttaacgttgatacaaaaaatttgtctgaactgtgatttcattcttgaaccggtagaatcttttcctaaaaaaaccgagttcgactcggtccgcactagcctgaggtaa

SEQ ID NO: 706 - DNA, 75 bp, synthetic construct
  source 1..75: mol_type = other DNA
  misc_feature 1..75: note = Synthetic
atggctttcatcaacgatgagaagattaaagctctgaccacgtatactctgagaagaaagccaacggagttttaa

SEQ ID NO: 707 - DNA, 81 bp, synthetic construct
  source 1..81: mol_type = other DNA
  misc_feature 1..81: note = Synthetic
atgggagttatgttagtgccatcacccaagggaggagggaggaagagactcctgttgagtgcttcgagccttcgatgctga

SEQ ID NO: 708 - DNA, 57 bp, synthetic construct
  misc_feature 1..57: note = Synthetic
  source 1..57: mol_type = other DNA
atggtgctctgtcgcgctatgtgcttcaggagcacgtcgtcctcccctcccaaatag

SEQ ID NO: 709 - DNA, 12 bp, synthetic construct
  source 1..12: mol_type = other DNA
  misc_feature 1..12: note = Synthetic
atggaatcttga

SEQ ID NO: 710 - DNA, 69 bp, synthetic construct
  source 1..69: mol_type = other DNA
  misc_feature 1..69: note = Synthetic
atgtttgtggtacccggacggttacaaactgacgggcaatgttctaatactgctggagtgttttgttag

SEQ ID NO: 711 - DNA, 60 bp, synthetic construct
  source 1..60: mol_type = other DNA
  misc_feature 1..60: note = Synthetic
atgtatatacgtgcgcaattagatctaaagaagatgttcccaatttcaaggacaaaatag

SEQ ID NO: 712 - DNA, 60 bp, synthetic construct
  source 1..60: mol_type = other DNA
  misc_feature 1..60: note = Synthetic
atgtatgtcgtttcagctaaacggtatcagcaatgtttatgtaaagaaacagtaagataa

SEQ ID NO: 713 - DNA, 66 bp, synthetic construct
  misc_feature 1..66: note = Synthetic
  source 1..66: mol_type = other DNA
atgtccatccaggtcttagcatttgggtcaagttgcagcattgcatccttgagggtcatcagctga

SEQ ID NO: 714 - DNA, 18 bp, synthetic construct
  misc_feature 1..18: note = Synthetic
  source 1..18: mol_type = other DNA
atgagacggaatatatag

SEQ ID NO: 715 - DNA, 87 bp, synthetic construct
  source 1..87: mol_type = other DNA
  misc_feature 1..87: note = Synthetic
ttgacaatggtaggaatcttctcatcatctaggttcacagcacctgaatatattatcttttgtctcaacaccattcttaaaggatga

SEQ ID NO: 716 - DNA, 21 bp, synthetic construct
  misc_feature 1..21: note = Synthetic
  source 1..21: mol_type = other DNA
atgatgcgcagccaagtttag

SEQ ID NO: 717 - DNA, 21 bp, synthetic construct
  source 1..21: mol_type = other DNA
  misc_feature 1..21: note = Synthetic
atgccccatctaaacgcctga

SEQ ID NO: 718 - DNA, 24 bp, synthetic construct
  source 1..24: mol_type = other DNA
  misc_feature 1..24: note = Synthetic
atgacaggctgcgcctcctgttga

SEQ ID NO: 719 - DNA, 51 bp, synthetic construct
  misc_feature 1..51: note = Synthetic
  source 1..51: mol_type = other DNA
ttgactccattatcccccggacaccagatgttttacacgaggatctcttaa

SEQ ID NO: 720 - DNA, 156 bp, synthetic construct
  source 1..156: mol_type = other DNA
  misc_feature 1..156: note = Synthetic
atgctcaccactaccctctccgtgctggagtactcatctacacccattttgctgattctcactcctctcattgacatctcgatgcttggagtcatgtcgggcaatatcccaatcattcccatcacattgtcgataggttcaactccccaattttga

SEQ ID NO: 721 - DNA, 60 bp, synthetic construct
  misc_feature 1..60: note = Synthetic
  source 1..60: mol_type = other DNA
atggaagttttgtcctcggatgctctgtgtagagaggagacagaaaagggactcttatga

SEQ ID NO: 722 - DNA, 57 bp, synthetic construct
  source 1..57: mol_type = other DNA
  misc_feature 1..57: note = Synthetic
atgattacgcacgctcggctggaagcctacagagtcggggtggggccggacaggtga

SEQ ID NO: 723 - DNA, 45 bp, synthetic construct
  misc_feature 1..45: note = Synthetic
  source 1..45: mol_type = other DNA
atggatacatttaaggctaatgcgaagcactctctatgtcggtga

SEQ ID NO: 724 - DNA, 72 bp, synthetic construct
  source 1..72: mol_type = other DNA
  misc_feature 1..72: note = Synthetic
atcccttcaatcctccatcagatcctacccaacttgaccttgatacagctctcaatgatgatatatttatag

SEQ ID NO: 725 - DNA, 222 bp, synthetic construct
  misc_feature 1..222: note = Synthetic
  source 1..222: mol_type = other DNA
atggcaaaacagctctgcctgctgcctcaggaacccttttgcatcactcgtgtgtgccttttgtgcttgctacataaacaaaacctaaacgctcagtataaaaggccggtggacacgtatgatccttgcctaattctaacgggagaggcagaaagatatatggtggacgctgtgggaaattaccgggaagcctccactgcgactcggtccgcactagcctga

SEQ ID NO: 726 - DNA, 168 bp, synthetic construct
  misc_feature 1..168: note = Synthetic
  source 1..168: mol_type = other DNA
atgcagcaggataggacttatagacatcatggacccgaagtgtctggctggttttctgagcaattaatgaccggcaaaataccgctaacagaggtgtttgttgatgttgaaaacaaaccaagtcctgccccgataaccatcgactcggtccgcactagcctgaggtaa

SEQ ID NO: 727 - DNA, 15 bp, synthetic construct
  misc_feature 1..15: note = Synthetic
  source 1..15: mol_type = other DNA
ctgcccagcatataa

SEQ ID NO: 728 - DNA, 141 bp, synthetic construct
  source 1..141: mol_type = other DNA
  misc_feature 1..141: note = Synthetic
ataccacctcaggactacaccgaccacactttaaccagacctgtatcctgtttgatggacacgatctactattcagcaccgtcacaccttgtttgcaccaaggcttttacctcatcgacgaactacgttacgttaaaataa

SEQ ID NO: 729 - DNA, 219 bp, synthetic construct
  source 1..219: mol_type = other DNA
  misc_feature 1..219: note = Synthetic
atgcatgtaatttctgagacacttgcatatgggcatgttcccgcatttattatgggctccactctggtgcgtcccagtttaaacgccaccgccgaggaaaatcccgcgtcagaaacgcgatgtttattacgagtgcttgcggggagaactgtagacctgccaggcggaggaacgttacacattacctgtaccgactcggtccgcactagcctgaggtaa

SEQ ID NO: 730 - DNA, 90 bp, synthetic construct
  source 1..90: mol_type = other DNA
  misc_feature 1..90: note = Synthetic
atgtttattacgagtgcttgcggggagaactgtagacctgccaggcggaggaacgttacacattacctgtaccgactcggtccgcactag

SEQ ID NO: 731 - DNA, 219 bp, synthetic construct
  misc_feature 1..219: note = Synthetic
  source 1..219: mol_type = other DNA
atgcatgtaatttctgagacacttgcatatgggcatgttcccgcatttattgccggctccactctggtgcgtcccagtttaaacgccaccgccgaggaaaatcccgcgtcagaaacgcgatgtttattacgagtgcttgcggggagaactgtagacctgccaggcggaggaacgttacacattacctgtaccgactcggtccgcactagcctgaggtaa

SEQ ID NO: 732 - DNA, 168 bp, synthetic construct
  source 1..168: mol_type = other DNA
  misc_feature 1..168: note = Synthetic
atggaccgcgcggttaacagagtcgtgctggagaatgaggaaagagaagcaaagaacacatggcgcctggttttccggatcgcagtcttacttttaatggtaatgactctagctatctccgcagctgccctggcatacagcgactcggtccgcactagcctgaggtaa

SEQ ID NO: 733 - DNA, 144 bp, synthetic construct
  source 1..144: mol_type = other DNA
  misc_feature 1..144: note = Synthetic
gtgctggagaatgaggaaagagaagcaaagaacacatggcgcctggttttccggatcgcagtcttacttttaatggtaatgactctagctatctccgcagctgccctggcatacagcgactcggtccgcactagcctgaggtaa

SEQ ID NO: 734 - DNA, 21 bp, synthetic construct
  source 1..21: mol_type = other DNA
  misc_feature 1..21: note = Synthetic
atgcaaagcccttacctttga

SEQ ID NO: 735 - DNA, 138 bp, synthetic construct
  misc_feature 1..138: note = Synthetic
  source 1..138: mol_type = other DNA
ataggcataactgtattaatgcttttgatggtgatttctggtgccgccctgatagtcaaggagttaaatcctaatgatatattcacaatgcaatcattaaagtttaatcgcgactcggtccgcactagcctgaggtaa

SEQ ID NO: 736 - DNA, 165 bp, synthetic construct
  misc_feature 1..165: note = Synthetic
  source 1..165: mol_type = other DNA
gtggatgctataaccgttctaactgcgataggcataactgtattaatgcttttgatggtaatttctggtgccgccctgatagtcaaggagttaaatcctaatgatatattcactatgcaatcattaaagtttaatcgcgactcggtccgcactagcctgaggtaa

SEQ ID NO: 737 - DNA, 165 bp, synthetic construct
  source 1..165: mol_type = other DNA
  misc_feature 1..165: note = Synthetic
gtggatgctataaccgttctaactgcgataggcataactgtattaatgcttttgatggtgatttctggtgccgccctgatagtcaaggagttaaatcctaatgatatattcacaatgcaatcattaaagtttaatcgcgactcggtccgcactagcctgaggtaa

SEQ ID NO: 738 - DNA, 120 bp, synthetic construct
  source 1..120: mol_type = other DNA
  misc_feature 1..120: note = Synthetic
atgcttttgatggtaatttctggcaccgccatgatagtcaaggagttaaatcctaatgatatattcactatgcaatcattaaagtttaatcgcgactcggtccgcactagcctgaggtaa

SEQ ID NO: 739 - DNA, 168 bp, synthetic construct
  misc_feature 1..168: note = Synthetic
  source 1..168: mol_type = other DNA
atggcggatgctataaccgttctaactgcgatcggtataactgtattaatgcttttgatggtaatttctggcaccgccatgatagtcaaggagttaaatcctaatgatatattcacaatgcaatcattaaagtttaatcgcgactcggtccgcactagcctgaggtaa

SEQ ID NO: 740 - DNA, 138 bp, synthetic construct
  misc_feature 1..138: note = Synthetic
  source 1..138: mol_type = other DNA
atcggtataactgtattaatgcttttgatggtaatttctggcaccgccatgatagtcaaggagttaaatcctaatgatatattcacaatgcaatcattaaagtttaatcgcgactcggtccgcactagcctgaggtaa

SEQ ID NO: 741 - DNA, 27 bp, synthetic construct
  source 1..27: mol_type = other DNA
  misc_feature 1..27: note = Synthetic
atgttaacaatactgcgactttgttaa

SEQ ID NO: 742 - DNA, 207 bp, synthetic construct
  source 1..207: mol_type = other DNA
  misc_feature 1..207: note = Synthetic
atttctataaattttatagtcttaatagaaggaaataaaatgtcattgtcttcattattcaatggtaaatatgacacaaaattccttttaaacatgtcatctgctgctaaggtggagttgattgttgagaaagttgcagctttagctgatgcctgtttagagacgccgttaccaactgacgactcggtccgcactagcctgaggtaa

SEQ ID NO: 743 - DNA, 207 bp, synthetic construct
  source 1..207: mol_type = other DNA
  misc_feature 1..207: note = Synthetic
atttctataaattttatagtcttaatagaaggaaataaagcctcattgtcttcattattcaatggtaaatatgacacaaaattccttttaaacatgtcatctgctgctaaggtggagttgattgttgagaaagttgcagctttagctgatgcctgtttagagacgccgttaccaactgacgactcggtccgcactagcctgaggtaa

SEQ ID NO: 744 - DNA, 30 bp, synthetic construct
  source 1..30: mol_type = other DNA
  misc_feature 1..30: note = Synthetic
atgttgttaaaccacacgaaaagggaataa

SEQ ID NO: 745 - DNA, 36 bp, synthetic construct
  source 1..36: mol_type = other DNA
  misc_feature 1..36: note = Synthetic
atggaagcaagtactggcagaactgcaggacattga

SEQ ID NO: 746 - DNA, 12 bp, synthetic construct
  misc_feature 1..12: note = Synthetic
  source 1..12: mol_type = other DNA
ctggctgtctag

SEQ ID NO: 747 - DNA, 18 bp, synthetic construct
  misc_feature 1..18: note = Synthetic
  source 1..18: mol_type = other DNA
atgcccaatatacattga

SEQ ID NO: 748 - DNA, 168 bp, synthetic construct
  misc_feature 1..168: note = Synthetic
  source 1..168: mol_type = other DNA
atggggctctttggactgacacgctttatccatgaacataaactggttaaacccagcatcatttcaacgccacccggagttttaacccccgtggcggtagacgtatggaacgtcatgtacacattgttggaacgtttatacgactcggtccgcactagcctgaggtaa

SEQ ID NO: 749 - DNA, 216 bp, synthetic construct
  source 1..216: mol_type = other DNA
  misc_feature 1..216: note = Synthetic
atgggaatcgtgaacatccttgcctgcaccttcttttcctttgtgatttacccccgctttgactttggttggaacgcacccgaggcgctctggctcccgcctgatcccgacacaccaccacagcagcagcaaaatcaggcacacgcaccaccaccacagcctaggccccaatacatgcccatcttaaactatgcgactcggtccgcactagcctga

SEQ ID NO: 750 - DNA, 39 bp, synthetic construct
  misc_feature 1..39: note = Synthetic
  source 1..39: mol_type = other DNA
atgcttatgcttgctgtggtgcttgtgctaaacaagtag

SEQ ID NO: 751 - DNA, 132 bp, synthetic construct
  source 1..132: mol_type = other DNA
  misc_feature 1..132: note = Synthetic
ctgactactgcctctcccttatcgtcaatcttctcgaggattggggaccctgcgctgaacatggagaacatcacatcaggattcctaggaccccttctcgtgttcgactcggtccgcactagcctgaggtaa

SEQ ID NO: 752 - DNA, 72 bp, synthetic construct
  source 1..72: mol_type = other DNA
  misc_feature 1..72: note = Synthetic
atggagaacatcacatcaggattcctaggaccccttctcgtgttcgactcggtccgcactagcctgaggtaa

SEQ ID NO: 753 - DNA, 123 bp, synthetic construct
  source 1..123: mol_type = other DNA
  misc_feature 1..123: note = Synthetic
acgggcaagaaacttaaatatatttcttttacagatgaacaacctatcagctcaagacttctacaaaaaatgtacctacaactcagaaaccagaaaccaaatgtggatgtcctgcattgctga

SEQ ID NO: 754 - DNA, 168 bp, synthetic construct
  source 1..168: mol_type = other DNA
  misc_feature 1..168: note = Synthetic
atgaacaacctatcagctcaagacttctacaaaaaatgtacctacaactcagaaaccagaaaccaaatgtggatgtcctgcattgctgactcccatgacagttggtgtaactgcgatactccttttgctcacctcttggccgactcggtccgcactagcctgaggtaa

SEQ ID NO: 755 - DNA, 54 bp, synthetic construct
  misc_feature 1..54: note = Synthetic
  source 1..54: mol_type = other DNA
atgtacctacaactcagaaaccagaaaccaaatgtggatgtcctgcattgctga

SEQ ID NO: 756 - DNA, 183 bp, synthetic construct
  misc_feature 1..183: note = Synthetic
  source 1..183: mol_type = other DNA
atatttcttttacaggccaacaacctatcagctcaagacttctacaaaaaatgtacctacaactcagaaaccagaaaccaaatgtggatgtcctgcattgctgactcccatgacagttggtgtaactgcgatactccttttgctcacctcttggccgactcggtccgcactagcctgaggtaa

SEQ ID NO: 757 - DNA, 138 bp, synthetic construct
  misc_feature 1..138: note = Synthetic
  source 1..138: mol_type = other DNA
ataggcataactgtattaatgcttttgatggtaatttctggtgccgccctgatagtcaaggagttaaatcctaatgatatattcactatgcaatcattaaagtttaatcgcgactcggtccgcactagcctgaggtaa

SEQ ID NO: 758 - DNA, 168 bp, synthetic construct
  source 1..168: mol_type = other DNA
  misc_feature 1..168: note = Synthetic
atgagggtgtgcttaagaatgccggtggagggcgctctgcgcgagctttttatcatggctggcttggatttacctcaggaactaatacgaatcattcaaggctggaaaaatgaaaattatctaggcatggtgcaggagtgcgactcggtccgcactagcctgaggtaa

SEQ ID NO: 759 - DNA, 162 bp, synthetic construct
  source 1..162: mol_type = other DNA
  misc_feature 1..162: note = Synthetic
gtgtgcttaagaatgccggtggagggcgctctgcgcgagctttttatcatggctggcttggatttacctcaggaactaatacgaatcattcaaggctggaaaaatgaaaattatctaggcatggtgcaggagtgcgactcggtccgcactagcctgaggtaa

SEQ ID NO: 760 - DNA, 30 bp, synthetic construct
  misc_feature 1..30: note = Synthetic
  source 1..30: mol_type = other DNA
atgatgccattcttaatttgctacaggtga

SEQ ID NO: 761 - DNA, 168 bp, synthetic construct
  source 1..168: mol_type = other DNA
  misc_feature 1..168: note = Synthetic
atgagggtgtgtttaagaatggtggtggagggcgccctccgggacctgtttgtaatgtgtggtttggatttaccacaagaactgacacgaataattcaaggctggaaagctgaaaattatctgggaatggtgcaggaatgcgactcggtccgcactagcctgaggtaa

SEQ ID NO: 762 - DNA, 27 bp, synthetic construct
  source 1..27: mol_type = other DNA
  misc_feature 1..27: note = Synthetic
atgccattcttaatttgctacaggtga

SEQ ID NO: 763 - DNA, 30 bp, synthetic construct
  source 1..30: mol_type = other DNA
  misc_feature 1..30: note = Synthetic
atgttgccattctcaattcgctacaggtga

SEQ ID NO: 764 - DNA, 168 bp, synthetic construct
  source 1..168: mol_type = other DNA
  misc_feature 1..168: note = Synthetic
atgagggtgtgtttaagaatggtggtggagggcgccctccgggacctgtttgtaatgtgtggattggatttaccacaagaactgacacgaataattcaaggctggaaagctgaaaattatctgggaatggtgcaggaatgcgactcggtccgcactagcctgaggtaa

SEQ ID NO: 765 - DNA, 216 bp, synthetic construct
  misc_feature 1..216: note = Synthetic
  source 1..216: mol_type = other DNA
acgctgttctgcagccatttaactttaaataatttacaaaaatttaaaatgagcatccgtataaaaatcgataaactgcgccaaattgtggcatatttttcagagttcagtgaagaagtatctataaatgtagactcgacggatgagttaatgtatatttttgccgccttgggcggatctgtaaacatcgactcggtccgcactagcctgaggtaa

SEQ ID NO: 766 - DNA, 216 bp, synthetic construct
  misc_feature 1..216: note = Synthetic
  source 1..216: mol_type = other DNA
acgctgttctgcagccatttaactttaaataatttacaaaaatttaaaatgagcatccgtataaaaatcgataaactgcgccaaattgtggcatatttttcagagttcagtgaagaagtgtctataaatgtagactcgacggatgagttaatgtatatttttgccgccttgggcggatctgtaaacatcgactcggtccgcactagcctgaggtaa

SEQ ID NO: 767 - DNA, 216 bp, synthetic construct
  misc_feature 1..216: note = Synthetic
  source 1..216: mol_type = other DNA
acgctgttctgcagccatttaactttaaataatttacaaaaatttaaaatgagtatccgtataaaaatcgataaactgcgccaaattgtggcatatttttcagagttcagtgaagaagtgtctataaatgtagactcaacggatgagttaatgtatatttttgccgccttgggcggatctgtaaacatcgactcggtccgcactagcctgaggtaa

SEQ ID NO: 768 - DNA, 216 bp, synthetic construct
  misc_feature 1..216: note = Synthetic
  source 1..216: mol_type = other DNA
acgctgttctgcagccatttaactttaaataatttacaaaaatttaaagccagcatccgtataaaaatcgataaactgcgccaaattgtggcatatttttcagagttcagtgaagaagtatctataaatgtagactcgacggatgagttaatgtatatttttgccgccttgggcggatctgtaaacatcgactcggtccgcactagcctgaggtaa

SEQ ID NO: 769 - DNA, 150 bp, synthetic construct
  misc_feature 1..150: note = Synthetic
  source 1..150: mol_type = other DNA
atcgataaactgcgccaaattgtggcatatttttcagagttcagtgaagaagtgtctataaatgtagactcgacggatgagttaatgtatatttttgccgccttgggcggatctgtaaacatcgactcggtccgcactagcctgaggtaa

SEQ ID NO: 770 - DNA, 216 bp, synthetic construct
  source 1..216: mol_type = other DNA
  misc_feature 1..216: note = Synthetic
acgctgttctgcagccatttaactttaaataatttacaaaaatttaaagccagtatccgtataaaaatcgataaactgcgccaaattgtggcatatttttcagagttcagtgaagaagtgtctataaatgtagactcaacggatgagttaatgtatatttttgccgccttgggcggatctgtaaacatcgactcggtccgcactagcctgaggtaa

SEQ ID NO: 771 - DNA, 213 bp, synthetic construct
  source 1..213: mol_type = other DNA
  misc_feature 1..213: note = Synthetic
ctgttctgtagccatttaactttaaataatttacaaaaatttaaaatgagcatccgtataaaaatcgataaattgcgccaaattgtggcatatttttcagagttcagcgaagaagtgtctataaatgtagactcgacggatgagttaatgtatatttttgccgccttgggcggatctgtaaacatcgactcggtccgcactagcctgaggtaa

SEQ ID NO: 772 - DNA, 219 bp, synthetic construct
  source 1..219: mol_type = other DNA
  misc_feature 1..219: note = Synthetic
acgacgctgttctgtagccatttaactttaaataatttacaaaaatttaaagccagcatccgtataaaaatcgataaattgcgccaaattgtggcatatttttcagagttcagcgaagaagtgtctataaatgtagactcgacggatgagttaatgtatatttttgccgccttgggcggatctgtaaacatcgactcggtccgcactagcctgaggtaa

SEQ ID NO: 773 - DNA, 162 bp, synthetic construct
  misc_feature 1..162: note = Synthetic
  source 1..162: mol_type = other DNA
gtgtgtttaagaatggtggtggagggcgccctccgggacctgtttgtaatgtgtggattggatttaccacaagaactgacacgaataattcaaggctggaaagctgaaaattatctgggaatggtgcaggaatgcgactcggtccgcactagcctgaggtaa

SEQ ID NO: 774 - DNA, 108 bp, synthetic construct
  misc_feature 1..108: note = Synthetic
  source 1..108: mol_type = other DNA
attgcaaaatatggacactcatttaacgtgaaaagatttacgaatgaagaaatgtgtcttaagaatgattatccacgaattatatcatataatcctccgccaaaatag

SEQ ID NO: 775 - DNA, 57 bp, synthetic construct
  source 1..57: mol_type = other DNA
  misc_feature 1..57: note = Synthetic
atgtgtcttaagaatgattatccacgaattatatcatataatcctccaccaaaatag

SEQ ID NO: 776 - DNA, 21 bp, synthetic construct
  source 1..21: mol_type = other DNA
  misc_feature 1..21: note = Synthetic
atggacactcatttaatgtga

SEQ ID NO: 777 - DNA, 45 bp, synthetic construct
  source 1..45: mol_type = other DNA
  misc_feature 1..45: note = Synthetic
atggacaaaaagaaattcgactcggtccgcactagcctgaggtaa

SEQ ID NO: 778 - DNA, 150 bp, synthetic construct
  source 1..150: mol_type = other DNA
  misc_feature 1..150: note = Synthetic
atgtcacccagcatatacagcgagtcaaccacaaccaagctagacagaatcaagaagctggccaaagaggtcagagaaacagcaataacggcagaggacaacatcgggtctttggatgatgagagcaaggtcatagctggcatgtcataa

SEQ ID NO: 779 - DNA, 30 bp, synthetic construct
  misc_feature 1..30: note = Synthetic
  source 1..30: mol_type = other DNA
atggaggagtcactggttccaggaggctag

SEQ ID NO: 780 - DNA, 201 bp, synthetic construct
  source 1..201: mol_type = other DNA
  misc_feature 1..201: note = Synthetic
atgcaactttttcacctctgcctaatcatctcttgttcatgtcctactgttcaagcctccaagctgtgccttgggtggctttggggcatggacatcgacccttataaagaatttggagctactgtggagttactctcgtttttgccttctgacttctttccttcagtacgagatcttccgactcggtccgcactagcctga

SEQ ID NO: 781 - DNA, 126 bp, synthetic construct
  misc_feature 1..126: note = Synthetic
  source 1..126: mol_type = other DNA
ttgggtggctttggggcatggacatcgacccttataaagaatttggagctactgtggagttactctcgtttttgccttctgacttctttccttcagtacgagatcttccgactcggtccgcactag

SEQ ID NO: 782 - DNA, 201 bp, synthetic construct
  misc_feature 1..201: note = Synthetic
  source 1..201: mol_type = other DNA
atgcaactttttcacctctgcctaatcatctcttgttcgcctcctactgttcaagcctccaagctgtgccttgggtggctttggggcatggacatcgacccttataaagaatttggagctactgtggagttactctcgtttttgccttctgacttctttccttcagtacgagatcttccgactcggtccgcactagcctga

SEQ ID NO: 783 - DNA, 138 bp, synthetic construct
  misc_feature 1..138: note = Synthetic
  source 1..138: mol_type = other DNA
atggttacctttgttaacatgagtactgtttctagtacgcccactctggaaatgtcaagaacttcagattttagttccacgtcaatcacatcagatacagagagtacgagcgactcggtccgcactagcctgaggtaa

SEQ ID NO: 784 - DNA, 156 bp, synthetic construct
  source 1..156: mol_type = other DNA
  misc_feature 1..156: note = Synthetic
attttattttttttagaaatggttacctttgttaacatgagtactgtttctagtacgcccactctggaaatgtcaagaacttcagattttagttccacgtcaatcacatcagatacagagagtacgagcgactcggtccgcactagcctgaggtaa

SEQ ID NO: 785 - DNA, 27 bp, synthetic construct
  misc_feature 1..27: note = Synthetic
  source 1..27: mol_type = other DNA
acgtgggcgctaataattgcgttataa

SEQ ID NO: 786 - DNA, 189 bp, synthetic construct
  misc_feature 1..189: note = Synthetic
  source 1..189: mol_type = other DNA
gtgtttatgctgtggggtgcgaaggcgggagacaaagcttcactaatcaactccaagaagcatctggttctgacctctcagcatccctctcccctggcccagaacagcacccgaaagagtgcccagcagaagttcctgggcaacaaccactttgtcctcgctaacacgactcggtccgcactagcctga

SEQ ID NO: 787 - DNA, 168 bp, synthetic construct
  source 1..168: mol_type = other DNA
  misc_feature 1..168: note = Synthetic
atgatggaaacacccgcggagagcgtcagggcccgcgtcagctcggttaccttttataatgtcacccagaccgcagggcggtggtgggcgatttgggtcgtgggcatcgtgcccatcaaaagggaggacgttgagactctcgactcggtccgcactagcctgaggtaa

SEQ ID NO: 788 - DNA, 168 bp, synthetic construct
  misc_feature 1..168: note = Synthetic
  source 1..168: mol_type = other DNA
atgatggaaacacccgcggagagcgtcagggcccgcgtcagctcggttaccttttataatgttacccagaccgcagggcggtggtgggcgatttgggtcgtgggcatcgtgcccatcaaaagggaggacgttgagactctcgactcggtccgcactagcctgaggtaa

SEQ ID NO: 789 - DNA, 201 bp, synthetic construct
  misc_feature 1..201: note = Synthetic
  source 1..201: mol_type = other DNA
attctgcactcaaagccgcatccggcaagagtcatggggaaaacgcagtccaagggacagcccagcacaaatctcctcaaggagacagaaccaaggcatccagtaataccagatgccaggggaactggccctgaattctgcaagagctgctggttcgaaaggagggggttagtcgactcggtccgcactagcctgaggtaa

SEQ ID NO: 790 - DNA, 201 bp, synthetic construct
  misc_feature 1..201: note = Synthetic
  source 1..201: mol_type = other DNA
attctgcactcaaagccgcatccggcaagagtcgccgggaaaacgcagtccaagggacagcccagcacaaatctcctcaaggagacagaaccaaggcatccagtaataccagatgccaggggaactggccctgaattctgcaagagctgctggttcgaaaggagggggttagtcgactcggtccgcactagcctgaggtaa

SEQ ID NO: 791 - DNA, 87 bp, synthetic construct
  misc_feature 1..87: note = Synthetic
  source 1..87: mol_type = other DNA
atgagtataagtaccctgctattaaagacaagaagaaaccaagcatcactctcggaaaagatcccgactcggtccgcactagcctga

SEQ ID NO: 792 - DNA, 48 bp, synthetic construct
  misc_feature 1..48: note = Synthetic
  source 1..48: mol_type = other DNA
atgagtacaaataccccgccattaaagatcggaaaaaacccagcataa

SEQ ID NO: 793 - DNA, 27 bp, synthetic construct
  misc_feature 1..27: note = Synthetic
  source 1..27: mol_type = other DNA
atgttgagttcctgctctataggttaa

SEQ ID NO: 794 - DNA, 117 bp, synthetic construct
  misc_feature 1..117: note = Synthetic
  source 1..117: mol_type = other DNA
atgactaataggttcaagttcattttgaatgtttcctacatgtgccacttcattacgaaagaaacaccagatagattgacagatcagataaaatgttttcgactcggtccgcactag

SEQ ID NO: 795 - DNA, 117 bp, synthetic construct
  source 1..117: mol_type = other DNA
  misc_feature 1..117: note = Synthetic
atgactaataggttcaagttcattttgaatgtttcctacatgtgccacttcattacgaaagaaacaccagatagattgacagatcagataaagccttttcgactcggtccgcactag

SEQ ID NO: 796 - DNA, 27 bp, synthetic construct
  source 1..27: mol_type = other DNA
  misc_feature 1..27: note = Synthetic
atgttcatctgtagaacagaaatgtaa

SEQ ID NO: 797 - DNA, 105 bp, synthetic construct
  misc_feature 1..105: note = Synthetic
  source 1..105: mol_type = other DNA
aggttatctctgatcagtatgaatacaaataccctgcgattgatgataaaaagaaacccagtattacactgggaaaagcccccgactcggtccgcactagcctga

SEQ ID NO: 798 - DNA, 30 bp, synthetic construct
  source 1..30: mol_type = other DNA
  misc_feature 1..30: note = Synthetic
atgacgtgggcgctaataattgcgttataa

SEQ ID NO: 799 - DNA, 75 bp, synthetic construct
  misc_feature 1..75: note = Synthetic
  source 1..75: mol_type = other DNA
atgacaccggttcctaccgctgacgccgttttggcccggttcgaccttggcaagaaaagaaagcaaaccctgtaa

SEQ ID NO: 800 - DNA, 24 bp, synthetic construct
  source 1..24: mol_type = other DNA
  misc_feature 1..24: note = Synthetic
ttggcttcctctaggtgtcgctga

SEQ ID NO: 801 - DNA, 195 bp, synthetic construct
  misc_feature 1..195: note = Synthetic
  source 1..195: mol_type = other DNA
ctgatcaaaagacctacagctttgactcaactacggccgccatcatgcttgcttcatacactatcacccatttcggcaaggcaaccaatccacttgtcagagtcaatcggctgggtcctggaatcccggatcatcccctcaggctcctgcgaattggaaaccaggctttcctccaggcgactcggtccgcactag

SEQ ID NO: 802 - DNA, 168 bp, synthetic construct
  misc_feature 1..168: note = Synthetic
  source 1..168: mol_type = other DNA
acggccgccatcatgcttgcttcatacactatcacccatttcggcaaggcaaccaatccacttgtcagagtcaatcggctgggtcctggaatcccggatcatcccctcaggctcctgcgaattggaaaccaggctttcctccaggcgactcggtccgcactagcctga

SEQ ID NO: 803 - DNA, 195 bp, synthetic construct
  source 1..195: mol_type = other DNA
  misc_feature 1..195: note = Synthetic
ctgatcaaaagacctacagctttgactcaactgccgccgccatcatgcttgcttcatacactatcacccatttcggcaaggcaaccaatccacttgtcagagtcaatcggctgggtcctggaatcccggatcatcccctcaggctcctgcgaattggaaaccaggctttcctccaggcgactcggtccgcactag

SEQ ID NO: 804 - DNA, 156 bp, synthetic construct
  misc_feature 1..156: note = Synthetic
  source 1..156: mol_type = other DNA
atgcttgcttcatacactatcacccatttcggcaaggcaaccaatccacttgtcagagtcaatcggctgggtcctggaatcccggatcatcccctcaggctcctgcgaattggaaaccaggctttcctccaggcgactcggtccgcactagcctga

SEQ ID NO: 805 - DNA, 192 bp, synthetic construct
  misc_feature 1..192: note = Synthetic
  source 1..192: mol_type = other DNA
atcaaaagacctacagctttgactcaactacggccgccatcatgcttgcttcatacactatcacccatttcggcaaggcaaccaatccacttgtcagagtcaatcggctgggtcctggaatcccggatcatcccctcaggctcctgcgaattggaaaccaggctttcctccaggcgactcggtccgcactag

SEQ ID NO: 806 - DNA, 168 bp, synthetic construct
  misc_feature 1..168: note = Synthetic
  source 1..168: mol_type = other DNA
atgacctccaaatgcatgctgtgttggaccgcgattacgaatgccctggctattttaatgttattactagtaatttaccgggcgataatcggatttaatggcgatatttatacgagcacgttgtcggcgtttagctgtatcgactcggtccgcactagcctgaggtaa

SEQ ID NO: 807 - DNA, 150 bp, synthetic construct
  misc_feature 1..150: note = Synthetic
  source 1..150: mol_type = other DNA
ctgtgttggaccgcgattacgaatgccctggctattttaatgttattactagtaatttaccgggcgataatcggatttaatggcgatatttatacgagcacgttgtcggcgtttagctgtatcgactcggtccgcactagcctgaggtaa

SEQ ID NO: 808 - DNA, 135 bp, synthetic construct
  source 1..135: mol_type = other DNA
  misc_feature 1..135: note = Synthetic
atgctacaggtgagcaacgtaacgaatcacaccttgaatagcaccgaaatttatcagttgttcgagtacactcggttcggggtatggttgatgtgcatcgtgggcaccgactcggtccgcactagcctgaggtaa

SEQ ID NO: 809 - DNA, 168 bp, synthetic construct
  misc_feature 1..168: note = Synthetic
  source 1..168: mol_type = other DNA
atggactctgacaagattgtcttcaaagtccataatcagttggtgtctgtaaagccagaggtgattgttgatcaatatgagtacaaatatcctgctatcagagatcagaagaaacctagcataactctggggaaagctcccgactcggtccgcactagcctgaggtaa

SEQ ID NO: 810 - DNA, 48 bp, synthetic construct
  misc_feature 1..48: note = Synthetic
  source 1..48: mol_type = other DNA
atgagtacaaatatcctgctatcagagatcagaagaaacctagcataa

SEQ ID NO: 811 - DNA, 168 bp, synthetic construct
  misc_feature 1..168: note = Synthetic
  source 1..168: mol_type = other DNA
atgatggaaacacccgcggagagcgtcagggcccgggtcagctcggttaccttttataatgtcacccagaccgcagggcggtggtgggcgatttgggtcgtgggcatcgtgcccatcaaaagggaggacgttgagactctcgactcggtccgcactagcctgaggtaa

SEQ ID NO: 812 - DNA, 165 bp, synthetic construct
  misc_feature 1..165: note = Synthetic
  source 1..165: mol_type = other DNA
atggaaacacccgcggagagcgtcagggcccgcgtcagctcggttaccttttataatgtcacccagaccgcagggcggtggtgggcgatttgggtcgtgggcatcgtgcccatcaaaagggaggacgttgagactctcgactcggtccgcactagcctgaggtaa

SEQ ID NO: 813 - DNA, 165 bp, synthetic construct
  misc_feature 1..165: note = Synthetic
  source 1..165: mol_type = other DNA
atggaaacacccgcggagagcgtcagggcccgcgtcagctcggttaccttttataatgttacccagaccgcagggcggtggtgggcgatttgggtcgtgggcatcgtgcccatcaaaagggaggacgttgagactctcgactcggtccgcactagcctgaggtaa

SEQ ID NO: 814 - DNA, 165 bp, synthetic construct
  source 1..165: mol_type = other DNA
  misc_feature 1..165: note = Synthetic
atggaaacacccgcggagagcgtcagggcccgggtcagctcggttaccttttataatgtcacccagaccgcagggcggtggtgggcgatttgggtcgtgggcatcgtgcccatcaaaagggaggacgttgagactctcgactcggtccgcactagcctgaggtaa

SEQ ID NO: 815 - DNA, 33 bp, synthetic construct
  misc_feature 1..33: note = Synthetic
  source 1..33: mol_type = other DNA
gtggaggaagcgactcggtccgcactagcctga

SEQ ID NO: 816 - DNA, 24 bp, synthetic construct
  source 1..24: mol_type = other DNA
  misc_feature 1..24: note = Synthetic
atgctacgagaatctaacagctga

SEQ ID NO: 817 - DNA, 168 bp, synthetic construct
  misc_feature 1..168: note = Synthetic
  source 1..168: mol_type = other DNA
ctgagatacgatgagaccaagtccagggtgcgcgcttgcgagtgcggtggcagacacaccaggatgcagccagtggccctggatgtgaccgaggagctgcgaccagaccacctggtgatggcctgtaccgggaccgagttcagctccagtggggaggacacagattag

SEQ ID NO: 818 - DNA, 81 bp, synthetic construct
  misc_feature 1..81: note = Synthetic
  source 1..81: mol_type = other DNA
acgatgagaccaagtccagggtgcgcgcttgcgagtgcggtggcagacacaccaggatgcagccagtggccctggatgtga

SEQ ID NO: 819 - DNA, 216 bp, synthetic construct
  source 1..216: mol_type = other DNA
  misc_feature 1..216: note = Synthetic
aagccaatcacattcctggatgttgaagagggtgacatgtgtttgcatactttggaaaaggtggaccccctggttgacaacgatcgctacccctcccacatagcctcctttgtgctggcctggacgcgcgcctttgtatcagagtggtcagagttcctgtacgaagaagaccgaggcactccactggagaagaggcctcgactcggtccgcactag

SEQ ID NO: 820 - DNA, 84 bp, synthetic construct
  source 1..84: mol_type = other DNA
  misc_feature 1..84: note = Synthetic
atgttgaagagggtgacatgtgtttgcatactttggaaaaggtggaccccctggttgacaacgatcgctacccctcccacatag

SEQ ID NO: 821 - DNA, 216 bp, synthetic construct
  misc_feature 1..216: note = Synthetic
  source 1..216: mol_type = other DNA
aagccaatcacattcttggatgtggaggagggggacatgtgtttacataccgtagagaaggtggaccccctggttgacaacgaccgctacccctcccacgtggcctcctttgtgctggcctggacacgcgcttttgtatcagagtgggctgggttcctctacgaagaggaccgaggcactccgctcgaggacaggccccgactcggtccgcactag

SEQ ID NO: 822 - DNA, 27 bp, synthetic construct
  misc_feature 1..27: note = Synthetic
  source 1..27: mol_type = other DNA
aagatgacctttgccttcacaccctag

SEQ ID NO: 823 - DNA, 78 bp, synthetic construct
  misc_feature 1..78: note = Synthetic
  source 1..78: mol_type = other DNA
atggtccgagatcttgtacgcagaggacagaggcacaccgttggaacagcgtacccgactcggtccgcactagcctga

SEQ ID NO: 824 - DNA, 114 bp, synthetic construct
  misc_feature 1..114: note = Synthetic
  source 1..114: mol_type = other DNA
atgaattcctctattgccacacgcgctacgaaacttttctgcgggtcatgggcgactttcagggcatctttgagtgccagtacagcgccgacgactcggtccgcactagcctga

SEQ ID NO: 825 - DNA, 189 bp, synthetic construct
  misc_feature 1..189: note = Synthetic
  source 1..189: mol_type = other DNA
attgtcagatattttgcagccatggcctctgcttcaattccaaccgacccagacgtgtctactatttgtgaagactttatgaatttgctaccagacgaaccttcggatgactttgcattggaagtcaccgattgggcaaatgatgaagctattggctccaccgactcggtccgcactagcctgaggtaa

SEQ ID NO: 826 - DNA, 90 bp, synthetic construct
  misc_feature 1..90: note = Synthetic
  source 1..90: mol_type = other DNA
acgaaccttcggatgactttgcattggaagtcaccgattgggcaaatgatgaagctattggctccaccgactcggtccgcactagcctga

SEQ ID NO: 827 - DNA, 222 bp, synthetic construct
  source 1..222: mol_type = other DNA
  misc_feature 1..222: note = Synthetic
atctcattcagttgtagcatagtcatgaaaaaaacatgcaacaccactgacaaaatgaacatcatccgtaagatagtaaaaagctgcaaagaggaggaggagcaaaagcccagtccggtttcagccccccccgatgacgatgacctgtggcttccccctccagagtatgtccctctgtcagagatcgccaataacgactcggtccgcactagcctgaggtaa

SEQ ID NO: 828 - DNA, 222 bp, synthetic construct
  misc_feature 1..222: note = Synthetic
  source 1..222: mol_type = other DNA
atctcattcagttgtagcatagtcatgaaaaaaacatgcaacaccactgacaaagccaacatcatccgtaagatagtaaaaagctgcaaagaggaggaggagcaaaagcccagtccggtttcagccccccccgatgacgatgacctgtggcttccccctccagagtatgtccctctgtcagagatcgccaataacgactcggtccgcactagcctgaggtaa

SEQ ID NO: 829 - DNA, 168 bp, synthetic construct
  source 1..168: mol_type = other DNA
  misc_feature 1..168: note = Synthetic
atgactacatctactacaactaccactaatatcatgctacaggtgagcaacgtaacgaatcacaccttgaatagcaccgaaatttatcagttgttcgagtacactcggttcggggtatggttgatgtgcatcgtgggcaccgactcggtccgcactagcctgaggtaa

SEQ ID NO: 830 - DNA, 45 bp, synthetic construct
  misc_feature 1..45: note = Synthetic
  source 1..45: mol_type = other DNA
ctggtggcgttgaactcccgcacctctcgggcgaacgccttgtag

SEQ ID NO: 831 - DNA, 156 bp, synthetic construct
  misc_feature 1..156: note = Synthetic
  source 1..156: mol_type = other DNA
atcattaattctttgatcggtggggatgactctattaaacggtctaatgtcttcgcggtcgatagtcaaattccaactttgtatatgccgcaatatatttctctatccggagttatgacaaacgatggcgactcggtccgcactagcctgaggtaa

SEQ ID NO: 832 - DNA, 99 bp, synthetic construct
  misc_feature 1..99: note = Synthetic
  source 1..99: mol_type = other DNA
gtggggatgactctattaaacggtctaatgtcttcgcggtcgatagtcaaattccaactttgtatatgccgcaatatatttctctatccggagttatga

SEQ ID NO: 833 - DNA, 189 bp, synthetic construct
  misc_feature 1..189: note = Synthetic
  source 1..189: mol_type = other DNA
gtgtctagctggcggcctcttttgacgcctggcgtacacgctgggaagacggagctcccacgtttacgcgaaacgatgaattcctctattgccacacgcgctacgaaacttttctgcgggtcatgggcgactttcagggcatctttgagtgccagtacagcgccgacgactcggtccgcactagcctga

SEQ ID NO: 834 - DNA, 45 bp, synthetic construct
  source 1..45: mol_type = other DNA
  misc_feature 1..45: note = Synthetic
atgaagaaagcagggctaggatcaaaaccaggctattcaccataa

SEQ ID NO: 835 - DNA, 66 bp, synthetic construct
  misc_feature 1..66: note = Synthetic
  source 1..66: mol_type = other DNA
atgcgcaagcttgccgaccaaagtctcccgccgaacttcgactcggtccgcactagcctgaggtaa

SEQ ID NO: 836 - DNA, 42 bp, synthetic construct
  source 1..42: mol_type = other DNA
  misc_feature 1..42: note = Synthetic
aagaaagcagggctaggatcaaaaccaggctattcaccataa

SEQ ID NO: 837 - DNA, 189 bp, synthetic construct
  source 1..189: mol_type = other DNA
  misc_feature 1..189: note = Synthetic
aggatcaaaaccaggctattcaccataagacaagaaatggccagcagaggcctctgggattcctttcgtcagtccgagagaggagaagagacaattgaagaaaggtttgaaatcacaggaacaatgcgcaagcttgccgaccaaagtctcccgccgaacttcgactcggtccgcactagcctgaggtaa

SEQ ID NO: 838 - DNA, 126 bp, synthetic construct
  source 1..126: mol_type = other DNA
  misc_feature 1..126: note = Synthetic
atgttgcgctacagtaatgtccggccttgctataaaatgtttttatatcgtcatatttgctatagcagtggttatttttatgcattacgaacaaagggtgcaggtaagcttgtttggggaaagtga

SEQ ID NO: 839 - DNA, 180 bp, synthetic construct
  misc_feature 1..180: note = Synthetic
  source 1..180: mol_type = other DNA
atgtgtctgcacacggtggaaaaggtggaccccctggtggaaaacgaccgctacccctcgcacgtggcctcctttgtcttggcgtggacgcgcgccttcgtctcagagtggtccgagtttctttacgaggaggaccgcgggacgcccctgcaggacaggccacgactcggtccgcactag

SEQ ID NO: 840 - DNA, 207 bp, synthetic construct
  source 1..207: mol_type = other DNA
  misc_feature 1..207: note = Synthetic
atgcggaggagggggacatgtgtctgcacacggtggaaaaggtggaccccctggtggaaaacgaccgctacccctcgcacgtggcctcctttgtcttggcgtggacgcgcgccttcgtctcagagtggtccgagtttctttacgaggaggaccgcgggacgcccctgcaggacaggccacgactcggtccgcactagcctgaggtaa

SEQ ID NO: 841 - DNA, 135 bp, synthetic construct
  source 1..135: mol_type = other DNA
  misc_feature 1..135: note = Synthetic
atgtcccgcaccacctcatccgagttcctgcacatgaatctaaacccgctccgggagcgccacgaacgcgatgacgtcattagcgagcacatactatctgctctacgcgatccgaatgtggtcattgtctattaa

SEQ ID NO: 842 - DNA, 111 bp, synthetic construct
  misc_feature 1..111: note = Synthetic
  source 1..111: mol_type = other DNA
gtgagcgaagtcacggtaacacttatgagtcagtgttttgccagcaagtgtaacaataatgttcccacggcccatttttcgtttgtggtaccagtgggactggccagttaa

SEQ ID NO: 843 - DNA, 42 bp, synthetic construct
  source 1..42: mol_type = other DNA
  misc_feature 1..42: note = Synthetic
atgccatataacgcaattaagcagcggttgagagcagactag

SEQ ID NO: 844 - DNA, 75 bp, synthetic construct
  misc_feature 1..75: note = Synthetic
  source 1..75: mol_type = other DNA
atgaaaaatatgctccgtgtgataacaatgttatttacgataacaacaaaaccgactcggtccgcactagcctga

SEQ ID NO: 845 - DNA, 87 bp, synthetic construct
  misc_feature 1..87: note = Synthetic
  source 1..87: mol_type = other DNA
attccaactttatatatgccgcaatatatttctctatccggagttatgacaaacaatggcgactcggtccgcactagcctgaggtaa

SEQ ID NO: 846 - DNA, 93 bp, synthetic construct
  source 1..93: mol_type = other DNA
  misc_feature 1..93: note = Synthetic
atgactctattaaacggtctaatgtcttcgcagtcgatagtcaaattccaactttatatatgccgcaatatatttctctatccggagttatga

SEQ ID NO: 847 - DNA, 156 bp, synthetic construct
  misc_feature 1..156: note = Synthetic
  source 1..156: mol_type = other DNA
atcattaattctttgatcggtggggatgactctattaaacggtctaatgtcttcgcagtcgatagtcaaattccaactttatatatgccgcaatatatttctctatccggagttatgacaaacgatggcgactcggtccgcactagcctgaggtaa

SEQ ID NO: 848 - DNA, 87 bp, synthetic construct
  misc_feature 1..87: note = Synthetic
  source 1..87: mol_type = other DNA
attccaactttatatatgccgcaatatatttctctatccggagttatgacaaacgatggcgactcggtccgcactagcctgaggtaa

SEQ ID NO: 849 - DNA, 210 bp, synthetic construct
  misc_feature 1..210: note = Synthetic
  source 1..210: mol_type = other DNA
atcaccttcctggatgtggacgagggggacatgtgtttgcatacactggagaaggtggacccgctggtggataacgaccgctatccctcccacgtggcctccttcgtgctggcttggacccgggccttcgtctcagagtggtcgggtttcctctacgacgaggaccgcggcgtcccactcgaggaccgaccccgactcggtccgcactag

SEQ ID NO: 850 - DNA, 207 bp, synthetic construct
  misc_feature 1..207: note = Synthetic
  source 1..207: mol_type = other DNA
atgtggacgagggggacatgtgtttgcatacactggagaaggtggacccgctggtggataacgaccgctatccctcccacgtggcctccttcgtgctggcttggacccgggccttcgtctcagagtggtcgggtttcctctacgacgaggaccgcggcgtcccactcgaggaccgaccccgactcggtccgcactagcctgaggtaa

SEQ ID NO: 851 - DNA, 210 bp, synthetic construct
  source 1..210: mol_type = other DNA
  misc_feature 1..210: note = Synthetic
atcaccttcctggatgtggacgagggggacatgtgtttgcataccctggaaaaagtggacccgctggtggacaacgaccgctacccgtcccacgtggcctccttcgtgctggcctggacccgggctttcgtctcggagtgggcggggttcctctacgaggaggaccgcggcacaccgctcgaggaccggccccgactcggtccgcactag

SEQ ID NO: 852 - DNA, 180 bp, synthetic construct
  source 1..180: mol_type = other DNA
  misc_feature 1..180: note = Synthetic
atgtgtctgcacacggtggaaaaggtggaccccctagtggacaacgaccgctacccctcgcacgtggcctcctttgtcttggcgtggacgcgcgcctttgtctcagagtggtccgagtttctctacgaggaggaccgcgggacgcccctgcaggacaggccacgactcggtccgcactag

SEQ ID NO: 853 - DNA, 102 bp, synthetic construct
  source 1..102: mol_type = other DNA
  misc_feature 1..102: note = Synthetic
ctgaatactattattacgactatttggatgaaaaatatgctccgtgtgataacaatgttatttacgataacaacaaaaccgactcggtccgcactagcctga

SEQ ID NO: 854 - DNA, 36 bp, synthetic construct
  misc_feature 1..36: note = Synthetic
  source 1..36: mol_type = other DNA
atgacctctctatgcacgcaatcgacatccccgtga

SEQ ID NO: 855 - DNA, 51 bp, synthetic construct
  misc_feature 1..51: note = Synthetic
  source 1..51: mol_type = other DNA
atagaggagatcaagggtttggatcaaccggacttagataatgtacaatag

SEQ ID NO: 856 - DNA, 168 bp, synthetic construct
  misc_feature 1..168: note = Synthetic
  source 1..168: mol_type = other DNA
atgtacaatagtatgttgccgatgtttatgtgtaataatatcgtagatgatatagatgatatagatgatatagatgatatagatgatatagatgatatagatgatatagatgatatagatgatatagatgatatagatgacgactcggtccgcactagcctgaggtaa

SEQ ID NO: 857 - DNA, 51 bp, synthetic construct
  misc_feature 1..51: note = Synthetic
  source 1..51: mol_type = other DNA
atagaggagatcaagggtttggatcaaccggacttagatagcctacaatag

SEQ ID NO: 858 - DNA, 147 bp, synthetic construct
  source 1..147: mol_type = other DNA
  misc_feature 1..147: note = Synthetic
atgtttatgtgtaataatatcgtagatgatatagatgatatagatgatatagatgatatagatgatatagatgatatagatgatatagatgatatagatgatatagatgatatagatgacgactcggtccgcactagcctgaggtaa

SEQ ID NO: 859 - DNA, 27 bp, synthetic construct
  source 1..27: mol_type = other DNA
  misc_feature 1..27: note = Synthetic
atgaagaaactctcaaacaacgactaa

SEQ ID NO: 860 - DNA, 42 bp, synthetic construct
  misc_feature 1..42: note = Synthetic
  source 1..42: mol_type = other DNA
atgaagttctatttaggttggaaaatcatgctgaaactctaa

SEQ ID NO: 861 - DNA, 204 bp, synthetic construct
  misc_feature 1..204: note = Synthetic
  source 1..204: mol_type = other DNA
gtggtgttcgccggcatcgcgctgctggtgctcgcctgcatctttgccttcgtggagtttagcaaggtcacgacgagcgactacacctggcgagcgctctgcattgtgtgcttcatcaccgggatggtctcgctgctgggcatcgtgctcttcgcgggatacgggcgctattgcgcggcgcccgcgcgactcggtccgcactag

SEQ ID NO: 862 - DNA, 129 bp, synthetic construct
  source 1..129: mol_type = other DNA
  misc_feature 1..129: note = Synthetic
acgaatcaaaggccgttgcatacactgatatccttaaggagttcggtgaggacatcattgatgatgaggttgttggtggactggaggcattatttgcctatcaaggatttgatccaacaaggatgttga

SEQ ID NO: 863 - DNA, 186 bp, synthetic construct
  misc_feature 1..186: note = Synthetic
  source 1..186: mol_type = other DNA
atgtcggagtggtccaggattgcagtggagtttggtgagcagcagctcaatttgactgagcttgaggacttcgcgagagagctggcctatgaaggccttgaccctgctttgatcatcaagaagctgaaggagacaggtggagatgattgggtgaaggacgactcggtccgcactagcctgaggtaa

SEQ ID NO: 864 - DNA, 210 bp, synthetic construct
  misc_feature 1..210: note = Synthetic
  source 1..210: mol_type = other DNA
aaggaaagacgcaaaggagtgatcgcctcggagtggtccaggattgcagtggagtttggtgagcagcagctcaatttgactgagcttgaggacttcgcgagagagctggcctatgaaggccttgaccctgctttgatcatcaagaagctgaaggagacaggtggagatgattgggtgaaggacgactcggtccgcactagcctgaggtaa

SEQ ID NO: 865 - DNA, 150 bp, synthetic construct
  source 1..150: mol_type = other DNA
  misc_feature 1..150: note = Synthetic
gtgagaccaagctcctgcttcctggggctcccgtcagttaactatgtggcattcaacaagatggccacttttgaagcatgcaaagtgaatggtgctgagatccctttgaagcacttgaagctatgctcgactcggtccgcactagcctga

SEQ ID NO: 866 - DNA, 198 bp, synthetic construct
  misc_feature 1..198: note = Synthetic
  source 1..198: mol_type = other DNA
atcattaaaatgtcactaaaatacctctgtgaccgtattactcctacatatgactatccagtcattggagaagtagtcgtcagttttgaggctgtgaacagtcaggtggatcttcctgtgtgcgtctatgatgacctggagtttgagcttgcaggcttcagactaagtctcgactcggtccgcactagcctgaggtaa

SEQ ID NO: 867 - DNA, 195 bp, synthetic construct
  source 1..195: mol_type = other DNA
  misc_feature 1..195: note = Synthetic
attaaagcctcactaaaatacctctgtgaccgtattactcctacatatgactatccagtcattggagaagtagtcgtcagttttgaggctgtgaacagtcaggtggatcttcctgtgtgcgtctatgatgacctggagtttgagcttgcaggcttcagactaagtctcgactcggtccgcactagcctgaggtaa

SEQ ID NO: 868 - DNA, 198 bp, synthetic construct
  misc_feature 1..198: note = Synthetic
  source 1..198: mol_type = other DNA
atgatcaacaacaacatgatgaacagccagtacatgtttgactacccggcaattaacattgatgtgaggtgtcatagactcctctccagtgtgtcttatgttgctcacaataagttccacactcatgacgtttcaacgtatgagcattgtgaaataccactagagaagttaagacttgggcgactcggtccgcactag

SEQ ID NO: 869 - DNA, 195 bp, synthetic construct
  source 1..195: mol_type = other DNA
  misc_feature 1..195: note = Synthetic
aagattattgttttattatttccaaattgttctcttaatttgctagctatctgttttaaagtgttattccattttgctctactaatgttacaatgtgcttgtctcatatttcctatttttcctattgtaacaaatgctctccctggtcctctctggatgccgattctcgactcggtccgcactagcctgaggtaa

SEQ ID NO: 870 - DNA, 189 bp, synthetic construct
  source 1..189: mol_type = other DNA
  misc_feature 1..189: note = Synthetic
atgtccttgtctaaagcctctcagcccagcgtcaagagtgcctgcgttaggcttcccatcgtggttcttgagcctaatctggccgagctcagcacctcatatgttggcctggtctcatgtaagtgctcagttcttacatgctccatgatgaggaaaatgaaggccttcacccgactcggtccgcactag

SEQ ID NO: 871 - DNA, 204 bp, synthetic construct
  misc_feature 1..204: note = Synthetic
  source 1..204: mol_type = other DNA
ttgaattatcaaaacgcctccttgtctaaagcctctcagcccagcgtcaagagtgcctgcgttaggcttcccatcgtggttcttgagcctaatctggccgagctcagcacctcatatgttggcctggtctcatgtaagtgctcagttcttacatgctccatgatgaggaaaatgaaggccttcacccgactcggtccgcactag

SEQ ID NO: 872 - DNA, 159 bp, synthetic construct
  misc_feature 1..159: note = Synthetic
  source 1..159: mol_type = other DNA
attatcaaaacgcctccttgtctaaagcctctcagcccagcgtcaagagtgcctgcgttaggcttcccatcgtggttcttgagcctaatctggccgagctcagcacctcatatgttggcctggtctcatgtaagtgctcagttcttacatgctccatga

SEQ ID NO: 873 - DNA, 186 bp, synthetic construct
  misc_feature 1..186: note = Synthetic
  source 1..186: mol_type = other DNA
atgtccagccaggaagattttgcgaggattgcggttgagtttgccaatgaggctgttgataccaaccagatccttgagcttgtgagggagtttgcttaccagggatatgacgctgctagggtcattgagctggtaaggtccaaggggggagaaaattggaaaacgactcggtccgcactagcctga

SEQ ID NO: 874 - DNA, 18 bp, synthetic construct
  misc_feature 1..18: note = Synthetic
  source 1..18: mol_type = other DNA
atgagatttttgggctag

SEQ ID NO: 875 - DNA, 27 bp, synthetic construct
  misc_feature 1..27: note = Synthetic
  source 1..27: mol_type = other DNA
atgaaatattacagaatcaacctttaa

SEQ ID NO: 876 - DNA, 66 bp, synthetic construct
  misc_feature 1..66: note = Synthetic
  source 1..66: mol_type = other DNA
atgaggttgttggtggactggaggcattatttgcctatcaaggatttgatccaacaaggatgttga

SEQ ID NO: 877 - DNA, 195 bp, synthetic construct
  misc_feature 1..195: note = Synthetic
  source 1..195: mol_type = other DNA
atggttgcatacactgatatccttaaggagttcggtgaggacatcattgatgatgaggttgttggtggactggaggcattatttgcctatcaaggatttgatccaacaaggatgttgaagaggatggctgacattgataaggatggctggaaagatgatgccaaagtcatcacgactcggtccgcactagcctga

SEQ ID NO: 878 - DNA, 195 bp, synthetic construct
  misc_feature 1..195: note = Synthetic
  source 1..195: mol_type = other DNA
atcaacaacaacatgatgaacagccagtacatgtttgactacccggcaattaacattgatgtgaggtgtcatagactcctctccagtgtgtcttatgttgctcacaataagttccacactcatgacgtttcaacgtatgagcattgtgaaataccactagagaagttaagacttgggcgactcggtccgcactag

SEQ ID NO: 879 - DNA, 36 bp, synthetic construct
  source 1..36: mol_type = other DNA
  misc_feature 1..36: note = Synthetic
atgccgcttctccatataattacattcatgatttag

SEQ ID NO: 880 - DNA, 195 bp, synthetic construct
  misc_feature 1..195: note = Synthetic
  source 1..195: mol_type = other DNA
atgtcgctgagcaaatgctccaacgttgacctcaaatctgtagcaatgaatgccaacactgtcaggcttgagccatctctaggagagtaccccactctcaggagagacctcgttgagtgctcttgtagtgtgttgactctgtcaatggtcaagaggatgggtaagatgaccacgactcggtccgcactagcctga

SEQ ID NO: 881 - DNA, 150 bp, synthetic construct
  misc_feature 1..150: note = Synthetic
  source 1..150: mol_type = other DNA
atgaatgccaacactgtcaggcttgagccatctctaggagagtaccccactctcaggagagacctcgttgagtgctcttgtagtgtgttgactctgtcaatggtcaagaggatgggtaagatgaccacgactcggtccgcactagcctga

SEQ ID NO: 882 - DNA, 198 bp, synthetic construct
  misc_feature 1..198: note = Synthetic
  source 1..198: mol_type = other DNA
atgtcttacttcactatccagaacgaggatctcccccagggcttcacttttcgtcctcatgacaagatctacgactcgctctgggagatgatggatgatggctactttcctagcacaattcctctgaagactaccatcaacggtgtggatatgccgtcagtgggttggcttgaggcgactcggtccgcactagcctga

SEQ ID NO: 883 - DNA, 69 bp, synthetic construct
  misc_feature 1..69: note = Synthetic
  source 1..69: mol_type = other DNA
acgaggatctcccccagggcttcacttttcgtcctcatgacaagatctacgactcgctctgggagatga

SEQ ID NO: 884 - DNA, 147 bp, synthetic construct
  source 1..147: mol_type = other DNA
  misc_feature 1..147: note = Synthetic
ctgatacactatgatgatgagactctacatttgccaatccctgagttctttataaagaagactgttgaaggtattctaattgatctatctcttgaccaattggactctggatcaactgttggctcgactcggtccgcactagcctga

SEQ ID NO: 885 - DNA, 42 bp, synthetic construct
  misc_feature 1..42: note = Synthetic
  source 1..42: mol_type = other DNA
atgatgagactctacatttgccaatccctgagttctttataa

SEQ ID NO: 886 - DNA, 210 bp, synthetic construct
  misc_feature 1..210: note = Synthetic
  source 1..210: mol_type = other DNA
atggattctatattatcaaaacagctggttgacaagactggttttgttagagtgccaatcaagcattttgactgtacaatgctaactctggcacttccaacatttgatgtttccaagatggtagatagaattaccatagacttcaatctggatgatatacaaggagcatctgaaataggctccgactcggtccgcactagcctgaggtaa

SEQ ID NO: 887 - DNA, 159 bp, synthetic construct
  misc_feature 1..159: note = Synthetic
  source 1..159: mol_type = other DNA
gtgccaatcaagcattttgactgtacaatgctaactctggcacttccaacatttgatgtttccaagatggtagatagaattaccatagacttcaatctggatgatatacaaggagcatctgaaataggctccgactcggtccgcactagcctgaggtaa

SEQ ID NO: 888 - DNA, 204 bp, synthetic construct
  source 1..204: mol_type = other DNA
  misc_feature 1..204: note = Synthetic
atggacgagatactcatcaatcaacccgaactgaagccaggattcaacaggagagctcttgataactaccatgataccctcatgtctatagagcttcctgaattctcgctggaaaaagagcagaattctctgagaatcgagatatctttagattctttagatcccagctcaaccattggttcgactcggtccgcactagcctga

SEQ ID NO: 889 - DNA, 21 bp, synthetic construct
  misc_feature 1..21: note = Synthetic
  source 1..21: mol_type = other DNA
atgataccctcatgtctatag

SEQ ID NO: 890 - DNA, 195 bp, synthetic construct
  source 1..195: mol_type = other DNA
  misc_feature 1..195: note = Synthetic
atactcatcaatcaacccgaactgaagccaggattcaacaggagagctcttgataactaccatgataccctcatgtctatagagcttcctgaattctcgctggaaaaagagcagaattctctgagaatcgagatatctttagattctttagatcccagctcaaccattggttcgactcggtccgcactagcctga

SEQ ID NO: 891 - DNA, 183 bp, synthetic construct
  source 1..183: mol_type = other DNA
  misc_feature 1..183: note = Synthetic
atccagaacgaggatctcccccagggcttcacttttcgtcctcatgacaagatctacgactcgctctgggagatgatggatgatggctactttcctagcacaattcctctgaagactaccatcaacggtgtggatatgccgtcagtgggttggcttgaggcgactcggtccgcactagcctga

SEQ ID NO: 892 - DNA, 189 bp, synthetic construct
  source 1..189: mol_type = other DNA
  misc_feature 1..189: note = Synthetic
atggctatgccggagaattgggtgcgctttgcgattgaaatctcggatgctcagtgggaggaggaagagatccgagagttcatcaatctcttccagtatcaaggctttgatgcagccgtggtgctgagcaggatttttgagttggccaaaaaggctgatctctccccgactcggtccgcactagcctga

SEQ ID NO: 893 - DNA, 81 bp, synthetic construct
  misc_feature 1..81: note = Synthetic
  source 1..81: mol_type = other DNA
atgctcagtgggaggaggaagagatccgagagttcatcaatctcttccagtatcaaggctttgatgcagccgtggtgctga

SEQ ID NO: 894 - DNA, 183 bp, synthetic construct
  misc_feature 1..183: note = Synthetic
  source 1..183: mol_type = other DNA
atgccggagaattgggtgcgctttgcgattgaaatctcggatgctcagtgggaggaggaagagatccgagagttcatcaatctcttccagtatcaaggctttgatgcagccgtggtgctgagcaggatttttgagttggccaaaaaggctgatctctccccgactcggtccgcactagcctga

SEQ ID NO: 895 - DNA, 162 bp, synthetic construct
  misc_feature 1..162: note = Synthetic
  source 1..162: mol_type = other DNA
atgcaatccagagctgtcatcttgaagtatagatctggttcaggccacaagaggtctttgcccaggttctacatagactgtgatttggacacctttgattttgagaaggattgctctctgattgagaatgagttccccatttaccgactcggtccgcactag

SEQ ID NO: 896 - DNA, 45 bp, synthetic construct
  misc_feature 1..45: note = Synthetic
  source 1..45: mol_type = other DNA
atgagttccccatttaccgactcggtccgcactagcctgaggtaa

SEQ ID NO: 897 - DNA, 111 bp, synthetic construct
  source 1..111: mol_type = other DNA
  misc_feature 1..111: note = Synthetic
aggtctttgcccaggttctacatagactgtgatttggacacctttgattttgagaaggattgctctctgattgagaatgagttccccatttaccgactcggtccgcactag

SEQ ID NO: 898 - DNA, 207 bp, synthetic construct
  source 1..207: mol_type = other DNA
  misc_feature 1..207: note = Synthetic
atgcttttagcgatttgctcgaggaccatccgacaacagggtcttaactgccctccagctgtgacctttacctccagccatatgagaccgccaattccatcatttctgctctggactgaggggtctgatgttctgatggattttgatttggacaccatcccagctggatcagttactggatcatcgactcggtccgcactagcctga

SEQ ID NO: 899 - DNA, 195 bp, synthetic construct
  source 1..195: mol_type = other DNA
  misc_feature 1..195: note = Synthetic
atttgctcgaggaccatccgacaacagggtcttaactgccctccagctgtgacctttacctccagccatatgagaccgccaattccatcatttctgctctggactgaggggtctgatgttctgatggattttgatttggacaccatcccagctggatcagttactggatcatcgactcggtccgcactagcctga

SEQ ID NO: 900 - DNA, 210 bp, synthetic construct
  source 1..210: mol_type = other DNA
  misc_feature 1..210: note = Synthetic
acgccagctatcaagatgatgttctctcgtgttatgcaattggcactgatatgtgctgtgacttgtgaagacaacccttgtctctgggagaggtttaccaattcaagagacattgagttcatgattcctgttgtcaatctatccacctctagaaggttgtctatgtctcaaagaatatgcatggttagtatgcgactcggtccgcactag

SEQ ID NO: 901 - DNA, 192 bp, synthetic construct
  source 1..192: mol_type = other DNA
  misc_feature 1..192: note = Synthetic
atgttctctcgtgttatgcaattggcactgatatgtgctgtgacttgtgaagacaacccttgtctctgggagaggtttaccaattcaagagacattgagttcatgattcctgttgtcaatctatccacctctagaaggttgtctatgtctcaaagaatatgcatggttagtatgcgactcggtccgcactag

SEQ ID NO: 902 - DNA, 210 bp, synthetic construct
  source 1..210: mol_type = other DNA
  misc_feature 1..210: note = Synthetic
acggcatattatctgaacatttatattttgttaactgagagtaagtgtacaaacatgaagattttacacttattgactaatataatgtatgccctaggggcttacattataactggatggagcatggaagggaccaccagagtgtgtctctccaatgagtctccattagaaggaatagtctattattgggaacgactcggtccgcactag

SEQ ID NO: 903 - DNA, 210 bp, synthetic construct
  misc_feature 1..210: note = Synthetic
  source 1..210: mol_type = other DNA
acggcgcatattttaatgaaaaactacaatatcttatttttattgagtatagtggctgctagactggtcttgcactactctacaccacatctcaacaacaagatctgctttagctcaggaactccggagctacacatcaccaactactggatggaagccatggagaaatttcctgttgacaataagaagtgtcgactcggtccgcactag

SEQ ID NO: 904 - DNA, 162 bp, synthetic construct
  source 1..162: mol_type = other DNA
  misc_feature 1..162: note = Synthetic
atagtggctgctagactggtcttgcactactctacaccacatctcaacaacaagatctgctttagctcaggaactccggagctacacatcaccaactactggatggaagccatggagaaatttcctgttgacaataagaagtgtcgactcggtccgcactag

SEQ ID NO: 905 - DNA, 156 bp, synthetic construct
  source 1..156: mol_type = other DNA
  misc_feature 1..156: note = Synthetic
acgcctttcttcaatcacctgatggatgtgacccgtcgcttactagactccagcaacgcaacctggcagagagaccagcctgacacgcaccgattgtcaaggctggatgctcatgtcatgtcaatgttaggggttggtcgactcggtccgcactag

SEQ ID NO: 906 - DNA, 210 bp, synthetic construct
  misc_feature 1..210: note = Synthetic
  source 1..210: mol_type = other DNA
ctggtgcatcaaatgtttgaaataacaatcttgttgatagtccttgccaccttgtttatactggtggttgggaatcttaaacttgagtccaaaatggggaacagccttacatcaacttgcttctcccagaacactgggccagggataattgagagatactgggggtttgagatggccaaaatgccaggctttcgactcggtccgcactag

SEQ ID NO: 907 - DNA, 210 bp, synthetic construct
  misc_feature 1..210: note = Synthetic
  source 1..210: mol_type = other DNA
ctggtgcatcaagcctttgaaataacaatcttgttgatagtccttgccaccttgtttatactggtggttgggaatcttaaacttgagtccaaaatggggaacagccttacatcaacttgcttctcccagaacactgggccagggataattgagagatactgggggtttgagatggccaaaatgccaggctttcgactcggtccgcactag

SEQ ID NO: 908 - DNA, 12 bp, synthetic construct
  source 1..12: mol_type = other DNA
  misc_feature 1..12: note = Synthetic
ctggtgcattaa

SEQ ID NO: 909 - DNA, 198 bp, synthetic construct
  misc_feature 1..198: note = Synthetic
  source 1..198: mol_type = other DNA
atgagtgaaatatttttaatagtcttggtggtagcatcagctttgctgcttgctcttgctgacgtccgactggactccatatcatcagggaaggaggagtcaatctgtttctcacaaaacacaaaggttctctggattgagagctactggggctacgaaatggccaagatgccaggatttcgactcggtccgcactag

SEQ ID NO: 910 - DNA, 60 bp, synthetic construct
  misc_feature 1..60: note = Synthetic
  source 1..60: mol_type = other DNA
atcatcagggaaggaggagtcaatctgtttctcacaaaacacaaaggttctctggattga

SEQ ID NO: 911 - DNA, 189 bp, synthetic construct
  misc_feature 1..189: note = Synthetic
  source 1..189: mol_type = other DNA
atatttttaatagtcttggtggtagcatcagctttgctgcttgctcttgctgacgtccgactggactccatatcatcagggaaggaggagtcaatctgtttctcacaaaacacaaaggttctctggattgagagctactggggctacgaaatggccaagatgccaggatttcgactcggtccgcactag

SEQ ID NO: 912 - DNA, 204 bp, synthetic construct
  misc_feature 1..204: note = Synthetic
  source 1..204: mol_type = other DNA
atgaatgaactactagctaaacaagccaacctacgtccagggtttacaagtggagctctgatacactatgatgatgagactctacatttgccaatccctgagttctttataaagaagactgttgaaggtattctaattgatctatctcttgaccaattggactctggatcaactgttggctcgactcggtccgcactagcctga

SEQ ID NO: 913 - DNA, 189 bp, synthetic construct
  source 1..189: mol_type = other DNA
  misc_feature 1..189: note = Synthetic
atgaatagtcaatacttgtttgactatcctgtggtaaagttagactctagggtccatagggctttgtctactgtcaactacatggctttcaacaagtttcattactgtgacatttcaacatatgagcactgtgaattcccactggagaagtactctagaggcgactcggtccgcactagcctgaggtaa

SEQ ID NO: 914 - DNA, 120 bp, synthetic construct
  source 1..120: mol_type = other DNA
  misc_feature 1..120: note = Synthetic
atggctaacgcactaggagtattagaggggaagatgttctgttctattgggggcagatcattagaagaggatgatgaaggggtccttgctgtcgactcggtccgcactagcctgaggtaa

SEQ ID NO: 915 - DNA, 12 bp, synthetic construct
  misc_feature 1..12: note = Synthetic
  source 1..12: mol_type = other DNA
acggtgcattaa

SEQ ID NO: 916 - DNA, 198 bp, synthetic construct
  misc_feature 1..198: note = Synthetic
  source 1..198: mol_type = other DNA
atgtatgttttattaacaattctaatctcggttctggtgtgtgaagcggttattagagtgtctctaagctccacaagagaagagacctgctttggtgactccactaacccagagatgattgaaggagcttgggattcactcagagaggaggagatgccggaggagctctcctgttctatacgactcggtccgcactag

SEQ ID NO: 917 - DNA, 84 bp, synthetic construct
  source 1..84: mol_type = other DNA
  misc_feature 1..84: note = Synthetic
atgattgaaggagcttgggattcactcagagaggaggagatgccggaggagctctcctgttctatacgactcggtccgcactag

SEQ ID NO: 918 - DNA, 84 bp, synthetic construct
  source 1..84: mol_type = other DNA
  misc_feature 1..84: note = Synthetic
ctggtgagcctggggtatatgaccagatttttgaaaggcctggcctcccaaaccttgaagtcacagtggactccactggggtag

SEQ ID NO: 919 - DNA, 96 bp, synthetic construct
  misc_feature 1..96: note = Synthetic
  source 1..96: mol_type = other DNA
ttgctgctcaagcagtggaccgcaatgagattgaacagtgggtccgagagtttgcttatcaagggtttgatgcccgtagagttatcgaactcttaa

SEQ ID NO: 920 - DNA, 45 bp, synthetic construct
  source 1..45: mol_type = other DNA
  misc_feature 1..45: note = Synthetic
ctggaatcgaccgtgcacaagtggaaccgactcggtccgcactag

SEQ ID NO: 921 - DNA, 57 bp, synthetic construct
  misc_feature 1..57: note = Synthetic
  source 1..57: mol_type = other DNA
atgaagatttcacaaaatttcgaaacgagcgactcggtccgcactagcctgaggtaa

SEQ ID NO: 922 - DNA, 51 bp, synthetic construct
  misc_feature 1..51: note = Synthetic
  source 1..51: mol_type = other DNA
atgtggaaagaacaaatattttttatcatgcaattagtgaccgtttgctaa

SEQ ID NO: 923 - DNA, 183 bp, synthetic construct
  source 1..183: mol_type = other DNA
  misc_feature 1..183: note = Synthetic
atcggtgctgagacaatggaggcagccttgcttgtgtgtcagtacaccatccagagccttatccaactcacgcgtgatgatcctggttttttcaatgttgagattctggaattcccattttacccagcgtgcaatgtttgcacggcagatgtcaacgactcggtccgcactagcctgaggtaa

SEQ ID NO: 924 - DNA, 24 bp, synthetic construct
  misc_feature 1..24: note = Synthetic
  source 1..24: mol_type = other DNA
gtgctgcctagaaatcggtgctga

SEQ ID NO: 925 - DNA, 93 bp, synthetic construct
  misc_feature 1..93: note = Synthetic
  source 1..93: mol_type = other DNA
aggatgctgcctagaaatcggtgccgagacaatggaggcagccttgcttgtgtgtcagtacaccatccagagcctgatccatctcacgggtga

SEQ ID NO: 926 - DNA, 93 bp, synthetic construct
  source 1..93: mol_type = other DNA
  misc_feature 1..93: note = Synthetic
aggatgctgcctagaaatcggtgccgagacagccgaggcagccttgcttgtgtgtcagtacaccatccagagcctgatccatctcacgggtga

SEQ ID NO: 927 - DNA, 21 bp, synthetic construct
  misc_feature 1..21: note = Synthetic
  source 1..21: mol_type = other DNA
atgcgaacccgtacccagtaa

SEQ ID NO: 928 - DNA, 186 bp, synthetic construct
  misc_feature 1..186: note = Synthetic
  source 1..186: mol_type = other DNA
atacctttaactatatcgatgtggaaattaatctgtatccagttaacgaccactaccggtctcagcgaatccatctcaacgtcggaactaactattactatgaatcataaagactgtaatcccgtatttcgtgaggaatacttctccgtccttaataacgactcggtccgcactagcctgaggtaa

SEQ ID NO: 929 - DNA, 69 bp, synthetic construct
  source 1..69: mol_type = other DNA
  misc_feature 1..69: note = Synthetic
atgggctgtctcttggagaaccaggcctgtacgaccaaatctacgataggccagggcttccagacctag

SEQ ID NO: 930 - DNA, 210 bp, synthetic construct
  source 1..210: mol_type = other DNA
  misc_feature 1..210: note = Synthetic
atgatgaaagtcatctggttctcctctctgatctgcttagtcattcaatgcagtggggattcgggcccaatcatctgcgcaggacccatccactcaaacaagagtgctggcataccccacctgcttggttactctgagaagatttgtcagatagatcggctgatacatgtttcgtcatggctcgactcggtccgcactagcctgaggtaa

SEQ ID NO: 931 - DNA, 207 bp, synthetic construct
  misc_feature 1..207: note = Synthetic
  source 1..207: mol_type = other DNA
atgaaagtcatctggttctcctctctgatctgcttagtcattcaatgcagtggggattcgggcccaatcatctgcgcaggacccatccactcaaacaagagtgctggcataccccacctgcttggttactctgagaagatttgtcagatagatcggctgatacatgtttcgtcatggctcgactcggtccgcactagcctgaggtaa

SEQ ID NO: 932 - DNA, 15 bp, synthetic construct
  source 1..15: mol_type = other DNA
  misc_feature 1..15: note = Synthetic
acggctatacattaa

SEQ ID NO: 933 - DNA, 168 bp, synthetic construct
  misc_feature 1..168: note = Synthetic
  source 1..168: mol_type = other DNA
atgattgtcccgattgtcctgtttctcacgctctgtccgtccgaactcagtgcctggggctccccaggagaccctattgtttgtggtgtgaggactgaaacaaacaaatccattcagattgagtggaaggagggaagatcagagaagctacgactcggtccgcactag

SEQ ID NO: 934 - DNA, 165 bp, synthetic construct
  source 1..165: mol_type = other DNA
  misc_feature 1..165: note = Synthetic
attgtcccgattgtcctgtttctcacgctctgtccgtccgaactcagtgcctggggctccccaggagaccctattgtttgtggtgtgaggactgaaacaaacaaatccattcagattgagtggaaggagggaagatcagagaagctacgactcggtccgcactag

SEQ ID NO: 935 - DNA, 183 bp, synthetic construct
  source 1..183: mol_type = other DNA
  misc_feature 1..183: note = Synthetic
aagaaaagaatcatcatgtgccgccgggagtcgctccgaactctgccgtggctgttctgggtgctgttgagctgcccgcgactcctcgaatattcttcctcttcgttccccttcgccaccgctgacatcgccgaaaagatgtgggccgagaactacgactcggtccgcactagcctgaggtaa

SEQ ID NO: 936 - DNA, 126 bp, synthetic construct
  misc_feature 1..126: note = Synthetic
  source 1..126: mol_type = other DNA
atgcccaacttgatgacaccaccctccctgccttcactatcctggagacagaatcttcactctctctcgagattgatgaggttcctgatagcatcagccaggtgggtacgactcggtccgcactag

SEQ ID NO: 937 - DNA, 180 bp, synthetic construct
  source 1..180: mol_type = other DNA
  misc_feature 1..180: note = Synthetic
atggcagaagaacaagcataccatgtcaacaaggggctggaatgtatcaagtccctcaaagcctctcccccggatctatccaccatcagagacaccattgagagctggagagaggggctcagcccctcgggccgtgcaacaccgaaccctgatacgtccgagcgactcggtccgcactag

SEQ ID NO: 938 - DNA, 180 bp, synthetic construct
  misc_feature 1..180: note = Synthetic
  source 1..180: mol_type = other DNA
atggcagaagaacaagcataccgcctcaacaaggggctggaatgtatcaagtccctcaaagcctctcccccggatctatccaccatcagagacaccattgagagctggagagaggggctcagcccctcgggccgtgcaacaccgaaccctgatacgtccgagcgactcggtccgcactag

SEQ ID NO: 939 - DNA, 216 bp, synthetic construct
  misc_feature 1..216: note = Synthetic
  source 1..216: mol_type = other DNA
ctgcaaacaagcaccaaaacagaggtcaaaagacaaagagcaccagatatgaccatcacaaccacaatcatagccatattactaatacccccatcattttgtcaaatagacataacaaaactgcaacgtgtaggtgtgttagtcaacaatcctaaaggcatgaagatttcacaaaatttcgaaacgagcgactcggtccgcactagcctgaggtaa

SEQ ID NO: 940 - DNA, 156 bp, synthetic construct
  misc_feature 1..156: note = Synthetic
  source 1..156: mol_type = other DNA
atctgtatccagttaacgaccactaccggtctcagcgaatccatctcaacgtcggaactaactattactatgaatcataaagactgtaatcccgtatttcgtgaggaatacttctccgtccttaataacgactcggtccgcactagcctgaggtaa

SEQ ID NO: 941 - DNA, 174 bp, synthetic construct
  source 1..174: mol_type = other DNA
  misc_feature 1..174: note = Synthetic
atcatcgcctgccgccgggagtcgctccgaactctgccgtggctgttctgggtgctgttgagctgcccgcgactcctcgaatattcttcctcttcgttccccttcgccaccgctgacatcgccgaaaagatgtgggccgagaactacgactcggtccgcactagcctgaggtaa

SEQ ID NO: 942 - DNA, 210 bp, synthetic construct
  source 1..210: mol_type = other DNA
  misc_feature 1..210: note = Synthetic
acgctgatgcccagcgcctgtttcttaatcaccataacctgcacatcgctggcaaacgtatacggcggaatatctgccgaatgccgtgtggacgtaagcgtgaacgtcaggatcacgtttccccgacccgctggcatgtcaacaatacgggagaacacctgtaccgcctcgttcgccgcgccatcatcgactcggtccgcactagcctga

SEQ ID NO: 943 - DNA, 207 bp, synthetic construct
  source 1..207: mol_type = other DNA
  misc_feature 1..207: note = Synthetic
ctggcccccagcgcctgtttcttaatcaccataacctgcacatcgctggcaaacgtatacggcggaatatctgccgaatgccgtgtggacgtaagcgtgaacgtcaggatcacgtttccccgacccgctggcatgtcaacaatacgggagaacacctgtaccgcctcgttcgccgcgccatcatcgactcggtccgcactagcctga

SEQ ID NO: 944 - DNA, 189 bp, synthetic construct
  source 1..189: mol_type = other DNA
  misc_feature 1..189: note = Synthetic
atgactgactggtctgcaatagctgttgagattggcaacgagccactggatgttccagctttggtcgagtttgcaaaggagatagcttatgagggcctggatcctgctgtgatctttgggctgcttcgtgagagggggggtgagaactggaggaatgatgtgaagtacatccgactcggtccgcactag

SEQ ID NO: 945 - DNA, 210 bp, synthetic construct
  source 1..210: mol_type = other DNA
  misc_feature 1..210: note = Synthetic
atggacgacagtagatctatacagttcagactgtctggtgaggtttcccctggatccctgatcattggaggatactggaggatgtcagttgctaacatccgaatacgggacgtccacacattgtatcctccagtgccccgtgagcttgctgatcttttccaagggactgcagcaatacagaccgactcggtccgcactagcctgaggtaa

SEQ ID NO: 946 - DNA, 15 bp, synthetic construct
  source 1..15: mol_type = other DNA
  misc_feature 1..15: note = Synthetic
attcccgtgtattaa

SEQ ID NO: 947 - DNA, 180 bp, synthetic construct
  source 1..180: mol_type = other DNA
  misc_feature 1..180: note = Synthetic
atgtcagacgagaattatcgcgatattgctcttgcttttcttgatgagtctgcagattctgggaccatcaatgcatgggtgaatgagtttgcttaccaagggtttgatccaaagcgcattgttcagttggtcaaggagagaggaacggcaaagggcagggaccgactcggtccgcactag

SEQ ID NO: 948 - DNA, 42 bp, synthetic construct
  source 1..42: mol_type = other DNA
  misc_feature 1..42: note = Synthetic
atggagaattctttccacagatttcgactcggtccgcactag

SEQ ID NO: 949 - DNA, 120 bp, synthetic construct
  source 1..120: mol_type = other DNA
  misc_feature 1..120: note = Synthetic
aggtcttctttcagctgctctaattttttgaagtcctcaatgtacttctgctcaaagttagcaggagatgatctaacaaaacactccagcagtattagaacattgcccgtcagtttgtaa

SEQ ID NO: 950 - DNA, 42 bp, synthetic construct
  misc_feature 1..42: note = Synthetic
  source 1..42: mol_type = other DNA
atggagaattctttccacaggcctcgactcggtccgcactag

SEQ ID NO: 951 - DNA, 96 bp, synthetic construct
  misc_feature 1..96: note = Synthetic
  source 1..96: mol_type = other DNA
atcattagcatgacccgccgcttcctaccggagactataacgagaactccgcaaaccgatgcattctccgaactttcgcttcaggatccagattag

SEQ ID NO: 952 - DNA, 18 bp, synthetic construct
  misc_feature 1..18: note = Synthetic
  source 1..18: mol_type = other DNA
atggaattccatacttaa

SEQ ID NO: 953 - DNA, 90 bp, synthetic construct
  source 1..90: mol_type = other DNA
  misc_feature 1..90: note = Synthetic
atgagctcgccttctaacaggtctcggtgggctgtcatgtgcgtcaccgagcgggcatggacttgtcagcaaggcaggaaaggaatttag

SEQ ID NO: 954 - DNA, 51 bp, synthetic construct
  misc_feature 1..51: note = Synthetic
  source 1..51: mol_type = other DNA
gtggcaggcacctggagcatattcgactcggtccgcactagcctgaggtaa

SEQ ID NO: 955 - DNA, 216 bp, synthetic construct
  misc_feature 1..216: note = Synthetic
  source 1..216: mol_type = other DNA
atgcgtccccaggtaatgaataattgcctctttgcccgtcatacacttgctcctttcagtccgaacttagctttgatttctgcgatcttcgccagagcctgtgcacgatttagaggtctaccgcccatgacaggaagttgttttactggttcagggatcgcctcaccacggttaattctcgcagtcatcgactcggtccgcactagcctgaggtaa

SEQ ID NO: 956 - DNA, 219 bp, synthetic construct
  misc_feature 1..219: note = Synthetic
  source 1..219: mol_type = other DNA
attatgcgtccccaggtaatgaataattgcctctttgcccgtcatacacttgctcctttcagtccgaacttagctttgatttctgcgatcttcgccagagcctgtgcacgatttagaggtctaccgcccatgacaggaagttgttttactggttcaggggccgcctcaccacggttaattctcgcagtcatcgactcggtccgcactagcctgaggtaa

SEQ ID NO: 957 - DNA, 195 bp, synthetic construct
  source 1..195: mol_type = other DNA
  misc_feature 1..195: note = Synthetic
ctgaatatgataggaatgagtggtggtaatcaaggggctcgggctgggagagatggagtggtgagagtttgggatgtgaaaaatgcagagttgctcaataatcagttcgggaccatgccaagtctgacactggcatgtctgacaaaacaggggcaggttgacttgaatgatgcgactcggtccgcactagcctga

SEQ ID NO: 958 - DNA, 195 bp, synthetic construct
  source 1..195: mol_type = other DNA
  misc_feature 1..195: note = Synthetic
ctgaatatgataggaatgagtggtggtaatcaaggggctcgggctgggagagatggagtggtgagagtttgggatgtgaaaaatgcagagttgctcaataatcagttcgggaccatgccaagtctgacactggcatgtctgacaaaacaggggcaggttgacttgaatggcccgactcggtccgcactagcctga

SEQ ID NO: 959 - DNA, 87 bp, synthetic construct
  source 1..87: mol_type = other DNA
  misc_feature 1..87: note = Synthetic
ttggatcctccgtgttatacgcggcgcgacccaaagtctaacttcaggactcttaattgctccaagaaggtccaggccttgtcatga

SEQ ID NO: 960 - DNA, 33 bp, synthetic construct
  misc_feature 1..33: note = Synthetic
  source 1..33: mol_type = other DNA
atgacaatcgcgactcggtccgcactagcctga

SEQ ID NO: 961 - DNA, 51 bp, synthetic construct
  misc_feature 1..51: note = Synthetic
  source 1..51: mol_type = other DNA
atgccagagtctgtagtgtcagatgatgaccgtactcaaacatcgggttga

SEQ ID NO: 962 - DNA, 87 bp, synthetic construct
  source 1..87: mol_type = other DNA
  misc_feature 1..87: note = Synthetic
atgagtatcaatgagttagagtctgagcaaaaagattgggcgttatcaatgttgtgcagatccgcgactcggtccgcactagcctga

SEQ ID NO: 963 - DNA, 168 bp, synthetic construct
  source 1..168: mol_type = other DNA
  misc_feature 1..168: note = Synthetic
atgcagaactcgcgcgcgcacatgatcgccgactgcggcaaggccgtgggcgcgggctatgcagacccggaccccggcgtgcgcgacaacgcgtccgcgaacctgcccgccgtgccgcccttcctggtggcggcgctcgcggctgcgactcggtccgcactagcctga

SEQ ID NO: 964 - DNA, 168 bp, synthetic construct
  misc_feature 1..168: note = Synthetic
  source 1..168: mol_type = other DNA
atggcctacaggagaaggaggtggaggaaaccgaggagatcgagatggaggacctatagaagaaatagatactggagaagacctcatcggcgccactggaggaggaggagatatatcagaccaagaactgctacagtaagcgactcggtccgcactagcctgaggtaa

SEQ ID NO: 965 - DNA, 195 bp, synthetic construct
  source 1..195: mol_type = other DNA
  misc_feature 1..195: note = Synthetic
atagatatagacatcgttaaattgttaatgaaaggaatagataacactgcttattcatatatagacgatctaacatgttgcactcgagtaattatggctgattatctaaatagtgattatagatacaataaagatgtagatttagatttggtcaaattgtttttggacgactcggtccgcactagcctgaggtaa

SEQ ID NO: 966 - DNA, 216 bp, synthetic construct
  source 1..216: mol_type = other DNA
  misc_feature 1..216: note = Synthetic
atgcgtccccaggtaatgaataattgcctctttgcccgtcatacacttgctcctttcagtccgaacttagctttgatttctgcgatcttcgccagagcctgtgcacgatttagaggtctaccgcccatgacaggaagttgttttactggttcgccgatcgcctcaccacggttaattctcgcagtcatcgactcggtccgcactagcctgaggtaa

SEQ ID NO: 967 - DNA, 216 bp, synthetic construct
  source 1..216: mol_type = other DNA
  misc_feature 1..216: note = Synthetic
atgcgtccccaggtaatgaataattgcctctttgcccgtcatacacttgctcctttcagtccgaacttagctttgatttctgcgatcttcgccagagcctgtgcgccatttagaggtctaccgcccatgacaggaagttgttttactggttcagggatcgcctcaccacggttaattctcgcagtcatcgactcggtccgcactagcctgaggtaa

SEQ ID NO: 968 - DNA, 168 bp, synthetic construct
  misc_feature 1..168: note = Synthetic
  source 1..168: mol_type = other DNA
atggggaaggtcctaagaaagccgtttgcaaaggctgtgccactgctcttcctcgccgccacctggcttctgaccggggtgctgccggccggcgcttccagtcccacaaacgcggcggcggcttccctgactgaagcccacgactcggtccgcactagcctgaggtaa

SEQ ID NO: 969 - DNA, 162 bp, synthetic construct
  misc_feature 1..162: note = Synthetic
  source 1..162: mol_type = other DNA
aaggtcctaagaaagccgtttgcaaaggctgtgccactgctcttcctcgccgccacctggcttctgaccggggtgctgccggccggcgcttccagtcccacaaacgcggcggcggcttccctgactgaagcccacgactcggtccgcactagcctgaggtaa

SEQ ID NO: 970 - DNA, 114 bp, synthetic construct
  source 1..114: mol_type = other DNA
  misc_feature 1..114: note = Synthetic
atgctaatgagtaatccagccggtcggatatcaagagacacatatacattagagccgaagataaggcatatgtatactaacggtgggttcgatgctatgactgagaaaagatga

SEQ ID NO: 971 - DNA, 147 bp, synthetic construct
  misc_feature 1..147: note = Synthetic
  source 1..147: mol_type = other DNA
atcgacccaactcgcggaggcccgagaaacactgtgaggcaacccacgccgtcacagtcgccaactgtcccctcggagacaagagtatgcaggcttataccggcctgtttccaaacccccgactcggtccgcactagcctgaggtaa

SEQ ID NO: 972 - DNA, 171 bp, synthetic construct
  source 1..171: mol_type = other DNA
  misc_feature 1..171: note = Synthetic
atcgccgattttttcaatccatttatcgacccaactcgcggaggcccgagaaacactgtgaggcaacccacgccgtcacagtcgccaactgtcccctcggagacaagagtatgcaggcttataccggcctgtttccaaacccccgactcggtccgcactagcctgaggtaa

SEQ ID NO: 973 - DNA, 27 bp, synthetic construct
  misc_feature 1..27: note = Synthetic
  source 1..27: mol_type = other DNA
atgttgcactcgagtaattatggctga

SEQ ID NO: 974 - DNA, 111 bp, synthetic construct
  source 1..111: mol_type = other DNA
  misc_feature 1..111: note = Synthetic
atgcacacacacaccgccgctttcgggaaatctgtacccgtactgcctccggcagaccccgcaaatccccccgggcctacatcccaagaaacacgcgttactctgacgtag

SEQ ID NO: 975 - DNA, 168 bp, synthetic construct
  source 1..168: mol_type = other DNA
  misc_feature 1..168: note = Synthetic
atggagaagttggtcagtgactttacaacgtttataaacgctaactggacaaagcctttgaataataggtcatgtatacctagaagaactagaaaagttgtaagagatttgttacgcgaatacataaagcaagcgccgcccgactcggtccgcactagcctgaggtaa

SEQ ID NO: 976 - DNA, 159 bp, synthetic construct
  misc_feature 1..159: note = Synthetic
  source 1..159: mol_type = other DNA
ttggtcagtgactttacaacgtttataaacgctaactggacaaagcctttgaataataggtcatgtatacctagaagaactagaaaagttgtaagagatttgttacgcgaatacataaagcaagcgccgcccgactcggtccgcactagcctgaggtaa

SEQ ID NO: 977 - DNA, 213 bp, synthetic construct
  source 1..213: mol_type = other DNA
  misc_feature 1..213: note = Synthetic
atgacgcttgtttcttttattttgcagactaattcaaaactaacaatgttggagcgcagcgcggtaacctattgtatttgcatcccaacggttttgaatgtttctttggaaaatttttcttttattcaatttttacaagaaactctgcctgattatatttccagcaactttgatgatattactggcgactcggtccgcactagcctgaggtaa

SEQ ID NO: 978 - DNA, 15 bp, synthetic construct
  source 1..15: mol_type = other DNA
  misc_feature 1..15: note = Synthetic
atggagaagatttga

SEQ ID NO: 979 - DNA, 123 bp, synthetic construct
  misc_feature 1..123: note = Synthetic
  source 1..123: mol_type = other DNA
atggtttacaaggagcatttgtcgataaagacggtacttatgacaaagtttacattcttttcactgttactatcggctcaaagagaattgttaaaattcccgactcggtccgcactagcctga

SEQ ID NO: 980 - DNA, 48 bp, synthetic construct
  source 1..48: mol_type = other DNA
  misc_feature 1..48: note = Synthetic
atgaaggttatccaaggaatcgactcggtccgcactagcctgaggtaa

SEQ ID NO: 981 - DNA, 60 bp, synthetic construct
  source 1..60: mol_type = other DNA
  misc_feature 1..60: note = Synthetic
attaaaatagctatgaaggttatccaaggaatcgactcggtccgcactagcctgaggtaa

SEQ ID NO: 982 - DNA, 72 bp, synthetic construct
  source 1..72: mol_type = other DNA
  misc_feature 1..72: note = Synthetic
atgcttacatctgaggatagccagtgtgacttggattggaaatgtggagaaaaaatcgggacccatttctag

SEQ ID NO: 983 - DNA, 72 bp, synthetic construct
  misc_feature 1..72: note = Synthetic
  source 1..72: mol_type = other DNA
atgtggagaaaaaatcgggacccatttctaggttgttcacaatccaagtacagacattgcccttctaattaa

SEQ ID NO: 984 - DNA, 39 bp, synthetic construct
  misc_feature 1..39: note = Synthetic
  source 1..39: mol_type = other DNA
atgtacgtgtatgctgttatcgattgtcccgtaaactaa

SEQ ID NO: 985 - DNA, 213 bp, synthetic construct
  source 1..213: mol_type = other DNA
  misc_feature 1..213: note = Synthetic
atgacgcttgtttcttttattttgcagactaattcaaaactaacagccttggagcgcagcgcggtaacctattgtatttgcatcccaacggttttgaatgtttctttggaaaatttttcttttattcaatttttacaagaaactctgcctgattatatttccagcaactttgatgatattactggcgactcggtccgcactagcctgaggtaa

SEQ ID NO: 986 - DNA, 189 bp, synthetic construct
  misc_feature 1..189: note = Synthetic
  source 1..189: mol_type = other DNA
atgtacatcctcacgacaatcttgtttacacatgtaagagtacagccagcaatttcttccatgcatcattggcgtactggaggagcagacacagaaacagcaaccgaaaatacttggcaagagactcttcaactggatcaagcacaaacaacagtgatggtcatattgagacgactcggtccgcactag

SEQ ID NO: 987 - DNA, 189 bp, synthetic construct
  source 1..189: mol_type = other DNA
  misc_feature 1..189: note = Synthetic
atgtacatcctcacgacaatcttgtttacacatgtaagagtacagccagcaatttcttccatgcatcattggcgtactggaggagcagacacagaaacagcaaccgaaaatacttggcaagagactcttcaactggatcaagcacaaacaacagtgatggtcgccttgagacgactcggtccgcactag

SEQ ID NO: 988 - DNA, 93 bp, synthetic construct
  misc_feature 1..93: note = Synthetic
  source 1..93: mol_type = other DNA
atcattggcgtactggaggagcagacacagaaacagcaaccgaaaatacttggcaagagactcttcaactggatcaagcacaaacaacagtga

SEQ ID NO: 989 - DNA, 54 bp, synthetic construct
  source 1..54: mol_type = other DNA
  misc_feature 1..54: note = Synthetic
atgtcccaatcggcgcctaggaccccggactatcaacccgactttgagctgtag

SEQ ID NO: 990 - DNA, 204 bp, synthetic construct
  misc_feature 1..204: note = Synthetic
  source 1..204: mol_type = other DNA
atcacgcttacccctgttcaggataacactgaaaacatgggtctacgctacagcaaagaggtgagagagagacacggagacaaagatctggaagggagagtccccatgacactcaatctcccacagggtttatatggacgcttcaactgtaagtcttgctggtttgcaaacagaggcgactcggtccgcactagcctgaggtaa

SEQ ID NO: 991 - DNA, 225 bp, synthetic construct
  misc_feature 1..225: note = Synthetic
  source 1..225: mol_type = other DNA
gtggatcctaggcttttttggatcacgcttacccctgttcaggataacactgaaaacgccggtctacgctacagcaaagaggtgagagagagacacggagacaaagatctggaagggagagtccccatgacactcaatctcccacagggtttatatggacgcttcaactgtaagtcttgctggtttgcaaacagaggcgactcggtccgcactagcctgaggtaa

SEQ ID NO: 992 - DNA, 45 bp, synthetic construct
  misc_feature 1..45: note = Synthetic
  source 1..45: mol_type = other DNA
aggataacactgaaaacgccggtctacgctacagcaaagaggtga

SEQ ID NO: 993 - DNA, 57 bp, synthetic construct
  misc_feature 1..57: note = Synthetic
  source 1..57: mol_type = other DNA
atgaggatgataatgataatattgtcttctcacccgactcggtccgcactagcctga

SEQ ID NO: 994 - DNA, 168 bp, synthetic construct
  source 1..168: mol_type = other DNA
  misc_feature 1..168: note = Synthetic
atgattgtgttattgatactatcgttagcgtgtacagcgttcacctatcgcctgcaaggatttaccaatgccggtatagtagcgtataaaaatattcaagatgggaatgaggatgataatattgtcttctcgccgtttggcgactcggtccgcactagcctgaggtaa

SEQ ID NO: 995 - DNA, 162 bp, synthetic construct
  misc_feature 1..162: note = Synthetic
  source 1..162: mol_type = other DNA
gtgttattgatactatcgttagcgtgtacagcgttcacctatcgcctgcaaggatttaccaatgccggtatagtagcgtataaaaatattcaagatgggaatgaggatgataatattgtcttctcgccgtttggcgactcggtccgcactagcctgaggtaa

SEQ ID NO: 996 - DNA, 123 bp, synthetic construct
  source 1..123: mol_type = other DNA
  misc_feature 1..123: note = Synthetic
atggaccaagacgacggctatttcatgcatcgccgtctgttgccgctgttcatcgtgcccgacgcctaccgcgaacacccgctaggctttgtgcgcgcccaactgcgactcggtccgcactag

SEQ ID NO: 997 - DNA, 120 bp, synthetic construct
  misc_feature 1..120: note = Synthetic
  source 1..120: mol_type = other DNA
atggacgctctgtacgtctgccctacatgtataaaatggaccaagacgacggctatttcatgcatcgccgtctgttgccgctgttcatcgtgcccgacgcctaccgcgaacacccgctag

SEQ ID NO: 998 - DNA, 216 bp, synthetic construct
  source 1..216: mol_type = other DNA
  misc_feature 1..216: note = Synthetic
acgctgctggaccccatctcgcatcccgagagcagcctagacacaggcatcaaccaccatggacgctctgtacgtctgccctacatgtataaaatggaccaagacgacggctatttcatgcatcgccgtctgttgccgctgttcatcgtgcccgacgcctaccgcgaacacccgctaggctttgtgcgcgcccaactgcgactcggtccgcactag

SEQ ID NO: 999 - DNA, 216 bp, synthetic construct
  misc_feature 1..216: note = Synthetic
  source 1..216: mol_type = other DNA
acgctgctggaccccatctcgcatcccgagagcagcctagacacaggcatctaccaacatggacgctctgtacgtctgccctacatgtataaaatggaccaagacgacggctatttcatgcatcgccgtctgttgccgctgttcatcgtgcccgacgcctaccgcgaacacccgctaggctttgtgcgcgcccaactgcgactcggtccgcactag

SEQ ID NO: 1000 - DNA, 216 bp, synthetic construct
  source 1..216: mol_type = other DNA
  misc_feature 1..216: note = Synthetic
acgctgctggaccccatctcgcatcccgagagcagcctagacacaggcatctaccaccaaggacgctctgtacgtctgccctacatgtataaaatggaccaagacgacggctatttcatgcatcgccgtctgttgccgctgttcatcgtgcccgacgcctaccgcgaacacccgctaggctttgtgcgcgcccaactgcgactcggtccgcactag

SEQ ID NO: 1001 - DNA, 111 bp, synthetic construct
  source 1..111: mol_type = other DNA
  misc_feature 1..111: note = Synthetic
ctgtacgtctgccctacatgtataaaatggaccaagacgacggctatttcatgcatcgccgtctgttgccgctgttcatcgtgcccgacgcctaccgcgaacacccgctag

SEQ ID NO: 1002 - DNA, 216 bp, synthetic construct
  source 1..216: mol_type = other DNA
  misc_feature 1..216: note = Synthetic
acgctgctggaccccatctcgcatcccgagagcagcctagacacaggcatctaccaccatcgacgctctgtacgtctgccctacatgtataaaatggaccaagacgacggctatttcatgcatcgccgtctgttgccgctgttcatcgtgcccgacgcctaccgcgaacacccgctaggctttgtgcgcgcccaactgcgactcggtccgcactag

SEQ ID NO: 1003 - DNA, 120 bp, synthetic construct
  misc_feature 1..120: note = Synthetic
  source 1..120: mol_type = other DNA
atcgacgctctgtacgtctgccctacatgtataaaatggaccaagacgacggctatttcatgcatcgccgtctgttgccgctgttcatcgtgcccgacgcctaccgcgaacacccgctag

SEQ ID NO: 1004 - DNA, 216 bp, synthetic construct
  source 1..216: mol_type = other DNA
  misc_feature 1..216: note = Synthetic
acgctgctggaccccatctcgcatcccgagagcagcctagacacaggcatctaccaccatgaacgctctgtacgtctgccctacatgtataaaatggaccaagacgacggctatttcatgcatcgccgtctgttgccgctgttcatcgtgcccgacgcctaccgcgaacacccgctaggctttgtgcgcgcccaactgcgactcggtccgcactag

SEQ ID NO: 1005 - DNA, 120 bp, synthetic construct
  misc_feature 1..120: note = Synthetic
  source 1..120: mol_type = other DNA
atgaacgctctgtacgtctgccctacatgtataaaatggaccaagacgacggctatttcatgcatcgccgtctgttgccgctgttcatcgtgcccgacgcctaccgcgaacacccgctag

SEQ ID NO: 1006 - DNA, 216 bp, synthetic construct
  source 1..216: mol_type = other DNA
  misc_feature 1..216: note = Synthetic
acgctgctggaccccatctcgcatcccgagagcagcctagacacaggcatctaccaccatggaagctctgtacgtctgccctacatgtataaaatggaccaagacgacggctatttcatgcatcgccgtctgttgccgctgttcatcgtgcccgacgcctaccgcgaacacccgctaggctttgtgcgcgcccaactgcgactcggtccgcactag

SEQ ID NO: 1007 - DNA, 120 bp, synthetic construct
  source 1..120: mol_type = other DNA
  misc_feature 1..120: note = Synthetic
atggaagctctgtacgtctgccctacatgtataaaatggaccaagacgacggctatttcatgcatcgccgtctgttgccgctgttcatcgtgcccgacgcctaccgcgaacacccgctag

SEQ ID NO: 1008 - DNA, 216 bp, synthetic construct
  misc_feature 1..216: note = Synthetic
  source 1..216: mol_type = other DNA
acgctgctggaccccatctcgcatcccgagagcagcctagacacaggcatctaccaccatggacgccctgtacgtctgccctacatgtataaaatggaccaagacgacggctatttcatgcatcgccgtctgttgccgctgttcatcgtgcccgacgcctaccgcgaacacccgctaggctttgtgcgcgcccaactgcgactcggtccgcactag

SEQ ID NO: 1009 - DNA, 120 bp, synthetic construct
  misc_feature 1..120: note = Synthetic
  source 1..120: mol_type = other DNA
atggacgccctgtacgtctgccctacatgtataaaatggaccaagacgacggctatttcatgcatcgccgtctgttgccgctgttcatcgtgcccgacgcctaccgcgaacacccgctag

SEQ ID NO: 1010 - DNA, 177 bp, synthetic construct
  source 1..177: mol_type = other DNA
  misc_feature 1..177: note = Synthetic
ctggctgcgagaggctacccgaccgtagcggttagcttttcttacgaattgctgggatcgttgcggttgtcgcctttggtggtccgcaaccgcagccagaccgcagtggtggccacggtggtgtctcagacgtcgtgcgtcaaacatgacgtgctgaaccgactcggtccgcactag

SEQ ID NO: 1011 - DNA, 54 bp, synthetic construct
  source 1..54: mol_type = other DNA
  misc_feature 1..54: note = Synthetic
atgcccgcgaatctcaagaatgtaattatgcaccactgttcattgccagcttag

SEQ ID NO: 1012 - DNA, 54 bp, synthetic construct
  misc_feature 1..54: note = Synthetic
  source 1..54: mol_type = other DNA
atggctatcaagatcatgtcaaacttacccgcgactcggtccgcactagcctga

SEQ ID NO: 1013 - DNA, 30 bp, synthetic construct
  source 1..30: mol_type = other DNA
  misc_feature 1..30: note = Synthetic
atggaatacagaacctactcactgctttaa

SEQ ID NO: 1014 - DNA, 30 bp, synthetic construct
  source 1..30: mol_type = other DNA
  misc_feature 1..30: note = Synthetic
atggaacttttggcgccgggactttcatag

SEQ ID NO: 1015 - DNA, 120 bp, synthetic construct
  source 1..120: mol_type = other DNA
  misc_feature 1..120: note = Synthetic
atggtcaacaaaacggccggtaacactaacacattcatccactttgtcgaagatagtgagctggtggagaatcccgcatactttaggcgcagcgatcaccgacgactcggtccgcactag

SEQ ID NO: 1016 - DNA, 216 bp, synthetic construct
  source 1..216: mol_type = other DNA
  misc_feature 1..216: note = Synthetic
acgctgctggaccccatctcgcatcccgagagcagcctagacacaggcatctaccaccatggacgctccgtacgtctgccctacatgtataaaatggaccaagacgacggctatttcatgcatcgccgtctgttgccgctgttcatcgtgcccgacgcctaccgcgaacacccgctaggctttgtgcgcgcccaactgcgactcggtccgcactag

SEQ ID NO: 1017 - DNA, 120 bp, synthetic construct
  source 1..120: mol_type = other DNA
  misc_feature 1..120: note = Synthetic
atggacgctccgtacgtctgccctacatgtataaaatggaccaagacgacggctatttcatgcatcgccgtctgttgccgctgttcatcgtgcccgacgcctaccgcgaacacccgctag

SEQ ID NO: 1018 - DNA, 216 bp, synthetic construct
  source 1..216: mol_type = other DNA
  misc_feature 1..216: note = Synthetic
acgctgctggaccccatctcgcatcccgagagcagcctagacacaggcatctaccaccatggacgctctctacgtctgccctacatgtataaaatggaccaagacgacggctatttcatgcatcgccgtctgttgccgctgttcatcgtgcccgacgcctaccgcgaacacccgctaggctttgtgcgcgcccaactgcgactcggtccgcactag

SEQ ID NO: 1019 - DNA, 120 bp, synthetic construct
  source 1..120: mol_type = other DNA
  misc_feature 1..120: note = Synthetic
atggacgctctctacgtctgccctacatgtataaaatggaccaagacgacggctatttcatgcatcgccgtctgttgccgctgttcatcgtgcccgacgcctaccgcgaacacccgctag

SEQ ID NO: 1020 - DNA, 216 bp, synthetic construct
  source 1..216: mol_type = other DNA
  misc_feature 1..216: note = Synthetic
acgctgctggaccccatctcgcatcccgagagcagcctagacacaggcatctaccaccatggacgctctgtacgtctgccctacatgtataaaatggaccaagacgacggctatttcatgcatcgccgtctgttgccgctgttcatcgtgcccgacgcctaccgcgaacacccgctaggctttgtgcgcgcccaactgcgactcggtccgcactag

SEQ ID NO: 1021 - DNA, 216 bp, synthetic construct
  source 1..216: mol_type = other DNA
  misc_feature 1..216: note = Synthetic
acgctgctggaccccatctcgcatcccgagagcagcctagacacaggcatctaccaccatggacgctttgtacgtctgccctacatgtataaaatggaccaagacgacggctatttcatgcatcgccgtctgttgccgctgttcatcgtgcccgacgcctaccgcgaacacccgctaggctttgtgcgcgcccaactgcgactcggtccgcactag

SEQ ID NO: 1022 - DNA, 120 bp, synthetic construct
  source 1..120: mol_type = other DNA
  misc_feature 1..120: note = Synthetic
atggacgctttgtacgtctgccctacatgtataaaatggaccaagacgacggctatttcatgcatcgccgtctgttgccgctgttcatcgtgcccgacgcctaccgcgaacacccgctag

SEQ ID NO: 1023 - DNA, 120 bp, synthetic construct
  misc_feature 1..120: note = Synthetic
  source 1..120: mol_type = other DNA
atgtcgtcctcctcgctctcgctctcatcgctctctccgtccgagtgctgcacggtgcgcgcgagcagcttgtcgttgaccgtgcgcaggatcgagagctggcctttggtgagctcgtag

SEQ ID NO: 1024 - DNA, 33 bp, synthetic construct
  misc_feature 1..33: note = Synthetic
  source 1..33: mol_type = other DNA
atgccctgctctttcactacgaacacgggctag

SEQ ID NO: 1025 - DNA, 111 bp, synthetic construct
  source 1..111: mol_type = other DNA
  misc_feature 1..111: note = Synthetic
acgacctggacactgtggactcgcggagaagcagcattgtggacctgtcaacccacttctcggtgcagctacacctacaggcaacaaccgactcggtccgcactagcctga

SEQ ID NO: 1026 - DNA, 36 bp, synthetic construct
  source 1..36: mol_type = other DNA
  misc_feature 1..36: note = Synthetic
ttggcggtcgtcataacactaactctcgcaccttaa

SEQ ID NO: 1027 - DNA, 168 bp, synthetic construct
  misc_feature 1..168: note = Synthetic
  source 1..168: mol_type = other DNA
atgctgatctacggacctcgtctagaagtcaacgacctcatcgacaggatgatggacgacgttcaagtaaacggagacctaatgccctcacccgatcctatccccgaagaggtggcgcagtgctccccggaagacatgtccgactcggtccgcactagcctgaggtaa

SEQ ID NO: 1028 - DNA, 162 bp, synthetic construct
  misc_feature 1..162: note = Synthetic
  source 1..162: mol_type = other DNA
atctacggacctcgtctagaagtcaacgacctcatcgacaggatgatggacgacgttcaagtaaacggagacctaatgccctcacccgatcctatccccgaagaggtggcgcagtgctccccggaagacatgtccgactcggtccgcactagcctgaggtaa

SEQ ID NO: 1029 - DNA, 213 bp, synthetic construct
  source 1..213: mol_type = other DNA
  misc_feature 1..213: note = Synthetic
ctgacaggagagccgggaacctacgtgaacggcagcgttacttgctggggctctaaaggaacttttggcgccgggactttcatagtacgatccatggtcaacaaaacggccggtaacactaacacattcatccactttgtcgaagatagtgagctggtggagaatcccgcatactttaggcgcagcgatcaccgacgactcggtccgcactag

SEQ ID NO: 1030 - DNA, 30 bp, synthetic construct
  source 1..30: mol_type = other DNA
  misc_feature 1..30: note = Synthetic
aaggaacttttggcgccgggactttcatag

SEQ ID NO: 1031 - DNA, 78 bp, synthetic construct
  misc_feature 1..78: note = Synthetic
  source 1..78: mol_type = other DNA
atagtgagctggtggagaatcccgcatactttaggcgcagcgatcaccgacgactcggtccgcactagcctgaggtaa

SEQ ID NO: 1032 - DNA, 213 bp, synthetic construct
  source 1..213: mol_type = other DNA
  misc_feature 1..213: note = Synthetic
ctgacaggagagccgggaacctacgtgaacggcagcgttacttgctggggctctaatagaacttttggcgccgggactttcatagtacgatccatggtcaacaaaacggccggtaacactaacacattcatccactttgtcgaagatagtgagctggtggagaatcccgcatactttaggcgcagcgatcaccgacgactcggtccgcactag

SEQ ID NO: 1033 - DNA, 213 bp, synthetic construct
  misc_feature 1..213: note = Synthetic
  source 1..213: mol_type = other DNA
ctgacaggagagccgggaacctacgtgaacggcagcgttacttgctggggctctaatgcaacttttggcgccgggactttcatagtacgatccatggtcaacaaaacggccggtaacactaacacattcatccactttgtcgaagatagtgagctggtggagaatcccgcatactttaggcgcagcgatcaccgacgactcggtccgcactag

SEQ ID NO: 1034 - DNA, 30 bp, synthetic construct
  misc_feature 1..30: note = Synthetic
  source 1..30: mol_type = other DNA
atgcaacttttggcgccgggactttcatag

SEQ ID NO: 1035 - DNA, 213 bp, synthetic construct
  misc_feature 1..213: note = Synthetic
  source 1..213: mol_type = other DNA
ctgacaggagagccgggaacctacgtgaacggcagcgttacttgctggggctctaatggaacctttggcgccgggactttcatagtacgatccatggtcaacaaaacggccggtaacactaacacattcatccactttgtcgaagatagtgagctggtggagaatcccgcatactttaggcgcagcgatcaccgacgactcggtccgcactag

SEQ ID NO: 1036 - DNA, 213 bp, synthetic construct
  misc_feature 1..213: note = Synthetic
  source 1..213: mol_type = other DNA
ctgacaggagagccgggaacctacgtgaacggcagcgttacttgctggggctctaatggaactgttggcgccgggactttcatagtacgatccatggtcaacaaaacggccggtaacactaacacattcatccactttgtcgaagatagtgagctggtggagaatcccgcatactttaggcgcagcgatcaccgacgactcggtccgcactag

SEQ ID NO: 1037 - DNA, 30 bp, synthetic construct
  source 1..30: mol_type = other DNA
  misc_feature 1..30: note = Synthetic
atggaactgttggcgccgggactttcatag

SEQ ID NO: 1038 - DNA, 213 bp, synthetic construct
  source 1..213: mol_type = other DNA
  misc_feature 1..213: note = Synthetic
ctgacaggagagccgggaacctacgtgaacggcagcgttacttgctggggctctaatggaacttatggcgccgggactttcatagtacgatccatggtcaacaaaacggccggtaacactaacacattcatccactttgtcgaagatagtgagctggtggagaatcccgcatactttaggcgcagcgatcaccgacgactcggtccgcactag

SEQ ID NO: 1039 - DNA, 48 bp, synthetic construct
  misc_feature 1..48: note = Synthetic
  source 1..48: mol_type = other DNA
ttgcagatgacctccctccaaccatcgactcggtccgcactagcctga

SEQ ID NO: 1040 - DNA, 207 bp, synthetic construct
  misc_feature 1..207: note = Synthetic
  source 1..207: mol_type = other DNA
atgtatgagatattattatctgttaaaatgaaatttaatatcttaggagcaaagattctccttcttggatctgggtttgggataaccaaaatgtcccgacttggacctgcgttggatgagtttcgctcctttaagaataatccccctaggagaggtgcactcacaacagcaatccaagggatcaagaagcgactcggtccgcactag

SEQ ID NO: 1041 - DNA, 153 bp, synthetic construct
  source 1..153: mol_type = other DNA
  misc_feature 1..153: note = Synthetic
atcctattatcagggacaagagcaggattagggatatccgagatggccacacttttgaggagcttagcattgttcaaaagaaacaaggacaaaccacccattacatcaggatccggtggagccatcagaggaatccgactcggtccgcactag

SEQ ID NO: 1042 - DNA, 18 bp, synthetic construct
  misc_feature 1..18: note = Synthetic
  source 1..18: mol_type = other DNA
atggactggcaaacttag

SEQ ID NO: 1043 - DNA, 153 bp, synthetic construct
  source 1..153: mol_type = other DNA
  misc_feature 1..153: note = Synthetic
atcctactgtcggggggaggaggaggagcaagatctttgactatggcgactcttcttaaaagcttagcattgttcaagaggaacaaagacaaagcgccgacggcatcaggttcaggaggggccatccgggggattcgactcggtccgcactag

SEQ ID NO: 1044 - DNA, 15 bp, synthetic construct
  source 1..15: mol_type = other DNA
  misc_feature 1..15: note = Synthetic
ctggagcaggcttaa

SEQ ID NO: 1045 - DNA, 117 bp, synthetic construct
  source 1..117: mol_type = other DNA
  misc_feature 1..117: note = Synthetic
atttcaaaaatgttgagcctatttgatacatttaatgcacgtaggcaagaaaacataacaaaatcagctggtggagctatcattcctggacagaaaaatcgactcggtccgcactag

SEQ ID NO: 1046 - DNA, 117 bp, synthetic construct
  source 1..117: mol_type = other DNA
  misc_feature 1..117: note = Synthetic
ttgctgccaaagtacacgatggctgggttgttgagcaccttcgacacgtttagctctaggaggagtgagagtattaataagtcaggaggaggtgctgttcgactcggtccgcactag

SEQ ID NO: 1047 - DNA, 108 bp, synthetic construct
  misc_feature 1..108: note = Synthetic
  source 1..108: mol_type = other DNA
atgttgagtctattcgacacattcagtgcgcgtaggcaggagaacataacgaaatcagctggtggggctgttattcccgggcaaaaaaaccgactcggtccgcactag

SEQ ID NO: 1048 - DNA, 117 bp, synthetic construct
  misc_feature 1..117: note = Synthetic
  source 1..117: mol_type = other DNA
atttcaaaaatgttgagcctatttgatacatttaatgcacgtaggcaagaaaacataacaaaatcagccggtggagctatcattcctggacagaaaaatcgactcggtccgcactag

SEQ ID NO: 1049 - DNA, 105 bp, synthetic construct
  misc_feature 1..105: note = Synthetic
  source 1..105: mol_type = other DNA
ctgagttcatttgatacattcagtgcacggagacaggagaatataacgaaatcagctggaggagcgataatccctgggcagaagagccgactcggtccgcactag

SEQ ID NO: 1050 - DNA, 108 bp, synthetic construct
  misc_feature 1..108: note = Synthetic
  source 1..108: mol_type = other DNA
atttttataatggccgggctactaagtacttttgacacatttagttccaggagaagtgagagcatcaataagtctggcggaggagcaattcgactcggtccgcactag

SEQ ID NO: 1051 - DNA, 39 bp, synthetic construct
  misc_feature 1..39: note = Synthetic
  source 1..39: mol_type = other DNA
atgcttggggaatttacgagaacgcttataaaatcgtga

SEQ ID NO: 1052 - DNA, 51 bp, synthetic construct
  misc_feature 1..51: note = Synthetic
  source 1..51: mol_type = other DNA
ctgagtctagtagcttccctgctgtgccaagatgtcgtcggtgttcactga

SEQ ID NO: 1053 - DNA, 24 bp, synthetic construct
  source 1..24: mol_type = other DNA
  misc_feature 1..24: note = Synthetic
atgcaagaccaacgggaactttaa

SEQ ID NO: 1054 - DNA, 27 bp, synthetic construct
  source 1..27: mol_type = other DNA
  misc_feature 1..27: note = Synthetic
ctggaggttttgaataggtcgctatag

SEQ ID NO: 1055 - DNA, 78 bp, synthetic construct
  misc_feature 1..78: note = Synthetic
  source 1..78: mol_type = other DNA
atgtcatctgtattcaatgagtatcaggcgcttcaagaacaacttgtaaagccggctgtccgactcggtccgcactag

SEQ ID NO: 1056 - DNA, 132 bp, synthetic construct
  source 1..132: mol_type = other DNA
  misc_feature 1..132: note = Synthetic
atcgaggaagtaattctcccgacttatctcgcaagtatgtcatctgtgttcacagattacgacaaactccaggagtacttggtgacgccatgtaaaaaacgtgttgatggggcgcgactcggtccgcactag

SEQ ID NO: 1057 - DNA, 33 bp, synthetic construct
  misc_feature 1..33: note = Synthetic
  source 1..33: mol_type = other DNA
atggatacgttaaaatatataacgtatttttaa

SEQ ID NO: 1058 - DNA, 213 bp, synthetic construct
  misc_feature 1..213: note = Synthetic
  source 1..213: mol_type = other DNA
ctgacaggagagccgggaacctacgtgaacggcagcgttacttgctggggctctaatggaactttgggcgccgggactttcatagtacgatccatggtcaacaaaacggccggtaacactaacacattcatccactttgtcgaagatagtgagctggtggagaatcccgcatactttaggcgcagcgatcaccgacgactcggtccgcactag

SEQ ID NO: 1059 - DNA, 213 bp, synthetic construct
  source 1..213: mol_type = other DNA
  misc_feature 1..213: note = Synthetic
ctgacaggagagccgggaacctacgtgaacggcagcgttacttgctggggctctaatggaacttttcgcgccgggactttcatagtacgatccatggtcaacaaaacggccggtaacactaacacattcatccactttgtcgaagatagtgagctggtggagaatcccgcatactttaggcgcagcgatcaccgacgactcggtccgcactag

SEQ ID NO: 1060 - DNA, 30 bp, synthetic construct
  source 1..30: mol_type = other DNA
  misc_feature 1..30: note = Synthetic
atggaacttttcgcgccgggactttcatag

SEQ ID NO: 1061 - DNA, 213 bp, synthetic construct
  source 1..213: mol_type = other DNA
  misc_feature 1..213: note = Synthetic
ctgacaggagagccgggaacctacgtgaacggcagcgttacttgctggggctctaatggaacttttggcgccgggactttcatagtacgatccatggtcaacaaaacggccggtaacactaacacattcatccactttgtcgaagatagtgagctggtggagaatcccgcatactttaggcgcagcgatcaccgacgactcggtccgcactag

SEQ ID NO: 1062 - DNA, 213 bp, synthetic construct
  source 1..213: mol_type = other DNA
  misc_feature 1..213: note = Synthetic
ctgacaggagagccgggaacctacgtgaacggcagcgttacttgctggggctctaatggaatttttggcgccgggactttcatagtacgatccatggtcaacaaaacggccggtaacactaacacattcatccactttgtcgaagatagtgagctggtggagaatcccgcatactttaggcgcagcgatcaccgacgactcggtccgcactag

SEQ ID NO: 1063 - DNA, 30 bp, synthetic construct
  source 1..30: mol_type = other DNA
  misc_feature 1..30: note = Synthetic
atggaatttttggcgccgggactttcatag

SEQ ID NO: 1064 - DNA, 216 bp, synthetic construct
  source 1..216: mol_type = other DNA
  misc_feature 1..216: note = Synthetic
acgctgctggaccccatctcgcatcccgagagcagcctagacacaggcatctaccaccatggacgttctgtacgtctgccctacatgtataaaatggaccaagacgacggctatttcatgcatcgccgtctgttgccgctgttcatcgtgcccgacgcctaccgcgaacacccgctaggctttgtgcgcgcccaactgcgactcggtccgcactag

SEQ ID NO: 1065 - DNA, 120 bp, synthetic construct
  misc_feature 1..120: note = Synthetic
  source 1..120: mol_type = other DNA
atggacgttctgtacgtctgccctacatgtataaaatggaccaagacgacggctatttcatgcatcgccgtctgttgccgctgttcatcgtgcccgacgcctaccgcgaacacccgctag

SEQ ID NO: 1066 - DNA, 216 bp, synthetic construct
  source 1..216: mol_type = other DNA
  misc_feature 1..216: note = Synthetic
acgctgctggaccccatctcgcatcccgagagcagcctagacacaggcatctaccaccatggactctctgtacgtctgccctacatgtataaaatggaccaagacgacggctatttcatgcatcgccgtctgttgccgctgttcatcgtgcccgacgcctaccgcgaacacccgctaggctttgtgcgcgcccaactgcgactcggtccgcactag

SEQ ID NO: 1067 - DNA, 120 bp, synthetic construct
  source 1..120: mol_type = other DNA
  misc_feature 1..120: note = Synthetic
atggactctctgtacgtctgccctacatgtataaaatggaccaagacgacggctatttcatgcatcgccgtctgttgccgctgttcatcgtgcccgacgcctaccgcgaacacccgctag

SEQ ID NO: 1068 - DNA, 216 bp, synthetic construct
  misc_feature 1..216: note = Synthetic
  source 1..216: mol_type = other DNA
acgctgctggaccccatctcgcatcccgagagcagcctagacacaggcatctaccaccatgggcgctctgtacgtctgccctacatgtataaaatggaccaagacgacggctatttcatgcatcgccgtctgttgccgctgttcatcgtgcccgacgcctaccgcgaacacccgctaggctttgtgcgcgcccaactgcgactcggtccgcactag

SEQ ID NO: 1069 - DNA, 120 bp, synthetic construct
  source 1..120: mol_type = other DNA
  misc_feature 1..120: note = Synthetic
atgggcgctctgtacgtctgccctacatgtataaaatggaccaagacgacggctatttcatgcatcgccgtctgttgccgctgttcatcgtgcccgacgcctaccgcgaacacccgctag

SEQ ID NO: 1070 - DNA, 216 bp, synthetic construct
  misc_feature 1..216: note = Synthetic
  source 1..216: mol_type = other DNA
acgctgctggaccccatctcgcatcccgagagcagcctagacacaggcatctaccaccgccgacgctctgtacgtctgccctacatgtataaaatggaccaagacgacggctatttcatgcatcgccgtctgttgccgctgttcatcgtgcccgacgcctaccgcgaacacccgctaggctttgtgcgcgcccaactgcgactcggtccgcactag

SEQ ID NO: 1071 - DNA, 90 bp, synthetic construct
  misc_feature 1..90: note = Synthetic
  source 1..90: mol_type = other DNA
ataaaatggaccaagacgacggctatttcatgcatcgccgtctgttgccgctgttcatcgtgcccgacgcctaccgcgaacacccgctag

SEQ ID NO: 1072 - DNA, 216 bp, synthetic construct
  source 1..216: mol_type = other DNA
  misc_feature 1..216: note = Synthetic
acgctgctggaccccatctcgcatcccgagagcagcctagacacaggcatctaccaccgtggacgctctgtacgtctgccctacatgtataaaatggaccaagacgacggctatttcatgcatcgccgtctgttgccgctgttcatcgtgcccgacgcctaccgcgaacacccgctaggctttgtgcgcgcccaactgcgactcggtccgcactag

SEQ ID NO: 1073 - DNA, 120 bp, synthetic construct
  source 1..120: mol_type = other DNA
  misc_feature 1..120: note = Synthetic
gtggacgctctgtacgtctgccctacatgtataaaatggaccaagacgacggctatttcatgcatcgccgtctgttgccgctgttcatcgtgcccgacgcctaccgcgaacacccgctag

SEQ ID NO: 1074 - DNA, 216 bp, synthetic construct
  misc_feature 1..216: note = Synthetic
  source 1..216: mol_type = other DNA
acgctgctggaccccatctcgcatcccgagagcagcctagacacaggcatctaccacgatggacgctctgtacgtctgccctacatgtataaaatggaccaagacgacggctatttcatgcatcgccgtctgttgccgctgttcatcgtgcccgacgcctaccgcgaacacccgctaggctttgtgcgcgcccaactgcgactcggtccgcactag

SEQ ID NO: 1075 - DNA, 213 bp, synthetic construct
  source 1..213: mol_type = other DNA
  misc_feature 1..213: note = Synthetic
ctgacaggagagccgggaacctacgtgaacggcagcgttacttgctggcgctctaatggaacttttggcgccgggactttcatagtacgatccatggtcaacaaaacggccggtaacactaacacattcatccactttgtcgaagatagtgagctggtggagaatcccgcatactttaggcgcagcgatcaccgacgactcggtccgcactag

SEQ ID NO: 1076 - DNA, 21 bp, synthetic construct
  misc_feature 1..21: note = Synthetic
  source 1..21: mol_type = other DNA
ttggcgccgggactttcatag

SEQ ID NO: 1077 - DNA, 213 bp, synthetic construct
  misc_feature 1..213: note = Synthetic
  source 1..213: mol_type = other DNA
ctgacaggagagccgggaacctacgtgaacggcagcgttacttgctgggcctctaatggaacttttggcgccgggactttcatagtacgatccatggtcaacaaaacggccggtaacactaacacattcatccactttgtcgaagatagtgagctggtggagaatcccgcatactttaggcgcagcgatcaccgacgactcggtccgcactag

SEQ ID NO: 1078 - DNA, 213 bp, synthetic construct
  misc_feature 1..213: note = Synthetic
  source 1..213: mol_type = other DNA
ctgacaggagagccgggaacctacgtgaacggcagcgttacttgctggggccctaatggaacttttggcgccgggactttcatagtacgatccatggtcaacaaaacggccggtaacactaacacattcatccactttgtcgaagatagtgagctggtggagaatcccgcatactttaggcgcagcgatcaccgacgactcggtccgcactag

SEQ ID NO: 1079 - DNA, 213 bp, synthetic construct
  misc_feature 1..213: note = Synthetic
  source 1..213: mol_type = other DNA
ctgacaggagagccgggaacctacgtgaacggcagcgttacttgctggggctccaatggaacttttggcgccgggactttcatagtacgatccatggtcaacaaaacggccggtaacactaacacattcatccactttgtcgaagatagtgagctggtggagaatcccgcatactttaggcgcagcgatcaccgacgactcggtccgcactag

SEQ ID NO: 1080 - DNA, 21 bp, synthetic construct
  misc_feature 1..21: note = Synthetic
  source 1..21: mol_type = other DNA
atgaagatgggatgttggtag

SEQ ID NO: 1081 - DNA, 120 bp, synthetic construct
  source 1..120: mol_type = other DNA
  misc_feature 1..120: note = Synthetic
gtggtgttttgcgatttcgaggccgggctcgatcctcacctttcattgtcgataggggacattttgacactacctggaaaatgtcgtctgtgctcaaagcatttgagcgattcacaatag

SEQ ID NO: 1082 - DNA, 78 bp, synthetic construct
  misc_feature 1..78: note = Synthetic
  source 1..78: mol_type = other DNA
atgtcgtctgtgctcaaagcatttgagcgattcacaatagaacaggaacttcaagcgactcggtccgcactagcctga

SEQ ID NO: 1083 - DNA, 24 bp, synthetic construct
  misc_feature 1..24: note = Synthetic
  source 1..24: mol_type = other DNA
atggatactgatctggaaaattaa

SEQ ID NO: 1084 - DNA, 78 bp, synthetic construct
  source 1..78: mol_type = other DNA
  misc_feature 1..78: note = Synthetic
atgtcctcggtcctcaccgcctttgagcgcttcactatcgagcaggagctccaggcgactcggtccgcactagcctga

SEQ ID NO: 1085 - DNA, 102 bp, synthetic construct
  misc_feature 1..102: note = Synthetic
  source 1..102: mol_type = other DNA
attaaggatatttctagtctaaagttcaaaatgtcaagtgttttaaagacatttgaaagatttactatacaacacgactcggtccgcactagcctgaggtaa

SEQ ID NO: 1086 - DNA, 195 bp, synthetic construct
  source 1..195: mol_type = other DNA
  misc_feature 1..195: note = Synthetic
atggtgctgcgccggctgtcacgccaggcctccgttaaggttcgtaggtcatggactgaaagtaaaaaaacagctcaacgcctttttgtgtttgttttagagcttttgctgcaattttgtgaaggggaagatactgttgacgggaaacgcaaaaaaccagaaaggttcgactcggtccgcactagcctgaggtaa

SEQ ID NO: 1087 - DNA, 27 bp, synthetic construct
  source 1..27: mol_type = other DNA
  misc_feature 1..27: note = Synthetic
atgaagaaataccgactagaacattag

SEQ ID NO: 1088 - DNA, 168 bp, synthetic construct
  source 1..168: mol_type = other DNA
  misc_feature 1..168: note = Synthetic
atgcgctggaagagaatggagaggagacccccactcactcctcttcggagatcaaggacacaatcgtcaggtggaggcttgacgatttgcccccggtgtgccctgaaactccctaaggctacccggatttcagagagacccgactcggtccgcactagcctgaggtaa

SEQ ID NO: 1089 - DNA, 153 bp, synthetic construct
  misc_feature 1..153: note = Synthetic
  source 1..153: mol_type = other DNA
atggagaggagacccccactcactcctcttcggagatcaaggacacaatcgtcaggtggaggcttgacgatttgcccccggtgtgccctgaaactccctaaggctacccggatttcagagagacccgactcggtccgcactagcctgaggtaa

SEQ ID NO: 1090 - DNA, 225 bp, synthetic construct
  misc_feature 1..225: note = Synthetic
  source 1..225: mol_type = other DNA
ttggggtccttcacgtggtttccacacaagacatcagttccagagggtgaagggttgcatagaatgggtccattttcttcatttgtagagaaagttattcacaaaggtgttgaaaggccaatgtttaagcatgatctgatgatgggttatgcttggatagactttgatattgagccagctagattcaatcaaaatcacgactcggtccgcactagcctgaggtaa

SEQ ID NO: 1091 - DNA, 225 bp, synthetic construct
  misc_feature 1..225: note = Synthetic
  source 1..225: mol_type = other DNA
ttggggtccttcacgtggtttccacacaagacatcagttccagagggtgaagggttgcatagaatgggtccattttcttcatttgtagagaaagttattcacaaaggtgttgaaaggccaatgtttaagcatgatctgatgatgggttatgcttggatagactttgatattgagccagctaggcccaatcaaaatcacgactcggtccgcactagcctgaggtaa

SEQ ID NO: 1092 - DNA, 39 bp, synthetic construct
  source 1..39: mol_type = other DNA
  misc_feature 1..39: note = Synthetic
acgaacatcactttgagcgccctcacaattaaaaaatag

SEQ ID NO: 1093 - DNA, 30 bp, synthetic construct
  misc_feature 1..30: note = Synthetic
  source 1..30: mol_type = other DNA
atcgagcgcaaggtttcaaggttgaactga

SEQ ID NO: 1094 - DNA, 216 bp, synthetic construct
  misc_feature 1..216: note = Synthetic
  source 1..216: mol_type = other DNA
acgctgctggaccccatctcgcatcccgagagcagcctagacacaggcatctacccccatggacgctctgtacgtctgccctacatgtataaaatggaccaagacgacggctatttcatgcatcgccgtctgttgccgctgttcatcgtgcccgacgcctaccgcgaacacccgctaggctttgtgcgcgcccaactgcgactcggtccgcactag

SEQ ID NO: 1095 - DNA, 27 bp, synthetic construct
  misc_feature 1..27: note = Synthetic
  source 1..27: mol_type = other DNA
atgatgaaataccgactagaacattag

SEQ ID NO: 1096 - DNA, 30 bp, synthetic construct
  misc_feature 1..30: note = Synthetic
  source 1..30: mol_type = other DNA
atgtcgatcgatatcatctgtgtgcggtaa

SEQ ID NO: 1097 - DNA, 153 bp, synthetic construct
  misc_feature 1..153: note = Synthetic
  source 1..153: mol_type = other DNA
acgggggcgtactttgacaacggctggaaatggacttttgctctcttagtggtcgctatattagggatcattttcttggccgtggtgttcaccgtggtgattaaccgggacagtgccaatataacaacggggacgcaagcatcatcggggtaa

SEQ ID NO: 1098 - DNA, 186 bp, synthetic construct
  source 1..186: mol_type = other DNA
  misc_feature 1..186: note = Synthetic
atgaaaccatacaagttggtctttcgccttccctccttagttctacacttgcttatcattggaattaattggaaatcatccattgctgcacaagatgcattaagtaaggcagtattgatgtacacccccttcattatgtattctgtggctctgcagtgcgactcggtccgcactagcctgaggtaa

SEQ ID NO: 1099 - DNA, 186 bp, synthetic construct
  misc_feature 1..186: note = Synthetic
  source 1..186: mol_type = other DNA
atgaaaccatacaagttggtctttcgccttccctccttagttctacacttgcttatcattggaattaattggaaatcatccattgctgcacaagatgcattaagtaaggcagtattgatgtacacccccttcgccatgtattctgtggctctgcagtgcgactcggtccgcactagcctgaggtaa

SEQ ID NO: 1100 - DNA, 60 bp, synthetic construct
  source 1..60: mol_type = other DNA
  misc_feature 1..60: note = Synthetic
atgctgcatccaactcagccaacagacaggatttcaccgactcggtccgcactagcctga

SEQ ID NO: 1101 - DNA, 75 bp, synthetic construct
  source 1..75: mol_type = other DNA
  misc_feature 1..75: note = Synthetic
atcattaaactaaatacaacaaagccggggctcaagtatcaacacaaaagactggagcacatgagaccgggctga

SEQ ID NO: 1102 - DNA, 168 bp, synthetic construct
  misc_feature 1..168: note = Synthetic
  source 1..168: mol_type = other DNA
atgggagctcaagtatcaacgcaaaagactggggcacatgagaccaggctgaatgctagcggcaattccatcattcactacacaaatattaattattacaaggatgccgcatccaactcagccaatcggcaggatttcaccgactcggtccgcactagcctgaggtaa

SEQ ID NO: 1103 - DNA, 111 bp, synthetic construct
  misc_feature 1..111: note = Synthetic
  source 1..111: mol_type = other DNA
atgctagcggcaattccatcattcactacacaaatattaattattacaaggatgccgcatccaactcagccaatcggcaggatttcaccgactcggtccgcactagcctga

SEQ ID NO: 1104 - DNA, 165 bp, synthetic construct
  misc_feature 1..165: note = Synthetic
  source 1..165: mol_type = other DNA
gtgggccaggtggtaagcacttcctgctcaatctgtttaacggcttcattcatggacggcatctgcgtcttctgcggatggttatgccacagggacatcgccaccagaaacgcgccggttctgatggcgtcttccaccgactcggtccgcactagcctgaggtaa

SEQ ID NO: 1105 - DNA, 192 bp, synthetic construct
  misc_feature 1..192: note = Synthetic
  source 1..192: mol_type = other DNA
acgttttcagcgccagaaattgcctccgtgggccaggtggtaagcacttcctgctcaatctgtttaacggcttcattcatggacggcatctgcgtcttctgcggatggttatgccacagggacatcgccaccagaaacgcgccggttctgatggcgtcttccaccgactcggtccgcactagcctgaggtaa

SEQ ID NO: 1106 - DNA, 39 bp, synthetic construct
  misc_feature 1..39: note = Synthetic
  source 1..39: mol_type = other DNA
atcaaccgcacggcgcctacccgactcggtccgcactag

SEQ ID NO: 1107 - DNA, 24 bp, synthetic construct
  source 1..24: mol_type = other DNA
  misc_feature 1..24: note = Synthetic
atgatagtgatgaaccagaattga

SEQ ID NO: 1108 - DNA, 72 bp, synthetic construct
  misc_feature 1..72: note = Synthetic
  source 1..72: mol_type = other DNA
atgtttgtgacctattctaacgacaagactattattaaatatttaggaataacgattccattagtgaggtga

SEQ ID NO: 1109 - DNA, 123 bp, synthetic construct
  misc_feature 1..123: note = Synthetic
  source 1..123: mol_type = other DNA
aggtattccacaatgtctagtctattgaggtcacttgctgcatttaagagacatagggagcaaccaacagcaccgtcaggttcgggtggtgcaattaaaggattgcgactcggtccgcactag

SEQ ID NO: 1110 - DNA, 18 bp, synthetic construct
  source 1..18: mol_type = other DNA
  misc_feature 1..18: note = Synthetic
ataaattatcatacttag

SEQ ID NO: 1111 - DNA, 111 bp, synthetic construct
  misc_feature 1..111: note = Synthetic
  source 1..111: mol_type = other DNA
atggcgacacttcttcggagtctagctctgttcaagaggaacaaagatagaacacccctaattgcaggttcaggaggagccataagagggattcgactcggtccgcactag

SEQ ID NO: 1112 - DNA, 213 bp, synthetic construct
  source 1..213: mol_type = other DNA
  misc_feature 1..213: note = Synthetic
ctgacaggagagccgggaacctacgtgaacggcagcgttacttgctggggctctaatggagcttttggcgccgggactttcatagtacgatccatggtcaacaaaacggccggtaacactaacacattcatccactttgtcgaagatagtgagctggtggagaatcccgcatactttaggcgcagcgatcaccgacgactcggtccgcactag

SEQ ID NO: 1113 - DNA, 213 bp, synthetic construct
  source 1..213: mol_type = other DNA
  misc_feature 1..213: note = Synthetic
ctgacaggagagccgggaacctacgtgaacggcagcgttacttgctggggctctaatggcacttttggcgccgggactttcatagtacgatccatggtcaacaaaacggccggtaacactaacacattcatccactttgtcgaagatagtgagctggtggagaatcccgcatactttaggcgcagcgatcaccgacgactcggtccgcactag

SEQ ID NO: 1114 - DNA, 213 bp, synthetic construct
  misc_feature 1..213: note = Synthetic
  source 1..213: mol_type = other DNA
ctgacaggagagccgggaacctacgtgaacggcagcgttacttgctggggctctactggaacttttggcgccgggactttcatagtacgatccatggtcaacaaaacggccggtaacactaacacattcatccactttgtcgaagatagtgagctggtggagaatcccgcatactttaggcgcagcgatcaccgacgactcggtccgcactag

SEQ ID NO: 1115 - DNA, 30 bp, synthetic construct
  misc_feature 1..30: note = Synthetic
  source 1..30: mol_type = other DNA
ctggaacttttggcgccgggactttcatag

SEQ ID NO: 1116 - DNA, 213 bp, synthetic construct
  misc_feature 1..213: note = Synthetic
  source 1..213: mol_type = other DNA
ctgacaggagagccgggaacctacgtgaacggcagcgttacttgctggggctctagccgaacttttggcgccgggactttcatagtacgatccatggtcaacaaaacggccggtaacactaacacattcatccactttgtcgaagatagtgagctggtggagaatcccgcatactttaggcgcagcgatcaccgacgactcggtccgcactag

SEQ ID NO: 1117 - DNA, 213 bp, synthetic construct
  misc_feature 1..213: note = Synthetic
  source 1..213: mol_type = other DNA
ctgacaggagagccgggaacctacgtgaacggcagcgttacttgctggggctctgatggaacttttggcgccgggactttcatagtacgatccatggtcaacaaaacggccggtaacactaacacattcatccactttgtcgaagatagtgagctggtggagaatcccgcatactttaggcgcagcgatcaccgacgactcggtccgcactag

SEQ ID NO: 1118 - DNA, 213 bp, synthetic construct
  source 1..213: mol_type = other DNA
  misc_feature 1..213: note = Synthetic
ctgacaggagagccgggaacctacgtgaacggcagcgttacttgctggggctgtaatggaacttttggcgccgggactttcatagtacgatccatggtcaacaaaacggccggtaacactaacacattcatccactttgtcgaagatagtgagctggtggagaatcccgcatactttaggcgcagcgatcaccgacgactcggtccgcactag

SEQ ID NO: 1119 - DNA, 48 bp, synthetic construct
  source 1..48: mol_type = other DNA
  misc_feature 1..48: note = Synthetic
atgccgcacacagcgcatggattctcattatcatcatcattatcatag

SEQ ID NO: 1120 - DNA, 78 bp, synthetic construct
  source 1..78: mol_type = other DNA
  misc_feature 1..78: note = Synthetic
agggaacaaacaatgagattagtgatgtttcaggtgcatattatttcatgcaacatgcaaattgtaatagagaaataa

SEQ ID NO: 1121 - DNA, 132 bp, synthetic construct
  misc_feature 1..132: note = Synthetic
  source 1..132: mol_type = other DNA
ttgtggcacaaacaaaacaggcggaagccctcgtcaggccgcgagaggatggcatccaggatggcctccgcaatgtcagtgtttgaggccacaagggccttgatcgactcggtccgcactagcctgaggtaa

SEQ ID NO: 1122 - DNA, 138 bp, synthetic construct
  misc_feature 1..138: note = Synthetic
  source 1..138: mol_type = other DNA
gtgaagctgcagttccacgagagaacccgccacgtggtggaggggcgaggcgttgtggcacaaacaaaacaggcggaagccctcgtcaggccgcgagaggatggcatcgaggatggcctccgcaatgtcagtgtttga

SEQ ID NO: 1123 - DNA, 144 bp, synthetic construct
  misc_feature 1..144: note = Synthetic
  source 1..144: mol_type = other DNA
aggggcgaggcgttgtggcacaaacaaaacaggcggaagccctcgtcaggccgcgagaggatggcatcgaggatggcctccgcaatgtcagtgtttgaggccacaagggccttgatcgactcggtccgcactagcctgaggtaa

SEQ ID NO: 1124 - DNA, 27 bp, synthetic construct
  misc_feature 1..27: note = Synthetic
  source 1..27: mol_type = other DNA
atgcggcgggttcaatcagcggcttga

SEQ ID NO: 1125 - DNA, 114 bp, synthetic construct
  misc_feature 1..114: note = Synthetic
  source 1..114: mol_type = other DNA
gtgttgcccttttcggaaggcttggcccaaatttcaaccgcaaaatcaaccgtgttttcaccatccacggcaccggcaagcaggctttccacgactcggtccgcactagcctga

SEQ ID NO: 1126 - DNA, 114 bp, synthetic construct
  source 1..114: mol_type = other DNA
  misc_feature 1..114: note = Synthetic
gtgttgcccttttcggaaggcttggcccaaatttcaaccgcaaaatcaaccgtgttttcaccatccgccgcaccggcaagcaggctttccacgactcggtccgcactagcctga

SEQ ID NO: 1127 - DNA, 21 bp, synthetic construct
  source 1..21: mol_type = other DNA
  misc_feature 1..21: note = Synthetic
acggcttcccgccacaggtaa

SEQ ID NO: 1128 - DNA, 90 bp, synthetic construct
  source 1..90: mol_type = other DNA
  misc_feature 1..90: note = Synthetic
ttggtcagggataggtgcaaaaacctgagctcgtcctcgcgcagagcgcaaagcggccagttctttagcatcttcaggaggagcccgtga

SEQ ID NO: 1129 - DNA, 15 bp, synthetic construct
  source 1..15: mol_type = other DNA
  misc_feature 1..15: note = Synthetic
atggtattattataa

SEQ ID NO: 1130 - DNA, 84 bp, synthetic construct
  misc_feature 1..84: note = Synthetic
  source 1..84: mol_type = other DNA
aggtgtggcaaaggtcctggagatattggcatgatgaacaagggatgtcagcaagctacacaaagtatagatatttgtgcctaa

SEQ ID NO: 1131 - DNA, 18 bp, synthetic construct
  source 1..18: mol_type = other DNA
  misc_feature 1..18: note = Synthetic
ttggctaaggatagttaa

SEQ ID NO: 1132 - DNA, 111 bp, synthetic construct
  misc_feature 1..111: note = Synthetic
  source 1..111: mol_type = other DNA
atggctagccttcttaaaagcctcacactgttcaagaggactcgggaccaaccccctcttgcctctggctccgggggagcaataagaggaatacgactcggtccgcactag

SEQ ID NO: 1133 - DNA, 219 bp, synthetic construct
  misc_feature 1..219: note = Synthetic
  source 1..219: mol_type = other DNA
aagaaaaaacagacagcgtcaatggcagagcaaaaatgtaacacctctacaatggatgccgacaagattgtattcaaagtcaataatcaggtggtctctttgaagcctgagattatcgtggatcaatatgagtacaagtaccctgccatcaaagatttgaaaaagccctgtataactctaggaaaggctcccgactcggtccgcactagcctgaggtaa

SEQ ID NO: 1134 - DNA, 33 bp, synthetic construct
  source 1..33: mol_type = other DNA
  misc_feature 1..33: note = Synthetic
atgagtacaagtaccctgccatcaaagatttga

SEQ ID NO: 1135 - DNA, 219 bp, synthetic construct
  misc_feature 1..219: note = Synthetic
  source 1..219: mol_type = other DNA
aagaaaaaacagacagcgtcaatggcagagcaaaaatgtaacacctctacagccgatgccgacaagattgtattcaaagtcaataatcaggtggtctctttgaagcctgagattatcgtggatcaatatgagtacaagtaccctgccatcaaagatttgaaaaagccctgtataactctaggaaaggctcccgactcggtccgcactagcctgaggtaa

SEQ ID NO: 1136 - DNA, 27 bp, synthetic construct
  source 1..27: mol_type = other DNA
  misc_feature 1..27: note = Synthetic
aagacacagatagtatcagtgacctaa

SEQ ID NO: 1137 - DNA, 57 bp, synthetic construct
  misc_feature 1..57: note = Synthetic
  source 1..57: mol_type = other DNA
atgaaccagcagcattcagtatatacaccagatacgactcggtccgcactagcctga

SEQ ID NO: 1138 - DNA, 213 bp, synthetic construct
  misc_feature 1..213: note = Synthetic
  source 1..213: mol_type = other DNA
ctgacaggagagccgggaacctacgtgaacggcagcgttacttgctgggggtctaatggaacttttggcgccgggactttcatagtacgatccatggtcaacaaaacggccggtaacactaacacattcatccactttgtcgaagatagtgagctggtggagaatcccgcatactttaggcgcagcgatcaccgacgactcggtccgcactag

SEQ ID NO: 1139 - DNA, 213 bp, synthetic construct
  misc_feature 1..213: note = Synthetic
  source 1..213: mol_type = other DNA
ctgacaggagagccgggaacctacgtgaacggcagcgttacttggtggggctctaatggaacttttggcgccgggactttcatagtacgatccatggtcaacaaaacggccggtaacactaacacattcatccactttgtcgaagatagtgagctggtggagaatcccgcatactttaggcgcagcgatcaccgacgactcggtccgcactag

SEQ ID NO: 1140 - DNA, 213 bp, synthetic construct
  source 1..213: mol_type = other DNA
  misc_feature 1..213: note = Synthetic
ctggccatggttcttcgccagctgtcacgtaaggcttctgtgaaagttagtaaaacctggagtggaactaaaaaaagagctcaaaggattttaatttttttgttagaatttttgctggacttttgcacaggtgaagacagtgtagacgggaaaaaaagacagagacacagtggtttgactgagcagacatacagtcgactcggtccgcactag

SEQ ID NO: 1141 - DNA, 192 bp, synthetic construct
  source 1..192: mol_type = other DNA
  misc_feature 1..192: note = Synthetic
atgactttagagcacagccgttacaggatccaattcaagcacaactcttcatgccattatatcctcaagtcagcaacatcccaaatcatcagaatcatcagattaatcgcatcggggggatggaacaccaagatttattacgatacaacgagaatggtgattctcagcaggatgcgactcggtccgcactag

SEQ ID NO: 1142 - DNA, 192 bp, synthetic construct
  misc_feature 1..192: note = Synthetic
  source 1..192: mol_type = other DNA
atgactttagagcacagccgttacaggatccaattcaagcacaactcttcatgccattatatcctcaagtcagcaacatcccaaatcgccagaatcatcagattaatcgcatcggggggatggaacaccaagatttattacgatacaacgagaatggtgattctcagcaggatgcgactcggtccgcactag

SEQ ID NO: 1143 - DNA, 129 bp, synthetic construct
  source 1..129: mol_type = other DNA
  misc_feature 1..129: note = Synthetic
attatgatgaacaatggtcgactgaggaagtctcatatacagagatatgtgtctgtaagctcaaaccaccaggctcgcccaaactcttttgcggaattcctcaacaaagtgtactcggagagctcttga

SEQ ID NO: 1144 - DNA, 201 bp, synthetic construct
  misc_feature 1..201: note = Synthetic
  source 1..201: mol_type = other DNA
acgggagcgagcccccttttttctttttgccaggcccatcccgtcctgcgccaaatgcgtcccacccccccggcgaccaccgcgaccgcggccgtagcaggcgccggcgctagccagccacagccacagacagagatggacttggaagagggcgaagggctggcgagactgggcgactcggtccgcactagcctgaggtaa

SEQ ID NO: 1145 - DNA, 168 bp, synthetic construct
  source 1..168: mol_type = other DNA
  misc_feature 1..168: note = Synthetic
atggccaaggctactgggaggtacaaccttatctccccaaagaaagatcttgaaaaagggctggttctgaatgacctttgcactctctcagtggcccagacggtccagggatggaaggttacctgggctgggattgaattcgactcggtccgcactagcctgaggtaa

SEQ ID NO: 1146 - DNA, 180 bp, synthetic construct
  misc_feature 1..180: note = Synthetic
  source 1..180: mol_type = other DNA
ctggagtccacagccgccaaggctactgggaggtacaaccttatctccccaaagaaagatcttgaaaaagggctggttctgaatgacctttgcactctctcagtggcccagacggtccagggatggaaggttacctgggctgggattgaattcgactcggtccgcactagcctgaggtaa

SEQ ID NO: 1147 - DNA, 36 bp, synthetic construct
  misc_feature 1..36: note = Synthetic
  source 1..36: mol_type = other DNA
attcggaagttgatggagaattttcagcaactttaa

SEQ ID NO: 1148 - DNA, 222 bp, synthetic construct
  misc_feature 1..222: note = Synthetic
  source 1..222: mol_type = other DNA
ttgaaaaccacgaaaatgccaaatatggcaaagattcgatccgatgacaattctctagaaacttttacatctcccaccacacccgacgaaaaaaacatcccagattcaatgattgcaattgttgcagcggtggcagtggtgatggcactaataataatatgcatgcttttatatgcttgtcgctacaaaaagttcgactcggtccgcactagcctgaggtaa

SEQ ID NO: 1149 - DNA, 18 bp, synthetic construct
  misc_feature 1..18: note = Synthetic
  source 1..18: mol_type = other DNA
atgtatccagcagcctga

SEQ ID NO: 1150 - DNA, 150 bp, synthetic construct
  source 1..150: mol_type = other DNA
  misc_feature 1..150: note = Synthetic
ttgcgaagaatctctccagtcttcttatctttgacctcagcagccagcagcttagcagcagacttaagccagttcattgcttcaaccgcagctaccaccgtcacgctcacagattcccaaatcagcttagccgcctatccagcagcctga

SEQ ID NO: 1151 - DNA, 93 bp, synthetic construct
  source 1..93: mol_type = other DNA
  misc_feature 1..93: note = Synthetic
ttgccagactttttgcggactgcggttatgagaagattggaaaaatatccatgcgcttcggacggcgactcggtccgcactagcctgaggtaa

SEQ ID NO: 1152 - DNA, 48 bp, synthetic construct
  source 1..48: mol_type = other DNA
  misc_feature 1..48: note = Synthetic
attgtcatcgctgggagtacgtgttaccggcttcagcgatatgggtag

SEQ ID NO: 1153 - DNA, 111 bp, synthetic construct
  misc_feature 1..111: note = Synthetic
  source 1..111: mol_type = other DNA
atgggtagtccacccaggttccagttggttgaaggtcctaggtattctctggtcggaaggtatctctgtggaccggcacgtcttttcgccggtggtcggtccctgtcctag

SEQ ID NO: 1154 - DNA, 144 bp, synthetic construct
  source 1..144: mol_type = other DNA
  misc_feature 1..144: note = Synthetic
atgatcaattatttttggaatggtttggacaaaatttgttggattgccactttgcacaaaacgtttcagtgtatttgcaagatgcttcaatggttcattttaaaaccttttctgaacaaatcgactcggtccgcactagcctga

SEQ ID NO: 1155 - DNA, 180 bp, synthetic construct
  misc_feature 1..180: note = Synthetic
  source 1..180: mol_type = other DNA
ttgtggggatctgtcaagccgaaactcagcttcaaaatgatcaattatttttggaatggtttggacaaaatttgttggattgccactttgcacaaaacgtttcagtgtatttgcaagatgcttcaatggttcattttaaaaccttttctgaacaaatcgactcggtccgcactagcctga

SEQ ID NO: 1156 - DNA, 201 bp, synthetic construct
  misc_feature 1..201: note = Synthetic
  source 1..201: mol_type = other DNA
acgggagcgagcccccttttttctttttgccagatgcatcccgtcctgcgccaaatgcgtcccacccccccggcgaccaccgcgaccgcggccgtagcaggcgccggcgctagccagccacagccacagacagagatggacttggaagagggcgaagggctggcgagactgggcgactcggtccgcactagcctgaggtaa

SEQ ID NO: 1157 - DNA, 138 bp, synthetic construct
  source 1..138: mol_type = other DNA
  misc_feature 1..138: note = Synthetic
acggccagacgtcggctgctacacgacctggacactgtggactcgcggagaagcagcattgtggacctgtcaacccacttctcggtgcagctacacctacaggcaacaaccgactcggtccgcactagcctgaggtaa

SEQ ID NO: 1158 - DNA, 54 bp, synthetic construct
  misc_feature 1..54: note = Synthetic
  source 1..54: mol_type = other DNA
atgctatactcgtttatattagaacaaacaatagaaatggttatgattatgtag

SEQ ID NO: 1159 - DNA, 30 bp, synthetic construct
  misc_feature 1..30: note = Synthetic
  source 1..30: mol_type = other DNA
atgaccgccttcgttaataagcttatatag

SEQ ID NO: 1160 - DNA, 168 bp, synthetic construct
  source 1..168: mol_type = other DNA
  misc_feature 1..168: note = Synthetic
atgtatttaacagagcagattatggacaggccaaaacctagaacagtaaaggaactagcagacactcttgtgattcctttaatagatttgttgataccttgtaaattttgcaatagatttttatcttattttgagctactcgactcggtccgcactagcctgaggtaa

SEQ ID NO: 1161 - DNA, 147 bp, synthetic construct
  source 1..147: mol_type = other DNA
  misc_feature 1..147: note = Synthetic
atggacaggccaaaacctagaacagtaaaggaactagcagacactcttgtgattcctttaatagatttgttgataccttgtaaattttgcaatagatttttatcttattttgagctactcgactcggtccgcactagcctgaggtaa

SEQ ID NO: 1162 - DNA, 21 bp, synthetic construct
  source 1..21: mol_type = other DNA
  misc_feature 1..21: note = Synthetic
ttggagatgaacaagaaatag

SEQ ID NO: 1163 - DNA, 150 bp, synthetic construct
  misc_feature 1..150: note = Synthetic
  source 1..150: mol_type = other DNA
gtgagcagtaacggcccaacgactccccctcacgggccccacaccacgtttcttcccccgaccagcccggccccgtccaccagctccgtcgccgccgctaccttgtgcagtccgcaacgacacgactcggtccgcactagcctgaggtaa

SEQ ID NO: 1164 - DNA, 114 bp, synthetic construct
  misc_feature 1..114: note = Synthetic
  source 1..114: mol_type = other DNA
acgggccccacaccacgtttcttcccccgaccagcccggccccgtccaccagctccgtcgccgccgctaccttgtgcagtccgcaacgacacgactcggtccgcactagcctga

SEQ ID NO: 1165 - DNA, 177 bp, synthetic construct
  misc_feature 1..177: note = Synthetic
  source 1..177: mol_type = other DNA
attcccccaatagccgcgcgccccggcgggggcggagggagggaatccccccctctcggggcggccccgtccccggggaccaaccgggtgtactccaagaaccccattagcatgcgccgccccccgccgacgcagatgggagtccccccggcgccccgccgactcggtccgcactag

SEQ ID NO: 1166 - DNA, 168 bp, synthetic construct
  source 1..168: mol_type = other DNA
  misc_feature 1..168: note = Synthetic
atggacttcctaccaactcaagtgttctatggcagacgctggagaccacgaatgccgccacgcccttggagaccacgcatgcctacaatgcagagaccagaccaacaggcccgacaaatgcagcaattgattgcagcggtcgactcggtccgcactagcctgaggtaa

SEQ ID NO: 1167 - DNA, 180 bp, synthetic construct
  misc_feature 1..180: note = Synthetic
  source 1..180: mol_type = other DNA
aggtcaatcaccatgtccgcacaaagggaaaggatcaatgccttctacaaagacaatcctcacaataagaaccatagggtgatcctggatagagaacgcttggtcatcgaaagaccctacatcttgcttggagtcctgctggtaatgttcctcgactcggtccgcactagcctgaggtaa

SEQ ID NO: 1168 - DNA, 111 bp, synthetic construct
  misc_feature 1..111: note = Synthetic
  source 1..111: mol_type = other DNA
attagtcatcaaacaaaacttaggacgaaaggtcaatcaccgcctccgcacaaagggaaaggatcaatgccttctacaaagacaatcctcacaataagaaccatagggtga

SEQ ID NO: 1169 - DNA, 57 bp, synthetic construct
  misc_feature 1..57: note = Synthetic
  source 1..57: mol_type = other DNA
ttgcttggagtcctgctggtaatgttcctcgactcggtccgcactagcctgaggtaa

SEQ ID NO: 1170 - DNA, 195 bp, synthetic construct
  source 1..195: mol_type = other DNA
  misc_feature 1..195: note = Synthetic
atgcatgcctgtacgccagtcaacacggagaggaattctataccagcaagatcgtaccgctcatcgagcgggcggttaaacttgaaggtctacacattgaggtcccggaattccaccaggctgtcgcagcctacaacgggtatttcaatggtactgagggccaaccaaaccacgactcggtccgcactagcctga

SEQ ID NO: 1171 - DNA, 168 bp, synthetic construct
  source 1..168: mol_type = other DNA
  misc_feature 1..168: note = Synthetic
atgcctcacggccatctccgacaggccctctccccgacctcctggacatgtgagggcttgttgctcctcctgggattgctggtgctcttctttcaccaccacaaccagtcggccgtggagaggcgtcgccgcgtctcgttcgactcggtccgcactagcctgaggtaa

SEQ ID NO: 1172 - DNA, 171 bp, synthetic construct
  misc_feature 1..171: note = Synthetic
  source 1..171: mol_type = other DNA
gtggcccctcacggccatctccgacaggccctctccccgacctcctggacatgtgagggcttgttgctcctcctgggattgctggtgctcttctttcaccaccacaaccagtcggccgtggagaggcgtcgccgcgtctcgttcgactcggtccgcactagcctgaggtaa

SEQ ID NO: 1173 - DNA, 45 bp, synthetic construct
  misc_feature 1..45: note = Synthetic
  source 1..45: mol_type = other DNA
ctgcgggcctgcatattagtgttgaggcgactcggtccgcactag

SEQ ID NO: 1174 - DNA, 174 bp, synthetic construct
  misc_feature 1..174: note = Synthetic
  source 1..174: mol_type = other DNA
atcgccatgaatccgagtacccacgtgagcagtaacggcccaacgactccccctcacgggccccacaccacgtttcttcccccgaccagcccggccccgtccaccagctccgtcgccgccgctaccttgtgcagtccgcaacgacacgactcggtccgcactagcctgaggtaa

SEQ ID NO: 1175 - DNA, 135 bp, synthetic construct
  misc_feature 1..135: note = Synthetic
  source 1..135: mol_type = other DNA
acggcccaacgactccccctcacgggccccacaccacgtttcttcccccgaccagcccggccccgtccaccagctccgtcgccgccgctaccttgtgcagtccgcaacgacacgactcggtccgcactagcctga

SEQ ID NO: 1176 - DNA, 198 bp, synthetic construct
  misc_feature 1..198: note = Synthetic
  source 1..198: mol_type = other DNA
atgctgtccctgccgctgctcttcctgggtgaggccgggagcctggggtttgattgcacagagtctctcgttgcccgctactacccaggccccgccgcctgtctggccctgttgctcattatactatacgcctggagcttcagccattttatggactctctcaagaaccacgactcggtccgcactagcctgaggtaa

SEQ ID NO: 1177 - DNA, 198 bp, synthetic construct
  misc_feature 1..198: note = Synthetic
  source 1..198: mol_type = other DNA
atgctgtccctgccgctgctcttcctgggtgaggccgggagcctggggtttgattgcacagagtctctcgttgcccgctactacccaggccccgccgcctgtttggccctgttgctcattatactatacgcctggagcttcagccattttatggactctctcaagaaccacgactcggtccgcactagcctgaggtaa

SEQ ID NO: 1178 - DNA, 111 bp, synthetic construct
  source 1..111: mol_type = other DNA
  misc_feature 1..111: note = Synthetic
atgagtgatatatttgacgaggcggctagtttcagaagctatcaatcgaaactcggtcgagatgggcgggcaagtgcggcaacagctacgactcggtccgcactagcctga

SEQ ID NO: 1179 - DNA, 198 bp, synthetic construct
  misc_feature 1..198: note = Synthetic
  source 1..198: mol_type = other DNA
ctgaaacctgttctccatcacagagctggtatggcctccagtcgtgtagacaccattaatttacggatctggctggtctctataatctgtgcagccttgtcattcataaacgtcacggtctatctgatagccataaactttccaaatttaggatttccgtgcgcctacttcgactcggtccgcactagcctgaggtaa

SEQ ID NO: 1180 - DNA, 42 bp, synthetic construct
  misc_feature 1..42: note = Synthetic
  source 1..42: mol_type = other DNA
ctgttctccatcacagagctggtatggcctccagtcgtgtag

SEQ ID NO: 1181 - DNA, 198 bp, synthetic construct
  source 1..198: mol_type = other DNA
  misc_feature 1..198: note = Synthetic
ctgaaacctgttctccatcacagagctggtgccgcctccagtcgtgtagacaccattaatttacggatctggctggtctctataatctgtgcagccttgtcattcataaacgtcacggtctatctgatagccataaactttccaaatttaggatttccgtgcgcctacttcgactcggtccgcactagcctgaggtaa

SEQ ID NO: 1182 - DNA, 168 bp, synthetic construct
  misc_feature 1..168: note = Synthetic
  source 1..168: mol_type = other DNA
atgaaggcacttagcactttagtttttttgtccttgattggcattgtttttagtaatcctattcctagagttagctttattaaaccagttaatgttactgaagggagcaatgtgacactggtaggtgtagagggtgctaacgactcggtccgcactagcctgaggtaa

SEQ ID NO: 1183 - DNA, 117 bp, synthetic construct
  misc_feature 1..117: note = Synthetic
  source 1..117: mol_type = other DNA
atgaaggacacaattggtttgttaatccggacaatgaaggacaaattgtttttgttaatcaggacaattggaacacaatcaaattattttttgtgcggtcataaaatcgatatttga

SEQ ID NO: 1184 - DNA, 60 bp, synthetic construct
  misc_feature 1..60: note = Synthetic
  source 1..60: mol_type = other DNA
attctccggggaggcaagcagttggatacggcggggccgactcggtccgcactagcctga

SEQ ID NO: 1185 - DNA, 51 bp, synthetic construct
  source 1..51: mol_type = other DNA
  misc_feature 1..51: note = Synthetic
atgggagacattaactctacggagcgctatctgaccctggggggaacatag

SEQ ID NO: 1186 - DNA, 42 bp, synthetic construct
  misc_feature 1..42: note = Synthetic
  source 1..42: mol_type = other DNA
atgttcgtcagggtctcggaggcccccagcacctgccagtaa

SEQ ID NO: 1187 - DNA, 201 bp, synthetic construct
  source 1..201: mol_type = other DNA
  misc_feature 1..201: note = Synthetic
attttgcccgcgaattttgaacgagcagcagccatgccggggttctacgagatcgtgctgaaggtgcccagcgacctggacgagcacctgcccggcatttctgactcttttgtgagctgggtggccgagaaggaatgggagctgccgccggattctgacatggacttgaatctcgactcggtccgcactagcctgaggtaa

SEQ ID NO: 1188 - DNA, 201 bp, synthetic construct
  misc_feature 1..201: note = Synthetic
  source 1..201: mol_type = other DNA
attttgcccgcgaattttgaacgagcagcagccgccccggggttctacgagatcgtgctgaaggtgcccagcgacctggacgagcacctgcccggcatttctgactcttttgtgagctgggtggccgagaaggaatgggagctgccgccggattctgacatggacttgaatctcgactcggtccgcactagcctgaggtaa

SEQ ID NO: 1189 - DNA, 168 bp, synthetic construct
  source 1..168: mol_type = other DNA
  misc_feature 1..168: note = Synthetic
atgggcgggtcggtgagcctgccctcgcgggacttgccgccgccggtgcgcacgccggagatgaacatcgtgcccgagcgcgacctcgcggacacgatggcgcgcctctccaccgcagacccgccgcagccgctgggcgtcgactcggtccgcactagcctgaggtaa

SEQ ID NO: 1190 - DNA, 150 bp, synthetic construct
  source 1..150: mol_type = other DNA
  misc_feature 1..150: note = Synthetic
ctgccctcgcgggacttgccgccgccggtgcgcacgccggagatgaacatcgtgcccgagcgcgacctcgcggacacgatggcgcgcctctccaccgcagacccgccgcagccgctgggcgtcgactcggtccgcactagcctgaggtaa

SEQ ID NO: 1191 - DNA, 147 bp, synthetic construct
  source 1..147: mol_type = other DNA
  misc_feature 1..147: note = Synthetic
atgacacgatccagaacacgattagcgtcatcccgccatcatccgtaccaaccgccggcccccttacctcgctgtgaggagaccgagacccgcgcttctctggtggaggatcatccggtcgactcggtccgcactagcctgaggtaa

SEQ ID NO: 1192 - DNA, 90 bp, synthetic construct
  source 1..90: mol_type = other DNA
  misc_feature 1..90: note = Synthetic
aggttgaatcacagcaggtcacacctaatgaccatgctaatgccagagctttttcgcatctggccaccgactcggtccgcactagcctga

SEQ ID NO: 1193 - DNA, 186 bp, synthetic construct
  source 1..186: mol_type = other DNA
  misc_feature 1..186: note = Synthetic
atgattgttatcggtgttataatattggcagcgttgtttatgtactatgccaagcgtatgttgttcacatccaccaatgataaaatcaaacttattttagccaataaggaaaacgtccattggactacttacatggacacattctttagaacttctccgatggcgactcggtccgcactagcctga

SEQ ID NO: 1194 - DNA, 186 bp, synthetic construct
  source 1..186: mol_type = other DNA
  misc_feature 1..186: note = Synthetic
atgattgttatcggtgttataatattggcagcgttgtttatgtactatgccaagcgtatgctgttcacgtccaccaatgataaaatcaaacttattttagccaataaggaaaacgtccattggactacttacatggacacattctttagaacttctccaatggcgactcggtccgcactagcctga

SEQ ID NO: 1195 - DNA, 186 bp, synthetic construct
  misc_feature 1..186: note = Synthetic
  source 1..186: mol_type = other DNA
atgattgttatcggtgttataatattggcagcgttgtttatgtactatgccaagcgtatgctgttcacatccaccaatgataaaatcaaacttattttagccaataaggaaaacgtccattggactacttacatggacacattctttagaacttctccgatgacgactcggtccgcactagcctga

SEQ ID NO: 1196 - DNA, 54 bp, synthetic construct
  source 1..54: mol_type = other DNA
  misc_feature 1..54: note = Synthetic
atgccaagcgtatgctgttcacatccaccaatgataaaatcaaacttattttag

SEQ ID NO: 1197 - DNA, 177 bp, synthetic construct
  source 1..177: mol_type = other DNA
  misc_feature 1..177: note = Synthetic
atcggtgttataatattggcagcgttgtttatgtactatgccaagcgtatgctattcacatccaccaatgataaaatcaaacttattttagcaaataaggaaaacgtccattggactacttacatggacacattctttagaacttctccgatggcgactcggtccgcactagcctga

SEQ ID NO: 1198 - DNA, 30 bp, synthetic construct
  misc_feature 1..30: note = Synthetic
  source 1..30: mol_type = other DNA
atgagaaacgtcccccggtctgacgtttag

SEQ ID NO: 1199 - DNA, 27 bp, synthetic construct
  source 1..27: mol_type = other DNA
  misc_feature 1..27: note = Synthetic
gtggccgagaaggtgactgcgcagtag

SEQ ID NO: 1200 - DNA, 30 bp, synthetic construct
  misc_feature 1..30: note = Synthetic
  source 1..30: mol_type = other DNA
atcgtggccgagaaggtgactgcgcagtag

SEQ ID NO: 1201 - DNA, 12 bp, synthetic construct
  source 1..12: mol_type = other DNA
  misc_feature 1..12: note = Synthetic
gtgaaaatttaa

SEQ ID NO: 1202 - DNA, 168 bp, synthetic construct
  misc_feature 1..168: note = Synthetic
  source 1..168: mol_type = other DNA
atggcgcgcgcggtcgacgggaacgaggtcatcttcgtgctgaagacgctggccgtgcccgccgactgccgccgccgcgaggacccgcgctttgtcgaggccttcgcgcccgacgagcttgacgcgtacatccgcgagcacgactcggtccgcactagcctgaggtaa

SEQ ID NO: 1203 - DNA, 36 bp, synthetic construct
  source 1..36: mol_type = other DNA
  misc_feature 1..36: note = Synthetic
atcgatccaatgccgaaagaattcacgttgacttag

SEQ ID NO: 1204 - DNA, 168 bp, synthetic construct
  misc_feature 1..168: note = Synthetic
  source 1..168: mol_type = other DNA
ctgtttaccttctctcccaggcgccactggacgacgcaagactgcaattgttctatctatcccggccatataacgggtcatcgcgccgcatgggatatgatgatgaactggtcccctacggcagcgttggtggtagctcacgactcggtccgcactagcctgaggtaa

SEQ ID NO: 1205 - DNA, 168 bp, synthetic construct
  source 1..168: mol_type = other DNA
  misc_feature 1..168: note = Synthetic
ctgtttaccttctctcccaggcgccagccgacgacgcaagactgcaattgttctatctatcccggccatataacgggtcatcgcatggcatgggatatgatgatgaactggtcccctacggcagcgttggtggtagctcacgactcggtccgcactagcctgaggtaa

SEQ ID NO: 1206 - DNA, 168 bp, synthetic construct
  misc_feature 1..168: note = Synthetic
  source 1..168: mol_type = other DNA
atggctaccttctatgaagtcattgttcgcgtcccatttgacgtggaggaacatctgcctggaatttctgacagctttgtggactgggtaactggtcaaatttgggagctgcctccagagtcagatttaaatttgactctcgactcggtccgcactagcctgaggtaa

SEQ ID NO: 1207 - DNA, 126 bp, synthetic construct
  misc_feature 1..126: note = Synthetic
  source 1..126: mol_type = other DNA
gtggaggaacatctgcctggaatttctgacagctttgtggactgggtaactggtcaaatttgggagctgcctccagagtcagatttaaatttgactctcgactcggtccgcactagcctgaggtaa

SEQ ID NO: 1208 - DNA, 18 bp, synthetic construct
  source 1..18: mol_type = other DNA
  misc_feature 1..18: note = Synthetic
atggaacaggatatgtaa

SEQ ID NO: 1209 - DNA, 120 bp, synthetic construct
  misc_feature 1..120: note = Synthetic
  source 1..120: mol_type = other DNA
ctggccgtgcccgccgactgccgccgccgcgaggacccgcgctttgtcgaggccttcgcgcccgacgagcttgacgcgtacatccgcgagcacgactcggtccgcactagcctgaggtaa

SEQ ID NO: 1210 - DNA, 48 bp, synthetic construct
  misc_feature 1..48: note = Synthetic
  source 1..48: mol_type = other DNA
atgaaatggtacatcgcattcaaaccacacgctttagataaggtttaa

SEQ ID NO: 1211 - DNA, 168 bp, synthetic construct
  misc_feature 1..168: note = Synthetic
  source 1..168: mol_type = other DNA
atgtccggaaacagctccatcatgacacgatccagaacacgattagcgttatctcgccatcatccgtaccaaccgccggccaccttacctcgctgtgaggagaccgagagccgcgcttctctggtggaggatcatccggtcgactcggtccgcactagcctgaggtaa

SEQ ID NO: 1212 - DNA, 147 bp, synthetic construct
  source 1..147: mol_type = other DNA
  misc_feature 1..147: note = Synthetic
atgacacgatccagaacacgattagcgttatctcgccatcatccgtaccaaccgccggccaccttacctcgctgtgaggagaccgagagccgcgcttctctggtggaggatcatccggtcgactcggtccgcactagcctgaggtaa

SEQ ID NO: 1213 - DNA, 174 bp, synthetic construct
  source 1..174: mol_type = other DNA
  misc_feature 1..174: note = Synthetic
acgaaaatgtcaggaaacagctccatcatgacacgatccagaacacgattagcgtcatcccgccatcatccgtaccaaccgccggcccccttacctcgctgtgaggagaccgagacccgcgcttctctggtggaggatcatccggtcgactcggtccgcactagcctgaggtaa

SEQ ID NO: 1214 - DNA, 39 bp, synthetic construct
  source 1..39: mol_type = other DNA
  misc_feature 1..39: note = Synthetic
atgtgcgtattgcaacaggccaagagctcgctcagttag

SEQ ID NO: 1215 - DNA, 42 bp, synthetic construct
  misc_feature 1..42: note = Synthetic
  source 1..42: mol_type = other DNA
atgccacagttattgaggtcaagaaccgcttcacctaactag

SEQ ID NO: 1216 - DNA, 21 bp, synthetic construct
  misc_feature 1..21: note = Synthetic
  source 1..21: mol_type = other DNA
atgaagtttaacatcctttag

SEQ ID NO: 1217 - DNA, 78 bp, synthetic construct
  misc_feature 1..78: note = Synthetic
  source 1..78: mol_type = other DNA
atgattgcaccattaagaaaaacaaatctgatgaagattaagcctgatgaaggcccaaccttcatctttttaccataa

SEQ ID NO: 1218 - DNA, 141 bp, synthetic construct
  misc_feature 1..141: note = Synthetic
  source 1..141: mol_type = other DNA
aagtcaaacatggcctcgaatctttacaagagatcaaaaacaaccctccgtcttcccaagatgtcaatcttgccagggagatttacgaatccattagacaaacaggaacatcttcagtcgactcggtccgcactagcctga

SEQ ID NO: 1219 - DNA, 72 bp, synthetic construct
  misc_feature 1..72: note = Synthetic
  source 1..72: mol_type = other DNA
ctgccgatggttatcttccagattggctcgaggacaacctctctgagggcattcgcgagtggtgggacctga

SEQ ID NO: 1220 - DNA, 24 bp, synthetic construct
  source 1..24: mol_type = other DNA
  misc_feature 1..24: note = Synthetic
atgacagacatcagagaagcttaa

SEQ ID NO: 1221 - DNA, 132 bp, synthetic construct
  source 1..132: mol_type = other DNA
  misc_feature 1..132: note = Synthetic
gtggcgcccctccatgcgaggttaacaccaataatgggacctggcactgccccaccgattgcttcaggaagcatccggagactacctacgccaagtgcggatcagggccttggatcacaccacgctgcctga

SEQ ID NO: 1222 - DNA, 114 bp, synthetic construct
  source 1..114: mol_type = other DNA
  misc_feature 1..114: note = Synthetic
aggttaacaccaataatgggacctggcactgccccaccgattgcttcaggaagcatccggagactacctacgccaagtgcggatcagggccttggatcacaccacgctgcctga

SEQ ID NO: 1223 - DNA, 171 bp, synthetic construct
  misc_feature 1..171: note = Synthetic
  source 1..171: mol_type = other DNA
attatgaattgtttccaagaaaaacaattttcaagagaaaatttattaaaaatgccgtttagaatggttttaacgggaggatctggatctggaaaaactatctatttactatctctgttttctacactagttaaaaaatataacgactcggtccgcactagcctgaggtaa

SEQ ID NO: 1224 - DNA, 171 bp, synthetic construct
  source 1..171: mol_type = other DNA
  misc_feature 1..171: note = Synthetic
attatgaattgtttccaagaaaaacaatttttaagagaaaatttattaaaaatgccgtttagaatggttttaacgggaggatctggatctggaaaaactatctatttactatctctgttttctacactagttaaaaaatataacgactcggtccgcactagcctgaggtaa

SEQ ID NO: 1225 - DNA, 36 bp, synthetic construct
  misc_feature 1..36: note = Synthetic
  source 1..36: mol_type = other DNA
attattacgattatttggcctagagggaacttttaa

SEQ ID NO: 1226 - DNA, 159 bp, synthetic construct
  misc_feature 1..159: note = Synthetic
  source 1..159: mol_type = other DNA
atggctcctacagttaagagaatcattaacgactcaataattcagcctaaactaccggccaatgaggatccggtagaatatccagctgattacttcaaaaataataccaacatagtattatatgtgagcactaaagcgactcggtccgcactagcctga

SEQ ID NO: 1227 - DNA, 177 bp, synthetic construct
  misc_feature 1..177: note = Synthetic
  source 1..177: mol_type = other DNA
acgaacactttaacagaaatcaaaatgagttctcaagtattctgcatttctacaggtcaaacagtctccgtatgccttccagcaaatgaagacccagtagagtttccaggggcgttcttcactccaaatgctaggaaaccgacggtgtacataaagaagcgactcggtccgcactag

SEQ ID NO: 1228 - DNA, 228 bp, synthetic construct
  source 1..228: mol_type = other DNA
  misc_feature 1..228: note = Synthetic
acgaagacaaacaaaccattattatcattaaaaggctcaggagaaactttaacagtaatcaaaatgtctgttacagtcaagagaatcattgacaacacagtcatagttccaaaacttcctgcaaatgaggatccagtggaatacccggcagattacttcagaaaatcaaaggagattcctctttacatcaatactacaaacgactcggtccgcactagcctgaggtaa

SEQ ID NO: 1229 - DNA, 132 bp, synthetic construct
  misc_feature 1..132: note = Synthetic
  source 1..132: mol_type = other DNA
atggcctcgaatctttacaagagatcaaaaacaaccctccgtcttcccaagatgtcaatcttgccagggagatttacgaatccattagacaaacaggaacatcttcagtcgactcggtccgcactagcctga

SEQ ID NO: 1230 - DNA, 42 bp, synthetic construct
  source 1..42: mol_type = other DNA
  misc_feature 1..42: note = Synthetic
atactgcactcaggcaagcaattctttgctggggggaactaa

SEQ ID NO: 1231 - DNA, 24 bp, synthetic construct
  source 1..24: mol_type = other DNA
  misc_feature 1..24: note = Synthetic
atgtcaacactaatatgggcctaa

SEQ ID NO: 1232 - DNA, 66 bp, synthetic construct
  source 1..66: mol_type = other DNA
  misc_feature 1..66: note = Synthetic
atagtgtgcgggaacttggtcgaagcgtgtaccacctatataacgactcggtccgcactagcctga

SEQ ID NO: 1233 - DNA, 204 bp, synthetic construct
  source 1..204: mol_type = other DNA
  misc_feature 1..204: note = Synthetic
atgtgtatgatgtctcataataaagctttctttctcagtctgcaacgcccggctgtgtcgggtgtggctgtctgtttgtctgtgcgccgtggtgctgggtcagtgccagcgggaaaccgcggaaaaaaacgattattaccgagtaccgcattactgggacgcgtgctctcgcgcgctgcccgaccacgactcggtccgcactag

SEQ ID NO: 1234 - DNA, 195 bp, synthetic construct
  misc_feature 1..195: note = Synthetic
  source 1..195: mol_type = other DNA
attaatttagtaactgtaaatataattgccaattgtttccaagaaaaacaattttcaagagaaaatttattaaaaatgccgtttagaatggttttaacgggaggatctggatctggaaaaactatctatttactatctctgttttctacactagttaaaaaatataacgactcggtccgcactagcctgaggtaa

SEQ ID NO: 1235 - DNA, 195 bp, synthetic construct
  source 1..195: mol_type = other DNA
  misc_feature 1..195: note = Synthetic
attaatttagtaactgtaaatataattgccaattgtttccaagaaaaacaatttttaagagaaaatttattaaaaatgccgtttagaatggttttaacgggaggatctggatctggaaaaactatctatttactatctctgttttctacactagttaaaaaatataacgactcggtccgcactagcctgaggtaa

SEQ ID NO: 1236 - DNA, 90 bp, synthetic construct
  source 1..90: mol_type = other DNA
  misc_feature 1..90: note = Synthetic
attcgaccccatcggagagacgacggcgggcagcagccgtcgaccacgcgcggcctcccccgcgactcggtccgcactagcctgaggtaa

SEQ ID NO: 1237 - DNA, 180 bp, synthetic construct
  misc_feature 1..180: note = Synthetic
  source 1..180: mol_type = other DNA
ctgggctgtcgtaggtgtgggaaggttgtattccgagtgcgcctccgaggcatctactctacacctatcacaatggctggtgtcttttcccagtatgagaggtttgtggacaatcaatctcaggtgtcaaggaaggatcatcggtccttagcaggagcgactcggtccgcactagcctga

SEQ ID NO: 1238 - DNA, 84 bp, synthetic construct
  source 1..84: mol_type = other DNA
  misc_feature 1..84: note = Synthetic
ctgccgaactacacactgaaaacgcagtttttaccgcttcggaaaaaatctccttacgactcggtccgcactagcctgaggtaa

SEQ ID NO: 1239 - DNA, 141 bp, synthetic construct
  source 1..141: mol_type = other DNA
  misc_feature 1..141: note = Synthetic
ataacgctcgtcacaaacataaaattctgtgtaggcgtttcgatcatcctcaacctagcgctcggggctgccgaactacacactgaaaacgcagtttttaccgcttcggcaaaaatctccttacgactcggtccgcactag

SEQ ID NO: 1240 - DNA, 168 bp, synthetic construct
  misc_feature 1..168: note = Synthetic
  source 1..168: mol_type = other DNA
atgcagacctacagcacccccctcacgcttatcatagtcacgtcgctgtttttgttcacaactcagggaagttcatcgaacgccgtcgaaccaaccaaaaaacccctaaagctcgccaactaccgcgccacctgcgaggacgactcggtccgcactagcctgaggtaa

SEQ ID NO: 1241 - DNA, 144 bp, synthetic construct
  source 1..144: mol_type = other DNA
  misc_feature 1..144: note = Synthetic
acgcttatcatagtcacgtcgctgtttttgttcacaactcagggaagttcatcgaacgccgtcgaaccaaccaaaaaacccctaaagctcgccaactaccgcgccacctgcgaggacgactcggtccgcactagcctgaggtaa

SEQ ID NO: 1242 - DNA, 36 bp, synthetic construct
  source 1..36: mol_type = other DNA
  misc_feature 1..36: note = Synthetic
acgacggcaacggtggcgaacgctgcgacacgctag

SEQ ID NO: 1243 - DNA, 84 bp, synthetic construct
  misc_feature 1..84: note = Synthetic
  source 1..84: mol_type = other DNA
gtgcgagtcgccgcgaccccctcaccttcagtcacctcagcccttacccccgtcacgtcccccataaccccgttgtgtatttaa

SEQ ID NO: 1244 - DNA, 75 bp, synthetic construct
  source 1..75: mol_type = other DNA
  misc_feature 1..75: note = Synthetic
gtgaaaacgttcctgctctcacagatcacgggaccctgccgttgcgcagcagtatccggggagtccaacgtgtga

SEQ ID NO: 1245 - DNA, 45 bp, synthetic construct
  misc_feature 1..45: note = Synthetic
  source 1..45: mol_type = other DNA
atggccttcagctattgcctctcggaatgcatcgctcagtgttga

SEQ ID NO: 1246 - DNA, 60 bp, synthetic construct
  misc_feature 1..60: note = Synthetic
  source 1..60: mol_type = other DNA
atgtcttcaagtggagcatcaggcagacccctcgactcggtccgcactagcctgaggtaa

SEQ ID NO: 1247 - DNA, 45 bp, synthetic construct
  source 1..45: mol_type = other DNA
  misc_feature 1..45: note = Synthetic
atggcggtattcatccagctaagtaagttgaacgcacctgtatag

SEQ ID NO: 1248 - DNA, 30 bp, synthetic construct
  misc_feature 1..30: note = Synthetic
  source 1..30: mol_type = other DNA
atggaaaacgcattaacctacatggaatag

SEQ ID NO: 1249 - DNA, 57 bp, synthetic construct
  source 1..57: mol_type = other DNA
  misc_feature 1..57: note = Synthetic
ctgggtctgttaaatctgctgcaggtgtctcaggagcccgatatcttgcagtcatga

SEQ ID NO: 1250 - DNA, 168 bp, synthetic construct
  source 1..168: mol_type = other DNA
  misc_feature 1..168: note = Synthetic
atgatggtgtgtctacgcatggctatagagggcgccctttcggagctttttaatatgcacggcatgaaccttcagactatttgccgcgacatcattcgcgagtggagaaatgaaaattacttgggcattgtacagtcctgcgactcggtccgcactagcctgaggtaa

SEQ ID NO: 1251 - DNA, 54 bp, synthetic construct
  source 1..54: mol_type = other DNA
  misc_feature 1..54: note = Synthetic
atgaaaattacttgggcattgtacagtcctgcgactcggtccgcactagcctga

SEQ ID NO: 1252 - DNA, 81 bp, synthetic construct
  source 1..81: mol_type = other DNA
  misc_feature 1..81: note = Synthetic
ctgggtctgttaaatctgctgcaggtgtctcaggagcccgatatcttgcagtcgccatggtgtgtctacgcatggctatag

SEQ ID NO: 1253 - DNA, 165 bp, synthetic construct
  misc_feature 1..165: note = Synthetic
  source 1..165: mol_type = other DNA
atggtgtgtctacgcatggctatagagggcgccctttcggagctttttaatatgcacggcatgaaccttcagactatttgccgcgacatcattcgcgagtggagaaatgaaaattacttgggcattgtacagtcctgcgactcggtccgcactagcctgaggtaa

SEQ ID NO: 1254 - DNA, 96 bp, synthetic construct
  source 1..96: mol_type = other DNA
  misc_feature 1..96: note = Synthetic
ctgaagaaagtttgtcgcctgatgctgatcctgaagaggaggagcaacaattatattgggttgacacctgttgcggtacctgtaaagcaactgtaa

SEQ ID NO: 1255 - DNA, 111 bp, synthetic construct
  source 1..111: mol_type = other DNA
  misc_feature 1..111: note = Synthetic
atggagcgtaaaagtaaactcgtcgacaaagcactcaataaattagagtctaccatcggtcaatctagactatcgtatttgcctccggaaattatgcgcaatatcatctaa

SEQ ID NO: 1256 - DNA, 120 bp, synthetic construct
  misc_feature 1..120: note = Synthetic
  source 1..120: mol_type = other DNA
atgcaattcttgaagactctcagtatacaattagaagggatgttggtgctaccactgcgatcacaccttccgaactgcagccgcaagtatccacattatgcgcgactcggtccgcactag

SEQ ID NO: 1257 - DNA, 27 bp, synthetic construct
  misc_feature 1..27: note = Synthetic
  source 1..27: mol_type = other DNA
atgggacaagtcaaaagcctctcttga

SEQ ID NO: 1258 - DNA, 198 bp, synthetic construct
  misc_feature 1..198: note = Synthetic
  source 1..198: mol_type = other DNA
atgaacaaggttctcattttcgacagaaacatgtatccacgcggggttaaaaagaatgtattagggcggcaacgatatggtttgaaaaccattaaacgaactcttgttcataaacctgctaacaagtatgtcagccgctttacgaaacaatttcacagacgcatcattcccgactcggtccgcactagcctgaggtaa

SEQ ID NO: 1259 - DNA, 66 bp, synthetic construct
  source 1..66: mol_type = other DNA
  misc_feature 1..66: note = Synthetic
atgtcagccgctttacgaaacaatttcacagacgcatcattcccgactcggtccgcactagcctga

SEQ ID NO: 1260 - DNA, 198 bp, synthetic construct
  misc_feature 1..198: note = Synthetic
  source 1..198: mol_type = other DNA
atgaacaaggttctcattttcgacagaaacgcctatccacgcggggttaaaaagaatgtattagggcggcaacgatatggtttgaaaaccattaaacgaactcttgttcataaacctgctaacaagtatgtcagccgctttacgaaacaatttcacagacgcatcattcccgactcggtccgcactagcctgaggtaa

SEQ ID NO: 1261 - DNA, 189 bp, synthetic construct
  misc_feature 1..189: note = Synthetic
  source 1..189: mol_type = other DNA
atgattaaagaaaacctaggatcaaagatccatgatcagaacacgcatctacaaaccgacctacacaacaaccacaccacccacatgtcacacccccatcaagatggaagaagacccgagagagaagatgcatccccaatcaatgtggagactggtgagactgagagcacacgactcggtccgcactag

SEQ ID NO: 1262 - DNA, 189 bp, synthetic construct
  source 1..189: mol_type = other DNA
  misc_feature 1..189: note = Synthetic
atgattaaagaaaacctaggatcaaagatccgccatcagaacacgcatctacaaaccgacctacacaacaaccacaccacccacatgtcacacccccatcaagatggaagaagacccgagagagaagatgcatccccaatcaatgtggagactggtgagactgagagcacacgactcggtccgcactag

SEQ ID NO: 1263 - DNA, 105 bp, synthetic construct
  misc_feature 1..105: note = Synthetic
  source 1..105: mol_type = other DNA
atgcgatccagatcttccgtggcgctgcgcgcccgcgtgctcgtgaaaacgctgtcctccgcctcctcatccgccggcgtgtcctcgttgctcgaggggatataa

SEQ ID NO: 1264 - DNA, 72 bp, synthetic construct
  misc_feature 1..72: note = Synthetic
  source 1..72: mol_type = other DNA
atggaaacagatagagaaaacgctatcattagacagcgaaatgacgactcggtccgcactagcctgaggtaa

SEQ ID NO: 1265 - DNA, 72 bp, synthetic construct
  misc_feature 1..72: note = Synthetic
  source 1..72: mol_type = other DNA
atggaaacagatagagaaaacgctattattagacagcgaaatgacgactcggtccgcactagcctgaggtaa

SEQ ID NO: 1266 - DNA, 72 bp, synthetic construct
  misc_feature 1..72: note = Synthetic
  source 1..72: mol_type = other DNA
ctggaaacagatagagaaaacgctattattagacagcgaaatgacgactcggtccgcactagcctgaggtaa

SEQ ID NO: 1267 - DNA, 72 bp, synthetic construct
  source 1..72: mol_type = other DNA
  misc_feature 1..72: note = Synthetic
atggaaacagatagagaaaacgctattattatacagcgaaatgacgactcggtccgcactagcctgaggtaa

SEQ ID NO: 1268 - DNA, 168 bp, synthetic construct
  misc_feature 1..168: note = Synthetic
  source 1..168: mol_type = other DNA
atgccgtgccgcccgttgcagggcctggtgctcgtgggcctctgggtctgtgccaccagcctggttgtccgtggccccacggtcagtctggtatcaaactcatttgtggacgccggggccttggggcccgacggcgtagtcgactcggtccgcactagcctgaggtaa

SEQ ID NO: 1269 - DNA, 153 bp, synthetic construct
  misc_feature 1..153: note = Synthetic
  source 1..153: mol_type = other DNA
ttgcagggcctggtgctcgtgggcctctgggtctgtgccaccagcctggttgtccgtggccccacggtcagtctggtatcaaactcatttgtggacgccggggccttggggcccgacggcgtagtcgactcggtccgcactagcctgaggtaa

SEQ ID NO: 1270 - DNA, 18 bp, synthetic construct
  source 1..18: mol_type = other DNA
  misc_feature 1..18: note = Synthetic
atgaggcggattccgtga

SEQ ID NO: 1271 - DNA, 42 bp, synthetic construct
  source 1..42: mol_type = other DNA
  misc_feature 1..42: note = Synthetic
atgttaagcctcattgataatgtttggtcgtacgcttggtga

SEQ ID NO: 1272 - DNA, 213 bp, synthetic construct
  source 1..213: mol_type = other DNA
  misc_feature 1..213: note = Synthetic
atgcctgtaccaaatcctacaatgccggtgaaaggtgccgggaccaccctgtgggtttataaggggagcggtgacccttacgcgaatccgctttcagacgttgactggtcgcgtctggcaaaagttaaagacctgacgcccggcgaactgaccgctgagtcctatgacgacagctatctcgatgatgaagatgcacgactcggtccgcactag

SEQ ID NO: 1273 - DNA, 57 bp, synthetic construct
  source 1..57: mol_type = other DNA
  misc_feature 1..57: note = Synthetic
acgacagctatctcgatgatgaagatgcacgactcggtccgcactagcctgaggtaa

SEQ ID NO: 1274 - DNA, 213 bp, synthetic construct
  source 1..213: mol_type = other DNA
  misc_feature 1..213: note = Synthetic
atgcctgtaccaaatcctacaatgccggtgaaaggtgccgggaccaccctgtgggtttataaggggagcggtgacccttacgcgaatccgctttcagacgttgactggtcgcgtctggcaaaagttaaagacctgacgcccggcgaactgaccgctgagtcctatgacgacagctatctcgatgatgaaggcccacgactcggtccgcactag

SEQ ID NO: 1275 - DNA, 57 bp, synthetic construct
  misc_feature 1..57: note = Synthetic
  source 1..57: mol_type = other DNA
acgacagctatctcgatgatgaaggcccacgactcggtccgcactagcctgaggtaa

SEQ ID NO: 1276 - DNA, 96 bp, synthetic construct
  misc_feature 1..96: note = Synthetic
  source 1..96: mol_type = other DNA
atgttctcgtggttttcctcaatgaacttgatgcgctcagggaacggaaccttatcgacacccgcacagtttgcaccgtggattttcagccagtag

SEQ ID NO: 1277 - DNA, 75 bp, synthetic construct
  source 1..75: mol_type = other DNA
  misc_feature 1..75: note = Synthetic
atgaacttgatgcgctcagggaacggaaccttatcgacacccgcacagtttgcaccgtggattttcagccagtag

SEQ ID NO: 1278 - DNA, 27 bp, synthetic construct
  misc_feature 1..27: note = Synthetic
  source 1..27: mol_type = other DNA
atactaaatcagatatcgatgttataa

SEQ ID NO: 1279 - DNA, 228 bp, synthetic construct
  source 1..228: mol_type = other DNA
  misc_feature 1..228: note = Synthetic
acgcaccccccacccacgccccttccggcaccgggaagggctcgcaccgccggccgggccatgaacgcgcactttgccaacgaggtccaatacgatctcacccgggacccgagcagccccgcctcgctgattcacgtcatcatctccagcgagtgcctggcggcggcgggggtcccgctgtccgccctcgtgcgcggccgcgactcggtccgcactagcctgaggtaa

SEQ ID NO: 1280 - DNA, 228 bp, synthetic construct
  misc_feature 1..228: note = Synthetic
  source 1..228: mol_type = other DNA
acgcaccccccacccacgccccttccggcaccgggaagggctcgcaccgccggccgggccgccaacgcgcactttgccaacgaggtccaatacgatctcacccgggacccgagcagccccgcctcgctgattcacgtcatcatctccagcgagtgcctggcggcggcgggggtcccgctgtccgccctcgtgcgcggccgcgactcggtccgcactagcctgaggtaa

SEQ ID NO: 1281 - DNA, 207 bp, synthetic construct
  source 1..207: mol_type = other DNA
  misc_feature 1..207: note = Synthetic
atacaacaacagagaagaaacgaacgcacgctggtcgccatggccttgagcatccacgactgcgcgcgcctcacgggccagaccgtgcccaccatgaactacttcctgccgctgcgcaacatctggaaccgcgtccgcgagttcccgcgcgcctccaccaccgccgccggcatcacctgcgactcggtccgcactagcctgaggtaa

SEQ ID NO: 1282 - DNA, 207 bp, synthetic construct
  misc_feature 1..207: note = Synthetic
  source 1..207: mol_type = other DNA
atacaacaacagagaagaaacgaacgcacgctggtcgccgccgccttgagcatccacgactgcgcgcgcctcacgggccagaccgtgcccaccatgaactacttcctgccgctgcgcaacatctggaaccgcgtccgcgagttcccgcgcgcctccaccaccgccgccggcatcacctgcgactcggtccgcactagcctgaggtaa

SEQ ID NO: 1283 - DNA, 99 bp, synthetic construct
  misc_feature 1..99: note = Synthetic
  source 1..99: mol_type = other DNA
atgaatcgtccctttgtgtacttcgttgttttcaaccacgcgaacaatttcgaaaaaagctccaaggccatcgactcggtccgcactagcctgaggtaa

SEQ ID NO: 1284 - DNA, 24 bp, synthetic construct
  misc_feature 1..24: note = Synthetic
  source 1..24: mol_type = other DNA
atggtgaaacgccgtcattgttag

SEQ ID NO: 1285 - DNA, 36 bp, synthetic construct
  source 1..36: mol_type = other DNA
  misc_feature 1..36: note = Synthetic
atgccatcttacgcgactcggtccgcactagcctga

SEQ ID NO: 1286 - DNA, 66 bp, synthetic construct
  source 1..66: mol_type = other DNA
  misc_feature 1..66: note = Synthetic
acgggggcacatctgttgcggtttcggaaaaagaggagggtatggctgacgtcagtggacaaataa

SEQ ID NO: 1287 - DNA, 135 bp, synthetic construct
  misc_feature 1..135: note = Synthetic
  source 1..135: mol_type = other DNA
acgactctcaacgagcgcatcagcaacaagctcgaacagagcgccagcgcctccgcgaccgcgaactgcaacgtgagtatcggcaacatttacttcgggcgcaatcacgactcggtccgcactagcctgaggtaa

SEQ ID NO: 1288 - DNA, 51 bp, synthetic construct
  misc_feature 1..51: note = Synthetic
  source 1..51: mol_type = other DNA
ctggccgccctggcgctgttcctcgtgtgggtcttaattgtggcactttaa

SEQ ID NO: 1289 - DNA, 228 bp, synthetic construct
  source 1..228: mol_type = other DNA
  misc_feature 1..228: note = Synthetic
acgcagcttacgggtttcatactgctctactctgcattgcaagagattaaagtacccatcatggattcagtgtatgtagacatagatgctgacagcgcgtttctgaaggcgttgcagcaagcataccccatgtttgaggtggaaccaaagcaggtcacgccaaatgaccatgcaaacgctagagcattttcgcatctagccgactcggtccgcactagcctgaggtaa

SEQ ID NO: 1290 - DNA, 207 bp, synthetic construct
  misc_feature 1..207: note = Synthetic
  source 1..207: mol_type = other DNA
ctgctctactctgcattgcaagagattaaagtacccatcgccgattcagtgtatgtagacatagatgctgacagcgcgtttctgaaggcgttgcagcaagcataccccatgtttgaggtggaaccaaagcaggtcacgccaaatgaccatgcaaacgctagagcattttcgcatctagccgactcggtccgcactagcctgaggtaa

SEQ ID NO: 1291 - DNA, 204 bp, synthetic construct
  misc_feature 1..204: note = Synthetic
  source 1..204: mol_type = other DNA
ctgtccgccccgcgaacccccgcatcgtgccctgtttcgtctatgcttaggactgtgggtctcgagctacctggttcgacggcccatgacgatttagaatacaccgagccattcctttatttccccccatccccggtcgcttatgcgtgtcaaacactaccaataaagataatctgccaatcgcaccgactcggtccgcactag

SEQ ID NO: 1292 - DNA, 228 bp, synthetic construct
  source 1..228: mol_type = other DNA
  misc_feature 1..228: note = Synthetic
acgctggcttacgggtccaaagagttcggcttccgtcaacaagtgctggaagataccattcagccagctattgattccggcaagggtctgatgttcactcagccgaatcaggctgctggatacatggctaagctgatttgggaatctgtgagcgtgacggtggtagctgcagttgaagcaatgaactggcttaagtctgccgactcggtccgcactagcctgaggtaa

SEQ ID NO: 1293 - DNA, 228 bp, synthetic construct
  misc_feature 1..228: note = Synthetic
  source 1..228: mol_type = other DNA
acgctggcttacgggtccaaagagttcggcttccgtcaacaagtgctggaagataccattcagccagctattgattccggcaagggtctgatgttcactcagccgaatcaggctgctggatacatggctaagctgatttgggaatctgtgagcgtgacggtggtagctgcagttgaagcagccaactggcttaagtctgccgactcggtccgcactagcctgaggtaa

SEQ ID NO: 1294 - DNA, 144 bp, synthetic construct
  misc_feature 1..144: note = Synthetic
  source 1..144: mol_type = other DNA
ctggaacagttcctgggcttcagcaaccaggtctacatggccatctactacgtgcacacgctgctttacaacagcatgacctccgagtccaagagtatcgagaacgacttccagcgccgcttggtgcggctgctgcgctcgtag

SEQ ID NO: 1295 - DNA, 27 bp, synthetic construct
  source 1..27: mol_type = other DNA
  misc_feature 1..27: note = Synthetic
aggttcacaatcagatcgtatctttaa

SEQ ID NO: 1296 - DNA, 72 bp, synthetic construct
  misc_feature 1..72: note = Synthetic
  source 1..72: mol_type = other DNA
atgaatataagtatccagctatcacagatgggaagaagccgggcatcactctcgcgactcggtccgcactag

SEQ ID NO: 1297 - DNA, 153 bp, synthetic construct
  misc_feature 1..153: note = Synthetic
  source 1..153: mol_type = other DNA
atggactctgacaagattgtcttcaaagtccataatcagttggtgtctgtaaagccagaggtgattgttgatcaatatgagtacaaatatcctgctatcagagatcagaagaaacctagcataactctggcgactcggtccgcactagcctga

SEQ ID NO: 1298 - DNA, 123 bp, synthetic construct
  source 1..123: mol_type = other DNA
  misc_feature 1..123: note = Synthetic
ctggcgacggttccggggtcaatgattgcgataccgtcaatactgttagtgcttcctgcatcgcctgcaaatttgacgccatcatcattacttgattttccgactcggtccgcactagcctga

SEQ ID NO: 1299 - DNA, 123 bp, synthetic construct
  source 1..123: mol_type = other DNA
  misc_feature 1..123: note = Synthetic
ctggcgacggttccggggtcaatgattgcggccccgtcaatactgttagtgcttcctgcatcgcctgcaaatttgacgccatcatcattacttgattttccgactcggtccgcactagcctga

SEQ ID NO: 1300 - DNA, 90 bp, synthetic construct
  source 1..90: mol_type = other DNA
  misc_feature 1..90: note = Synthetic
gtgtctgacctgaaaaaatatattgcagagctggaagtgcagaccggcatgacacagcgacgcaggggacctgcaggattttatgtatga

SEQ ID NO: 1301 - DNA, 18 bp, synthetic construct
  misc_feature 1..18: note = Synthetic
  source 1..18: mol_type = other DNA
atggatgccccctcttga

SEQ ID NO: 1302 - DNA, 78 bp, synthetic construct
  misc_feature 1..78: note = Synthetic
  source 1..78: mol_type = other DNA
atatcaactcgttcaataggcctacacgtatcgtggcgcatggggacgttcgactcggtccgcactagcctgaggtaa

SEQ ID NO: 1303 - DNA, 168 bp, synthetic construct
  source 1..168: mol_type = other DNA
  misc_feature 1..168: note = Synthetic
atggcgtccatatttgcagaatatgacaagctgcttgactctcaaaccaagtgtaacaagggggcttcccctgcagaacgaggcgggaccattaaagttgaaatcccggtattcatctgtaacaccaacgacccagagaccgactcggtccgcactagcctgaggtaa

SEQ ID NO: 1304 - DNA, 48 bp, synthetic construct
  misc_feature 1..48: note = Synthetic
  source 1..48: mol_type = other DNA
atggctgagtttttgctgctggaggacacagcacacggagctctgtaa

SEQ ID NO: 1305 - DNA, 168 bp, synthetic construct
  source 1..168: mol_type = other DNA
  misc_feature 1..168: note = Synthetic
atggataagaaaagtttgtataaatacttactactacgttcaactggagatatgcacagagccaaatctcccactataatgacaagagtaacaaataatgtgtatttgggaaattataaaaatgctatggatgcaccatccgactcggtccgcactagcctgaggtaa

SEQ ID NO: 1306 - DNA, 66 bp, synthetic construct
  source 1..66: mol_type = other DNA
  misc_feature 1..66: note = Synthetic
atggagatgttagtatacagaataaaaattttagccgatgataatatttgtcgttgtagtttttaa

SEQ ID NO: 1307 - DNA, 114 bp, synthetic construct
  misc_feature 1..114: note = Synthetic
  source 1..114: mol_type = other DNA
ttggccactttcaccgtgcgggtgatcacttccttcgccgtcaccgccttaccgatactgctgacccagccacggaacacatcgaccgtgccgttcgggaagcggattttatag

SEQ ID NO: 1308 - DNA, 114 bp, synthetic construct
  source 1..114: mol_type = other DNA
  misc_feature 1..114: note = Synthetic
ttggtgactttcaccgtgcgggtgatcacttccttcgccgtcaccgccttaccgatactgctgacccagccacggaacacatcgaccgtgccgttcgggaagcggattttatag

SEQ ID NO: 1309 - DNA, 168 bp, synthetic construct
  source 1..168: mol_type = other DNA
  misc_feature 1..168: note = Synthetic
atggctgcatccaaaatgaatcccgttggcaacctgctctccacagtctcctcaaccgttggatctcttctacaaaacccctctgttgaagaaaaggaaatggattctgaccgtgttgctgcctctactacaaccaatgccgactcggtccgcactagcctgaggtaa

SEQ ID NO: 1310 - DNA, 171 bp, synthetic construct
  source 1..171: mol_type = other DNA
  misc_feature 1..171: note = Synthetic
atagccgctgcatccaaaatgaatcccgttggcaacctgctctccacagtctcctcaaccgttggatctcttctacaaaacccctctgttgaagaaaaggaaatggattctgaccgtgttgctgcctctactacaaccaatgccgactcggtccgcactagcctgaggtaa

SEQ ID NO: 1311 - DNA, 138 bp, synthetic construct
  source 1..138: mol_type = other DNA
  misc_feature 1..138: note = Synthetic
agggagacgtttgagtccaaacagctaatttctacctatcagagggtggtcaccgcgaccaagactcaatttccaaaaatcaactacaagcagctagagcgggtggaggagctcccgactcggtccgcactagcctga

SEQ ID NO: 1312 - DNA, 69 bp, synthetic construct
  source 1..69: mol_type = other DNA
  misc_feature 1..69: note = Synthetic
atggatacaaggaaaatgtcatgtttgataaaatcacatctcgtattagaaaattatgttatggcttaa

SEQ ID NO: 1313 - DNA, 90 bp, synthetic construct
  source 1..90: mol_type = other DNA
  misc_feature 1..90: note = Synthetic
atgtcaatgaagagtatacagaagcagctgcagcaacttgtgcactggtgtcagactgtgcatcaacaattacaaatgagttctgtgtag

SEQ ID NO: 1314 - DNA, 168 bp, synthetic construct
  misc_feature 1..168: note = Synthetic
  source 1..168: mol_type = other DNA
atggataagaaaagtttgtataaatacttactactacgttcaactggagatatgcacagagccaaatctcccactataatgacaagggtaaccaataatgtatatttgggaaattataaaaatgctatggatgcgccatccgactcggtccgcactagcctgaggtaa

SEQ ID NO: 1315 - DNA, 168 bp, synthetic construct
  source 1..168: mol_type = other DNA
  misc_feature 1..168: note = Synthetic
atggataagaaaagtttgtataaatacttactactacgttcaactggagatatgcacagagccaaatctcccactataatgacaagggtaaccaataatgtgtatttgggaaattataaaaatgctatggatgcaccatccgactcggtccgcactagcctgaggtaa

SEQ ID NO: 1316 - DNA, 168 bp, synthetic construct
  misc_feature 1..168: note = Synthetic
  source 1..168: mol_type = other DNA
atggataagaaaagtttgtataaatacttactactacgttcaactggagatatgcgcagagccaaatctcccactataatgacaagagtaaccaataatgtgtatttgggaaattataaaaatgctatgaatgcaccatccgactcggtccgcactagcctgaggtaa

SEQ ID NO: 1317 - DNA, 111 bp, synthetic construct
  source 1..111: mol_type = other DNA
  misc_feature 1..111: note = Synthetic
atttctacctatcagagggtggtcaccgcgaccaagactcaatttccaaaaatcaactacaagcagctagagcgggtggaggagctcccgactcggtccgcactagcctga

SEQ ID NO: 1318 - DNA, 36 bp, synthetic construct
  source 1..36: mol_type = other DNA
  misc_feature 1..36: note = Synthetic
atggatatattaaagtcgaataaagtgaacaaataa

SEQ ID NO: 1319 - DNA, 36 bp, synthetic construct
  misc_feature 1..36: note = Synthetic
  source 1..36: mol_type = other DNA
atggatatattaaagtcgaataaagttgaacaataa

SEQ ID NO: 1320 - DNA, 75 bp, synthetic construct
  misc_feature 1..75: note = Synthetic
  source 1..75: mol_type = other DNA
atggcgatcttaagcgcctctgtagggaagccaggaatgtccaggaggtaccccttccgctcggaagggatctga

SEQ ID NO: 1321 - DNA, 183 bp, synthetic construct
  misc_feature 1..183: note = Synthetic
  source 1..183: mol_type = other DNA
atgggtcacgtttatcttcaggctagcaccggatatggacttgctcggataaccaacgttaatggggtggagtctaaattacccaacgcgggtgttataaacgccacattccaccccggcgggcccatatacgatctcgcgttgggtgttggggaatcaaatgaacgactcggtccgcactag

SEQ ID NO: 1322 - DNA, 54 bp, synthetic construct
  source 1..54: mol_type = other DNA
  misc_feature 1..54: note = Synthetic
ataagtcttctaaatattgtattaattatgaaaaactatgctatgcgattatga

SEQ ID NO: 1323 - DNA, 84 bp, synthetic construct
  misc_feature 1..84: note = Synthetic
  source 1..84: mol_type = other DNA
ataactatgtttaataataattcatcaacgaatatcgataacatgtgtcatttatacgactcggtccgcactagcctgaggtaa

SEQ ID NO: 1324 - DNA, 168 bp, synthetic construct
  source 1..168: mol_type = other DNA
  misc_feature 1..168: note = Synthetic
atgaagattgagggacaggaggaatttgacatccccttcagagtgtggaggaagtttgcagcccgccggggcctgcagtaccagagctgggaagaggggagcgaagtgctgctgacagaaaacatggacagagacctggtcgactcggtccgcactagcctgaggtaa

SEQ ID NO: 1325 - DNA, 162 bp, synthetic construct
  misc_feature 1..162: note = Synthetic
  source 1..162: mol_type = other DNA
attgagggacaggaggaatttgacatccccttcagagtgtggaggaagtttgcagcccgccggggcctgcagtaccagagctgggaagaggggagcgaagtgctgctgacagaaaacatggacagagacctggtcgactcggtccgcactagcctgaggtaa

SEQ ID NO: 1326 - DNA, 168 bp, synthetic construct
  source 1..168: mol_type = other DNA
  misc_feature 1..168: note = Synthetic
atggtcatgttctcccaggaccacgtccagatcgtctacggctccacacgcatctgcaagtccctggccccggccaacaagagaaagacccatcgcaccatcgtggtagcgccgcggcggggttttttgcgtattccccccgactcggtccgcactagcctgaggtaa

SEQ ID NO: 1327 - DNA, 162 bp, synthetic construct
  source 1..162: mol_type = other DNA
  misc_feature 1..162: note = Synthetic
atgttctcccaggaccacgtccagatcgtctacggctccacacgcatctgcaagtccctggccccggccaacaagagaaagacccatcgcaccatcgtggtagcgccgcggcggggttttttgcgtattccccccgactcggtccgcactagcctgaggtaa

SEQ ID NO: 1328 - DNA, 222 bp, synthetic construct
  misc_feature 1..222: note = Synthetic
  source 1..222: mol_type = other DNA
atcaaggctgtctacaattttgccacctgtgggatattcgcattgatcagtttcctacttctggctggcaggtcctgtggcatgtacggtcttaagggacccgacatttacaaaggagtttaccaatttaagtcagtggagtttgatatgtcacatctgaacctgaccatgcccaacgcatgttcagccaacaacgactcggtccgcactagcctgaggtaa

SEQ ID NO: 1329 - DNA, 222 bp, synthetic construct
  source 1..222: mol_type = other DNA
  misc_feature 1..222: note = Synthetic
atcaaggctgtctacaattttgccacctgtgggatattcgcattgatcagtttcctacttgccgctggcaggtcctgtggcatgtacggtcttaagggacccgacatttacaaaggagtttaccaatttaagtcagtggagtttgatatgtcacatctgaacctgaccatgcccaacgcatgttcagccaacaacgactcggtccgcactagcctgaggtaa

SEQ ID NO: 1330 - DNA, 66 bp, synthetic construct
  source 1..66: mol_type = other DNA
  misc_feature 1..66: note = Synthetic
atgtatcgagctgtggtggaattccttagaggcactctgatcgtcaaccgggacagctacttttaa

SEQ ID NO: 1331 - DNA, 78 bp, synthetic construct
  source 1..78: mol_type = other DNA
  misc_feature 1..78: note = Synthetic
gtgaatgacgctcagatggggaagctatctaaaacgctgggagatccttgtgatttctccaatcattcgagagcctaa

SEQ ID NO: 1332 - DNA, 12 bp, synthetic construct
  source 1..12: mol_type = other DNA
  misc_feature 1..12: note = Synthetic
gtgaaaagctag

SEQ ID NO: 1333 - DNA, 183 bp, synthetic construct
  misc_feature 1..183: note = Synthetic
  source 1..183: mol_type = other DNA
gtggcttgctgcagtatgaatctacggctgttgtactggagacctgtcgtgcaatggcaggtgcgcaactgcgataacatctgctatatctgtcgccgcgggctgggaaagggctgcttgcgaccccagtgcgagatcgactgcgccttctgcctcgactcggtccgcactagcctgaggtaa

SEQ ID NO: 1334 - DNA, 105 bp, synthetic construct
  source 1..105: mol_type = other DNA
  misc_feature 1..105: note = Synthetic
atctgctatatctgtcgccgcgggctgggaaagggctgcttgcgaccccagtgcgagatcgactgcgccttctgcctcgactcggtccgcactagcctgaggtaa

SEQ ID NO: 1335 - DNA, 168 bp, synthetic construct
  misc_feature 1..168: note = Synthetic
  source 1..168: mol_type = other DNA
atggccaccccatcgatgatgccccaatgggcatacatgcacatcgccggacaggatgcttcggagtacctcagtccgggtctggtgcagttcgcccgtgcaacagacacctacttcagtatggggaacaaatttagaaacgactcggtccgcactagcctgaggtaa

SEQ ID NO: 1336 - DNA, 60 bp, synthetic construct
  misc_feature 1..60: note = Synthetic
  source 1..60: mol_type = other DNA
acgcttaacaaccagatcaaagaaaaaacagacagcgtcaatggcagagcaaaaatgtaa

SEQ ID NO: 1337 - DNA, 204 bp, synthetic construct
  misc_feature 1..204: note = Synthetic
  source 1..204: mol_type = other DNA
aagaaaaaacagacagcgtcaatggcagagcaaaaatgtaacacctctacaatggatgccgacaagattgtattcaaagtcaataatcaggtggtctctttgaagcctgagattatcgtggatcaatatgagtacaagtaccctgccatcaaagatttgaaaaagccctgtataactctagcgactcggtccgcactagcctga

SEQ ID NO: 1338 - DNA, 39 bp, synthetic construct
  misc_feature 1..39: note = Synthetic
  source 1..39: mol_type = other DNA
attgtattaattatgaaaaactgccctatgcgattatga

SEQ ID NO: 1339 - DNA, 144 bp, synthetic construct
  source 1..144: mol_type = other DNA
  misc_feature 1..144: note = Synthetic
atgatgtcgactcggttaatgccaatgagtttgaccctgatacaggatacctggattttaaaaataactatccaggggcactcaatacaaataccgctaggacattcttcctcaatgccgccgactcggtccgcactagcctga

SEQ ID NO: 1340 - DNA, 15 bp, synthetic construct
  misc_feature 1..15: note = Synthetic
  source 1..15: mol_type = other DNA
atgattacagcatga

SEQ ID NO: 1341 - DNA, 168 bp, synthetic construct
  misc_feature 1..168: note = Synthetic
  source 1..168: mol_type = other DNA
atgcaccaaaagagaactgcaatgtttcaggacccacaggagcgacccagaaagttaccacagttatgcacagagctgcaaacaactatacatgatataatattagaatgtgtgtactgcaagcaacagttactgcgacgcgactcggtccgcactagcctgaggtaa

SEQ ID NO: 1342 - DNA, 48 bp, synthetic construct
  source 1..48: mol_type = other DNA
  misc_feature 1..48: note = Synthetic
atgattatcttaataagcaagaacaagatcatgaacacgatgatatag

SEQ ID NO: 1343 - DNA, 168 bp, synthetic construct
  misc_feature 1..168: note = Synthetic
  source 1..168: mol_type = other DNA
atggctgttagaaagttatggaagacagtcgtacagctgttttctaaatcgaaatccgaggagtgcaatacagaagccggaacgatggaggtctcctgcttaaagtacggggtgcaaggtttgaatgcggattgcagctacgactcggtccgcactagcctgaggtaa

SEQ ID NO: 1344 - DNA, 132 bp, synthetic construct
  misc_feature 1..132: note = Synthetic
  source 1..132: mol_type = other DNA
ctgttttctaaatcgaaatccgaggagtgcaatacagaagccggaacgatggaggtctcctgcttaaagtacggggtgcaaggtttgaatgcggattgcagctacgactcggtccgcactagcctgaggtaa

SEQ ID NO: 1345 - DNA, 159 bp, synthetic construct
  misc_feature 1..159: note = Synthetic
  source 1..159: mol_type = other DNA
atggaagttttgcttcgggtaacctgcaaaaaagactctcaaatggcaaagagcatgctaaatgaccctgatggagaaggttgcattgcatccgtgtggttccacctgtgtaatctgtgcaaaggcaggaacaaaccgactcggtccgcactagcctga

SEQ ID NO: 1346 - DNA, 198 bp, synthetic construct
  misc_feature 1..198: note = Synthetic
  source 1..198: mol_type = other DNA
ttgcttgctgcacgatctagattagtgagagcagttcagatggaagttttgcttcgggtaacctgcaaaaaagactctcaaatggcaaagagcatgctaaatgaccctgatggagaaggttgcattgcatccgtgtggttccacctgtgtaatctgtgcaaaggcaggaacaaaccgactcggtccgcactagcctga

SEQ ID NO: 1347 - DNA, 168 bp, synthetic construct
  source 1..168: mol_type = other DNA
  misc_feature 1..168: note = Synthetic
atgtactcgttagtatttgttattttgatgtgtataccatttagttttcaaacagtgtatgatgataaatcggtatgcgattctgataataaagaatatatgggaatagaagtttatgtagaagcaacgctagacgaacccgactcggtccgcactagcctgaggtaa

SEQ ID NO: 1348 - DNA, 168 bp, synthetic construct
  misc_feature 1..168: note = Synthetic
  source 1..168: mol_type = other DNA
atgtactcgttagtatttgttattttgatgtgtataccatttagttttcaaacagtgtatgatgataaatcggtatgcgattctgacaataaagaatatatgggaatagaagtttatgtagaagcaacgctagacgaacccgactcggtccgcactagcctgaggtaa

SEQ ID NO: 1349 - DNA, 42 bp, synthetic construct
  source 1..42: mol_type = other DNA
  misc_feature 1..42: note = Synthetic
atgttatcaaacctaattatcttgagcacgataacttattag

SEQ ID NO: 1350 - DNA, 66 bp, synthetic construct
  misc_feature 1..66: note = Synthetic
  source 1..66: mol_type = other DNA
atggacgactttttaacgaaattagaaaattcgacaatgatgcggaagaacaattcggtactatag

SEQ ID NO: 1351 - DNA, 72 bp, synthetic construct
  misc_feature 1..72: note = Synthetic
  source 1..72: mol_type = other DNA
atgccaggttggaggtcctcgcgaccatcgaatcacgttgcgttaattacccgaattggtacggacttctaa

SEQ ID NO: 1352 - DNA, 177 bp, synthetic construct
  misc_feature 1..177: note = Synthetic
  source 1..177: mol_type = other DNA
ctgttcgagatgcagctggcccatatcctgcagcccattcggcaagctttttcccaatgcactattcttcagtacatggatgacatcctcctagcaagcccctcccataaggacctacaactactctcggaggtcacaatggcttccctcgactcggtccgcactagcctgaggtaa

SEQ ID NO: 1353 - DNA, 177 bp, synthetic construct
  source 1..177: mol_type = other DNA
  misc_feature 1..177: note = Synthetic
ctgttcgaggcccagctggcccatatcctgcagcccattcggcaagctttttcccaatgcactattcttcagtacatggatgacatcctcctagcaagcccctcccataaggacctacaactactctcggaggtcacaatggcttccctcgactcggtccgcactagcctgaggtaa

SEQ ID NO: 1354 - DNA, 165 bp, synthetic construct
  source 1..165: mol_type = other DNA
  misc_feature 1..165: note = Synthetic
atggcgaggcgcacggtagatttcaaaaagttgatagagcagctgcgggcacgggccacggacaaagcggaggcgttaaataccgtgagccaattggagatcggcgcggtggatgcccaggacgtgaccgcgagcgccgactcggtccgcactagcctgaggtaa

SEQ ID NO: 1355 - DNA, 159 bp, synthetic construct
  misc_feature 1..159: note = Synthetic
  source 1..159: mol_type = other DNA
aggcgcacggtagatttcaaaaagttgatagagcagctgcgggcacgggccacggacaaagcggaggcgttaaataccgtgagccaattggagatcggcgcggtggatgcccaggacgtgaccgcgagcgccgactcggtccgcactagcctgaggtaa

SEQ ID NO: 1356 - DNA, 45 bp, synthetic construct
  misc_feature 1..45: note = Synthetic
  source 1..45: mol_type = other DNA
atgatggagtcgcgactacatatttcatcatcatccacaaagtaa

SEQ ID NO: 1357 - DNA, 72 bp, synthetic construct
  source 1..72: mol_type = other DNA
  misc_feature 1..72: note = Synthetic
atgtatttggaaaacaattatcaatcgtcaagtttggcgaagagacagaaactgtcgaaaaaatacttttaa

SEQ ID NO: 1358 - DNA, 48 bp, synthetic construct
  misc_feature 1..48: note = Synthetic
  source 1..48: mol_type = other DNA
atgcgatcctgttcaaatttcgactcggtccgcactagcctgaggtaa

SEQ ID NO: 1359 - DNA, 168 bp, synthetic construct
  source 1..168: mol_type = other DNA
  misc_feature 1..168: note = Synthetic
atggccaggttctggaggagatggagaaaaagacccagaatctggagaaggagatacaggtcctacagacctttccgccgttggagccacaggaggtgggggaggaggcaccggagacatttcagacatcgctatgctgccgactcggtccgcactagcctgaggtaa

SEQ ID NO: 1360 - DNA, 30 bp, synthetic construct
  misc_feature 1..30: note = Synthetic
  source 1..30: mol_type = other DNA
atgaactgtaaagtcaaattcgtattataa

SEQ ID NO: 1361 - DNA, 60 bp, synthetic construct
  misc_feature 1..60: note = Synthetic
  source 1..60: mol_type = other DNA
atgtgtaaattcgtcactgagtttacagatagcggttgtcagaataccagtattgtttaa

SEQ ID NO: 1362 - DNA, 150 bp, synthetic construct
  source 1..150: mol_type = other DNA
  misc_feature 1..150: note = Synthetic
attttgatgtatctactaccatttagttttcaaacaagtgaaccagcgtatgataaatcggtatgtgattctgacaataaagaatatatgggaatcgaagtctatgtagaagcaacactagacgactcggtccgcactagcctgaggtaa

SEQ ID NO: 1363 - DNA, 168 bp, synthetic construct
  source 1..168: mol_type = other DNA
  misc_feature 1..168: note = Synthetic
atggggtcacaagtctcaacccaacgatcgggttcccacgaaaattcgaactcagcatcagaaggatctactataaactacaccaccatcaactattacaaggatgcatatgctgccagcgcgggtcgccaagatatgtccgactcggtccgcactagcctgaggtaa

SEQ ID NO: 1364 - DNA, 153 bp, synthetic construct
  source 1..153: mol_type = other DNA
  misc_feature 1..153: note = Synthetic
atcaggttctacgaggaccaatcccagccgcccaaggccgagctgtcggcctgcgtcatcacccagggggcgatcctggcccaattgcaagctatccagaaatcccgccaagaattcttgctgaaaaaggcgactcggtccgcactagcctga

SEQ ID NO: 1365 - DNA, 192 bp, synthetic construct
  misc_feature 1..192: note = Synthetic
  source 1..192: mol_type = other DNA
ttgcgcaagttcgtgcccgaggattaccatcccttcgagatcaggttctacgaggaccaatcccagccgcccaaggccgagctgtcggcctgcgtcatcacccagggggcgatcctggcccaattgcaagccatccagaaatcccgccaagaattcttgctgaaaaaggcgactcggtccgcactagcctga

SEQ ID NO: 1366 - DNA, 15 bp, synthetic construct
  source 1..15: mol_type = other DNA
  misc_feature 1..15: note = Synthetic
atgctatataattga

SEQ ID NO: 1367 - DNA, 63 bp, synthetic construct
  source 1..63: mol_type = other DNA
  misc_feature 1..63: note = Synthetic
gtgaaaacgctgtcctccgcctcctcatccgccggcgtgtcctcgttgctcgaggggatataa

SEQ ID NO: 1368 - DNA, 105 bp, synthetic construct
  source 1..105: mol_type = other DNA
  misc_feature 1..105: note = Synthetic
atgccatccagatcttccgtggcgctgcgcgcccgcgtgctcgtgaaaacgctgtcctccgcctcctcatccgccggcgtgtcctcgttgctcgaggggatataa

SEQ ID NO: 1369 - DNA, 27 bp, synthetic construct
  source 1..27: mol_type = other DNA
  misc_feature 1..27: note = Synthetic
atgaacaagctgcaaatacgagattga

SEQ ID NO: 1370 - DNA, 78 bp, synthetic construct
  source 1..78: mol_type = other DNA
  misc_feature 1..78: note = Synthetic
atgccaagatcgctgagacgtcagttccccgtgacgtgggccctggccagcctgactgacttcctgaaatctttgtaa

SEQ ID NO: 1371 - DNA, 42 bp, synthetic construct
  source 1..42: mol_type = other DNA
  misc_feature 1..42: note = Synthetic
atgaataaacagtgggtgttgcgtcgactcggtccgcactag

SEQ ID NO: 1372 - DNA, 105 bp, synthetic construct
  source 1..105: mol_type = other DNA
  misc_feature 1..105: note = Synthetic
atgcgatcgagatcttccgtggcgctgcgcgcccgcgtgctcgtgaaaacgctgtcctccgcctcctcatccgccggcgtgtcctcgttgctcgaggggatataa

SEQ ID NO: 1373 - DNA, 105 bp, synthetic construct
  misc_feature 1..105: note = Synthetic
  source 1..105: mol_type = other DNA
atgcgctccagatcttccgtggcgctgcgcgcccgcgtgctcgtgaaaacgctgtcctccgcctcctcatccgccggcgtgtcctcgttgctcgaggggatataa

SEQ ID NO: 1374 - DNA, 105 bp, synthetic construct
  source 1..105: mol_type = other DNA
  misc_feature 1..105: note = Synthetic
atgggatccagatcttccgtggcgctgcgcgcccgcgtgctcgtgaaaacgctgtcctccgcctcctcatccgccggcgtgtcctcgttgctcgaggggatataa

SEQ ID NO: 1375 - DNA, 198 bp, synthetic construct
  misc_feature 1..198: note = Synthetic
  source 1..198: mol_type = other DNA
ataaatagtgcgatggcgtttgtgggagaacgcagtagcagccggttgcgacgtgcacgatccttcgtggcaatgccaatggggcgttcccacgattattgtggcctggataacatgcgcggctttaggaatttggtgtttggcgggatcgtcggcggatgtctcttcgggacccggcatcgactcggtccgcactag

SEQ ID NO: 1376 - DNA, 195 bp, synthetic construct
  source 1..195: mol_type = other DNA
  misc_feature 1..195: note = Synthetic
atatctgttttggcattgtcgttagacatggcttataagggatggaactccgattccttttctatgaactcagaactttttaatgaaattcttttatatgcacacttagattcaagtggaatagattctgatgatcttaacacaaatcccaatacacttgaaaatgacgactcggtccgcactagcctgaggtaa

SEQ ID NO: 1377 - DNA, 57 bp, synthetic construct
  misc_feature 1..57: note = Synthetic
  source 1..57: mol_type = other DNA
atggcggctgccacagatacgaatatgaccgactcggtccgcactagcctgaggtaa

SEQ ID NO: 1378 - DNA, 36 bp, synthetic construct
  source 1..36: mol_type = other DNA
  misc_feature 1..36: note = Synthetic
attaaatcacctgatacaattatgttaattagctag

SEQ ID NO: 1379 - DNA, 21 bp, synthetic construct
  source 1..21: mol_type = other DNA
  misc_feature 1..21: note = Synthetic
atgacaaagagattagattag

SEQ ID NO: 1380 - DNA, 93 bp, synthetic construct
  source 1..93: mol_type = other DNA
  misc_feature 1..93: note = Synthetic
atggggcacttgcgctccgtcgagctgttgttgcgagagctctcggatgcgcttaaggattggctgcaccccgtgcatagacgtaaaatttaa

SEQ ID NO: 1381 - DNA, 33 bp, synthetic construct
  misc_feature 1..33: note = Synthetic
  source 1..33: mol_type = other DNA
ctggcaggcctccggaaactgtttgtcgaatag

SEQ ID NO: 1382 - DNA, 168 bp, synthetic construct
  source 1..168: mol_type = other DNA
  misc_feature 1..168: note = Synthetic
atggcagcccagcctctgtacatggagggaatggcctccacccaccaagctaactgtatattcggagaacatgctggatcccagtgcctcagcaactgcgtcatgtacctggcgtccagctattataacagcgaaacccccgactcggtccgcactagcctgaggtaa

SEQ ID NO: 1383 - DNA, 138 bp, synthetic construct
  misc_feature 1..138: note = Synthetic
  source 1..138: mol_type = other DNA
agggaatggcctccacccaccaagctaactgtatattcggagaacatgctggatcccagtgcctcagcaactgcgtcatgtacctggcgtccagctattataacagcgaaacccccgactcggtccgcactagcctga

SEQ ID NO: 1384 - DNA, 138 bp, synthetic construct
  source 1..138: mol_type = other DNA
  misc_feature 1..138: note = Synthetic
atggcctccacccaccaagctaactgtatattcggagaacatgctggatcccagtgcctcagcaactgcgtcatgtacctggcgtccagctattataacagcgaaacccccgactcggtccgcactagcctgaggtaa

SEQ ID NO: 1385 - DNA, 24 bp, synthetic construct
  misc_feature 1..24: note = Synthetic
  source 1..24: mol_type = other DNA
attacagtcatagctagcacgtaa

SEQ ID NO: 1386 - DNA, 69 bp, synthetic construct
  source 1..69: mol_type = other DNA
  misc_feature 1..69: note = Synthetic
atgaatgtacacgcaaccaggaagacacgcaagaagttgatgcactgcgttcgcgtattagagaactag

SEQ ID NO: 1387 - DNA, 69 bp, synthetic construct
  source 1..69: mol_type = other DNA
  misc_feature 1..69: note = Synthetic
atggccagaaacattccgactgcccgccgatcctcttaccgtttccttaatcacatggggggagtatga

SEQ ID NO: 1388 - DNA, 63 bp, synthetic construct
  source 1..63: mol_type = other DNA
  misc_feature 1..63: note = Synthetic
atgtccctcgcagaacctaaaaagaccaaaaaaaaatcttggaccacagttgtcgattcttga

SEQ ID NO: 1389 - DNA, 198 bp, synthetic construct
  misc_feature 1..198: note = Synthetic
  source 1..198: mol_type = other DNA
ataaatagtgcgatggcgtttgtgggagaacgcagtagcaatgggttgcgacgtgcacgatccttcgtggcaatgccaatggggcgttcccacgattattgtggcctggataacatgcgcggctttaggaatttggtgtttggcgggatcgtcggcggatgtctcttcgggacccggcatcgactcggtccgcactag

SEQ ID NO: 1390 - DNA, 33 bp, synthetic construct
  misc_feature 1..33: note = Synthetic
  source 1..33: mol_type = other DNA
atgaaatattggagcttgtggtgcacgccctga

SEQ ID NO: 1391 - DNA, 78 bp, synthetic construct
  misc_feature 1..78: note = Synthetic
  source 1..78: mol_type = other DNA
atgtattcgtacagaagccgctctcctgctggaaaagtgtttcaagttttcgactcggtccgcactagcctgaggtaa

SEQ ID NO: 1392 - DNA, 153 bp, synthetic construct
  source 1..153: mol_type = other DNA
  misc_feature 1..153: note = Synthetic
ttgctccggaagattaccacccctatgaaatcaagttctatgaggaccaatcacagcctccaaaggccgaactttcggcctgcgtcatcacccagggggcaattctggcccaattgcaagccatccaaaaatcccgccaagaatttctactga

SEQ ID NO: 1393 - DNA, 108 bp, synthetic construct
  misc_feature 1..108: note = Synthetic
  source 1..108: mol_type = other DNA
atgtctgtgtgcgatctggagaacttgccttttgcggggtcagtcacaggcgcagaagtacacgaactggatttgcgcgcggcacttgcaactccggcccgacactag

SEQ ID NO: 1394 - DNA, 168 bp, synthetic construct
  misc_feature 1..168: note = Synthetic
  source 1..168: mol_type = other DNA
atggacaaaaaacagctgtaccggcgcctgatcctgaagtccaccagcacgccggtgatgaccaaggacgaactcacgcagatcacgcgcattaccgagtacgtgtacctgggcagctacaacaacgccatggcactggacgactcggtccgcactagcctgaggtaa

SEQ ID NO: 1395 - DNA, 153 bp, synthetic construct
  misc_feature 1..153: note = Synthetic
  source 1..153: mol_type = other DNA
ctgtaccggcgcctgatcctgaagtccaccagcacgccggtgatgaccaaggacgaactcacgcagatcacgcgcattaccgagtacgtgtacctgggcagctacaacaacgccatggcactggacgactcggtccgcactagcctgaggtaa

SEQ ID NO: 1396 - DNA, 123 bp, synthetic construct
  source 1..123: mol_type = other DNA
  misc_feature 1..123: note = Synthetic
ctgcaagagcagatgagcgggcagcgtttcctgatgttggaacccagatttttcgttgctaagtttgtgactctctccctttattgccttgtttgctggtgggttttgaaattgacatggtaa

SEQ ID NO: 1397 - DNA, 72 bp, synthetic construct
  source 1..72: mol_type = other DNA
  misc_feature 1..72: note = Synthetic
ttgccttgtttgctggtgggttttgaaattgacatggtaattaataaacagcgttcgtgctttagagtatga

SEQ ID NO: 1398 - DNA, 15 bp, synthetic construct
  misc_feature 1..15: note = Synthetic
  source 1..15: mol_type = other DNA
ctgctactactttaa

SEQ ID NO: 1399 - DNA, 225 bp, synthetic construct
  source 1..225: mol_type = other DNA
  misc_feature 1..225: note = Synthetic
ctgaaggggatgtcaaattcctcctgtccctcaatcttcatttttatcttctatcaggcctccaaaaagcgcgcgcgggtggatgatggcttcgaccccgtgtacccctacgatgcagacaacgcaccgactgtgcccttcatcaaccctcccttcgtctcttcagatggattccaagaaaagcccctgggggtgttcgactcggtccgcactagcctgaggtaa

SEQ ID NO: 1400 - DNA, 168 bp, synthetic construct
  source 1..168: mol_type = other DNA
  misc_feature 1..168: note = Synthetic
atcaggcctccaaaaagcgcgcgcgggtggatgatggcttcgaccccgtgtacccctacgatgcagacaacgcaccgactgtgcccttcatcaaccctcccttcgtctcttcagatggattccaagaaaagcccctgggggtgttcgactcggtccgcactagcctga

SEQ ID NO: 1401 - DNA, 57 bp, synthetic construct
  source 1..57: mol_type = other DNA
  misc_feature 1..57: note = Synthetic
ctgaaggggatgtcaaattcctcctgtccctcaatcttcattttttatttctattag

SEQ ID NO: 1402 - DNA, 168 bp, synthetic construct
  misc_feature 1..168: note = Synthetic
  source 1..168: mol_type = other DNA
atgtccaaaaagcgcgcgcgggtggatgatggcttcgaccccgtgtatccctacgatgcagacaacgcaccgaccgtgcccttcatcaaccctcccttcgtctcttcagatggattccaagaaaagcccctgggggtgttcgactcggtccgcactagcctgaggtaa

SEQ ID NO: 1403 - DNA, 135 bp, synthetic construct
  misc_feature 1..135: note = Synthetic
  source 1..135: mol_type = other DNA
atggcttcgaccccgtgtatccctacgatgcagacaacgcaccgaccgtgcccttcatcaaccctcccttcgtctcttcagatggattccaagaaaagcccctgggggtgttcgactcggtccgcactagcctga

SEQ ID NO: 1404 - DNA, 48 bp, synthetic construct
  misc_feature 1..48: note = Synthetic
  source 1..48: mol_type = other DNA
atgtcaaattcctcctgtccctcaatcttcattttttatttctattag

SEQ ID NO: 1405 - DNA, 168 bp, synthetic construct
  source 1..168: mol_type = other DNA
  misc_feature 1..168: note = Synthetic
attaggcctccaaaaagcgcgcgcgggtggatgatggcttcgaccccgtgtatccctacgatgcagacaacgcaccgaccgtgcccttcatcaaccctcccttcgtctcttcagatggattccaagaaaagcccctgggggtgttcgactcggtccgcactagcctga

SEQ ID NO: 1406 - DNA, 168 bp, synthetic construct
  misc_feature 1..168: note = Synthetic
  source 1..168: mol_type = other DNA
atgagcaaggagattcccaccccttacatgtggagctatcagccccagatgggcctggccgcgggcgcctcccaagactactccacacgcatgaactggctcagtgccggcccctcgatgatatcacgggtcaacggggtcgactcggtccgcactagcctgaggtaa

SEQ ID NO: 1407 - DNA, 162 bp, synthetic construct
  misc_feature 1..162: note = Synthetic
  source 1..162: mol_type = other DNA
aaggagattcccaccccttacatgtggagctatcagccccagatgggcctggccgcgggcgcctcccaagactactccacacgcatgaactggctcagtgccggcccctcgatgatatcacgggtcaacggggtcgactcggtccgcactagcctgaggtaa

SEQ ID NO: 1408 - DNA, 27 bp, synthetic construct
  misc_feature 1..27: note = Synthetic
  source 1..27: mol_type = other DNA
atggtgcctattttatggatggattaa

SEQ ID NO: 1409 - DNA, 12 bp, synthetic construct
  misc_feature 1..12: note = Synthetic
  source 1..12: mol_type = other DNA
atgggaagttaa

SEQ ID NO: 1410 - DNA, 180 bp, synthetic construct
  source 1..180: mol_type = other DNA
  misc_feature 1..180: note = Synthetic
ttgggtaaaacagatttctcgaatatacgggcaaagttagaatccccggtaactaccatagtgggatatcatccagcggccagagaccaccaattcgagaaagatcgatcatttgaaattatcaacgttttactggaattagacaacaagacacctacgactcggtccgcactagcctga

SEQ ID NO: 1411 - DNA, 57 bp, synthetic construct
  source 1..57: mol_type = other DNA
  misc_feature 1..57: note = Synthetic
atggcgatcccactggtcttctggacccataaccgaaggctcatcagcgcactctaa

SEQ ID NO: 1412 - DNA, 42 bp, synthetic construct
  source 1..42: mol_type = other DNA
  misc_feature 1..42: note = Synthetic
atgaaagaaatagaaacttggatttttaatagagtgaagtga

SEQ ID NO: 1413 - DNA, 24 bp, synthetic construct
  misc_feature 1..24: note = Synthetic
  source 1..24: mol_type = other DNA
atgcaaattgtaatagagaaataa

SEQ ID NO: 1414 - DNA, 225 bp, synthetic construct
  source 1..225: mol_type = other DNA
  misc_feature 1..225: note = Synthetic
ctgaaggggatgtcaaattcctcctgtccctcaatcttcatttttatcttctatcagatgtccaaaaagcgcgcgcgggtggatgatggcttcgaccccgtgtacccctacgatgcagacaacgcaccgactgtgcccttcatcaaccctcccttcgtctcttcagatggattccaagaaaagcccctgggggtgttcgactcggtccgcactagcctgaggtaa

SEQ ID NO: 1415 - DNA, 135 bp, synthetic construct
  misc_feature 1..135: note = Synthetic
  source 1..135: mol_type = other DNA
atggcttcgaccccgtgtacccctacgatgcagacaacgcaccgactgtgcccttcatcaaccctcccttcgtctcttcagatggattccaagaaaagcccctgggggtgttcgactcggtccgcactagcctga

SEQ ID NO: 1416 - DNA, 42 bp, synthetic construct
  source 1..42: mol_type = other DNA
  misc_feature 1..42: note = Synthetic
ctggtggaacaagcagtgtgtacattgaagtgttgcatttga

SEQ ID NO: 1417 - DNA, 42 bp, synthetic construct
  source 1..42: mol_type = other DNA
  misc_feature 1..42: note = Synthetic
ctgggaacagatgtatactccaggaggggaagtgaagaatga

SEQ ID NO: 1418 - DNA, 45 bp, synthetic construct
  source 1..45: mol_type = other DNA
  misc_feature 1..45: note = Synthetic
atggccggaacagatgtatactccaggaggggaagtgaagaatga

SEQ ID NO: 1419 - DNA, 21 bp, synthetic construct
  misc_feature 1..21: note = Synthetic
  source 1..21: mol_type = other DNA
atggacagaggttatctctaa

SEQ ID NO: 1420 - DNA, 165 bp, synthetic construct
  misc_feature 1..165: note = Synthetic
  source 1..165: mol_type = other DNA
atgtgtcgccgctcacaaagtcacgagcgcaaacgagccaaaccccctgaccggaaaaagactgtccagctgccccctcacgaggagtggcgtaacagaggtggcacagaccgcgggcagaactccaaagatggaggagtttgtgcccgactcggtccgcactag

SEQ ID NO: 1421 - DNA, 111 bp, synthetic construct
  source 1..111: mol_type = other DNA
  misc_feature 1..111: note = Synthetic
ttgctcaccactatagctttcacctcaagtaagtacagatcgccgatggtgacaggagcaagcgggactcgtactggtctacctcccctggtggtagcactacaaaattag

SEQ ID NO: 1422 - DNA, 168 bp, synthetic construct
  source 1..168: mol_type = other DNA
  misc_feature 1..168: note = Synthetic
atggctgaaaaagggaaaacaaatagttcatattggtctacaacccgaaatgacaattccacggtaaacacacacattaatacaccagcaggaaggacacacatctggctactgattgcaacaacaatgcatacagtattcgactcggtccgcactagcctgaggtaa

SEQ ID NO: 1423 - DNA, 27 bp, synthetic construct
  misc_feature 1..27: note = Synthetic
  source 1..27: mol_type = other DNA
gtgttagcggttttgctgtttatgtga

SEQ ID NO: 1424 - DNA, 21 bp, synthetic construct
  misc_feature 1..21: note = Synthetic
  source 1..21: mol_type = other DNA
atgattcagtgccgagactag

SEQ ID NO: 1425 - DNA, 195 bp, synthetic construct
  misc_feature 1..195: note = Synthetic
  source 1..195: mol_type = other DNA
attcaacgggacacaatagtgggcgtggcaatggcttgctatatccaccccggtaaggcagccagccaggcaccatacagcttctacgactgcaaagaagagagctggcacgtggggctcttccagatcaaacacggacctggaggggtctgtacaccaccttgccacgactcggtccgcactagcctgaggtaa

SEQ ID NO: 1426 - DNA, 144 bp, synthetic construct
  misc_feature 1..144: note = Synthetic
  source 1..144: mol_type = other DNA
acgtcttcaaccgcttccctgagaaccagatcctcatccgcccgccggcgcccacaattaccaccgtcagtgaaaacgttcctgctctcacagatcacgggaccctgccgttacgcagcagtatccggggagtccagcgcgtga

SEQ ID NO: 1427 - DNA, 33 bp, synthetic construct
  misc_feature 1..33: note = Synthetic
  source 1..33: mol_type = other DNA
aagttgtttttaatttttgccgagagaccgtga

SEQ ID NO: 1428 - DNA, 120 bp, synthetic construct
  misc_feature 1..120: note = Synthetic
  source 1..120: mol_type = other DNA
atgaagaggaaggatttggaggcgcgaggaaaagcgccagggagggatttttccaccccgttctggggaagagaaggtaggagaaaggacaaggaaacgactcggtccgcactagcctga

SEQ ID NO: 1429 - DNA, 111 bp, synthetic construct
  misc_feature 1..111: note = Synthetic
  source 1..111: mol_type = other DNA
ttgctcaccactatagctttcacctcaagtaagtacagatcatggatggtgacaggagcaagcgggactcgtactggtctacctcccctggtggtagcactacaaaattag

SEQ ID NO: 1430 - DNA, 195 bp, synthetic construct
  misc_feature 1..195: note = Synthetic
  source 1..195: mol_type = other DNA
atgcatgtctatatgccagtcaacacggagaggaattctacaccaacaagattgtcccactcattgagcgggcaattgaacttgaaggtctacacattgaggtcccggaattccatcaagctgttgcagcttacaacgggtacttcaatggtactgagggccaaccaagccacgactcggtccgcactagcctga

SEQ ID NO: 1431 - DNA, 117 bp, synthetic construct
  source 1..117: mol_type = other DNA
  misc_feature 1..117: note = Synthetic
ctgagtgtgacttactgcgaagaggcagacaaatgggcaactgcaacggggcatccaagtctaaccagccagactcctcaagagccacacagccagccgcagaatttaggagggtag

SEQ ID NO: 1432 - DNA, 168 bp, synthetic construct
  misc_feature 1..168: note = Synthetic
  source 1..168: mol_type = other DNA
atgggcaactgcaacggggcatccaagtctaaccagccagactcctcaagagccacacagccagccgcagaatttaggagggtagctcacagcagtctatatggtagatataactgtaagtgctgctggtttgctgataccgactcggtccgcactagcctgaggtaa

SEQ ID NO: 1433 - DNA, 120 bp, synthetic construct
  misc_feature 1..120: note = Synthetic
  source 1..120: mol_type = other DNA
atacctggtctctctcatctgcttctgctttcgccaccatcatttccagcttttgtgaaagggatgcggctaacgtatgaaattcttcgtctgtttctactggtattggcacaaacctga

SEQ ID NO: 1434 - DNA, 165 bp, synthetic construct
  source 1..165: mol_type = other DNA
  misc_feature 1..165: note = Synthetic
attgggaaagaagcaactataccagacataaagctggagctgcaagaccttgtcctgcccattgacctgcattgtgacgaagagttgacagaagagcagtcagaaaacctgtcagaatctacagtagcagaggtggacgactcggtccgcactagcctgaggtaa

SEQ ID NO: 1435 - DNA, 36 bp, synthetic construct
  misc_feature 1..36: note = Synthetic
  source 1..36: mol_type = other DNA
atgccattgggaaagaagcaactataccagacataa

SEQ ID NO: 1436 - DNA, 147 bp, synthetic construct
  source 1..147: mol_type = other DNA
  misc_feature 1..147: note = Synthetic
ataccagacataaagctggagctgcaagaccttgtcctgcccattgacctgcattgtgacgaagagttgacagaagagcagtcagaaaacctgtcagaatctacagtagcagaggtggacgactcggtccgcactagcctgaggtaa

SEQ ID NO: 1437 - DNA, 27 bp, synthetic construct
  source 1..27: mol_type = other DNA
  misc_feature 1..27: note = Synthetic
atgaccactatcaccagcaacaagtaa

SEQ ID NO: 1438 - DNA, 195 bp, synthetic construct
  source 1..195: mol_type = other DNA
  misc_feature 1..195: note = Synthetic
ttgccgtctcttcgcgcgtcactcttcatggcttggcgcagcgggctttgcgagaccgattccagaactttgaagcagttcttgcaagaggaatgcatgtggaagctggtcggcaagagccggaaacaccgcgagtatcgggccgtcgcttgccgttcgacgatcttcgactcggtccgcactagcctgaggtaa

SEQ ID NO: 1439 - DNA, 195 bp, synthetic construct
  source 1..195: mol_type = other DNA
  misc_feature 1..195: note = Synthetic
ttgccgtctcttcgcgcgtcactcttcgccgcttggcgcagcgggctttgcgagaccgattccagaactttgaagcagttcttgcaagaggaatgcatgtggaagctggtcggcaagagccggaaacaccgcgagtatcgggccgtcgcttgccgttcgacgatcttcgactcggtccgcactagcctgaggtaa

SEQ ID NO: 1440 - DNA, 150 bp, synthetic construct
  misc_feature 1..150: note = Synthetic
  source 1..150: mol_type = other DNA
acgaacggaatgccgggacataacgcgccgtataacacgccgcgccttcgcggcgtacttgcgacacgcccggggtttcgaagggtccccgggcgatacttagcccctccgtatagggcggcggcagcgactcggtccgcactagcctga

SEQ ID NO: 1441 - DNA, 18 bp, synthetic construct
  misc_feature 1..18: note = Synthetic
  source 1..18: mol_type = other DNA
atggaaagttatatgtaa

SEQ ID NO: 1442 - DNA, 33 bp, synthetic construct
  source 1..33: mol_type = other DNA
  misc_feature 1..33: note = Synthetic
atggaaaagacttccaaacttaatcactcctag

SEQ ID NO: 1443 - DNA, 135 bp, synthetic construct
  misc_feature 1..135: note = Synthetic
  source 1..135: mol_type = other DNA
ttgttccgccggtcgtctctaagctcttcctctgcattgcaagagtttaccactcatcatgtcgaaagtctttgtagacatcgaggccgagagcccgtttttaaaatcactacaaagagcatttccagcatttga

SEQ ID NO: 1444 - DNA, 168 bp, synthetic construct
  misc_feature 1..168: note = Synthetic
  source 1..168: mol_type = other DNA
atgtcgaaagtctttgtagacatcgaggccgagagcccgtttttaaaatcactacaaagagcatttccagcatttgaagtggaagcacagcaggtcacgccgaacgaccatgctaatgctagagcattctcgcatctggccgactcggtccgcactagcctgaggtaa

SEQ ID NO: 1445 - DNA, 195 bp, synthetic construct
  source 1..195: mol_type = other DNA
  misc_feature 1..195: note = Synthetic
ctgcattgcaagagtttaccactcatcgcctcgaaagtctttgtagacatcgaggccgagagcccgtttttaaaatcactacaaagagcatttccagcatttgaagtggaagcacagcaggtcacgccgaacgaccatgctaatgctagagcattctcgcatctggccgactcggtccgcactagcctgaggtaa

SEQ ID NO: 1446 - DNA, 30 bp, synthetic construct
  misc_feature 1..30: note = Synthetic
  source 1..30: mol_type = other DNA
atcactacaaagagcatttccagcatttga

SEQ ID NO: 1447 - DNA, 30 bp, synthetic construct
  misc_feature 1..30: note = Synthetic
  source 1..30: mol_type = other DNA
atgatagacggaaatttaaaaaggaattaa

SEQ ID NO: 1448 - DNA, 45 bp, synthetic construct
  misc_feature 1..45: note = Synthetic
  source 1..45: mol_type = other DNA
attaatgtcgaaatgatttttacgactcggtccgcactagcctga

SEQ ID NO: 1449 - DNA, 54 bp, synthetic construct
  source 1..54: mol_type = other DNA
  misc_feature 1..54: note = Synthetic
atgggttcattattaacagtgttgcttttagattgtacctttgctcacagatag

SEQ ID NO: 1450 - DNA, 54 bp, synthetic construct
  source 1..54: mol_type = other DNA
  misc_feature 1..54: note = Synthetic
atggtatcaaatcttattaagaaaaagaacacgatgaagattaacgcgacctag

SEQ ID NO: 1451 - DNA, 48 bp, synthetic construct
  misc_feature 1..48: note = Synthetic
  source 1..48: mol_type = other DNA
atgaaaacgaaaggggatacgggaaaacgtcgactcggtccgcactag

SEQ ID NO: 1452 - DNA, 144 bp, synthetic construct
  source 1..144: mol_type = other DNA
  misc_feature 1..144: note = Synthetic
atgggggggaaactccccgaaaccacatggcaggagggaatcggaattcgcgaatattgtgtggctcctccagtggaccctgcaggaaccctggattattctgaattatcacgtgaatctgacgtaatatgtacagttaaataa

SEQ ID NO: 1453 - DNA, 168 bp, synthetic construct
  misc_feature 1..168: note = Synthetic
  source 1..168: mol_type = other DNA
atgaatccggataaaacaatcgcagtgattacagagactattcctataggtatgcaatttgataaagtatatttgtctacatttaacgtgtggagggaaattctatccaataccacaaaaacactagatatatcatctttcgactcggtccgcactagcctgaggtaa

SEQ ID NO: 1454 - DNA, 117 bp, synthetic construct
  misc_feature 1..117: note = Synthetic
  source 1..117: mol_type = other DNA
atgcaatttgataaagtatatttgtctacatttaacgtgtggagggaaattctatccaataccacaaaaacactagatatatcatctttcgactcggtccgcactagcctgaggtaa

SEQ ID NO: 1455 - DNA, 126 bp, synthetic construct
  misc_feature 1..126: note = Synthetic
  source 1..126: mol_type = other DNA
atgtctaaaaaaccaggaaagtccgctgcaaagcggactgtcaatatgctaaaacgcctggctagcgtgtccccctcaagggggcgaagaactattcggagaatgctacgactcggtccgcactag

SEQ ID NO: 1456 - DNA, 147 bp, synthetic construct
  misc_feature 1..147: note = Synthetic
  source 1..147: mol_type = other DNA
atttcttactccacgccaatccagattatgcttcgaacagagctccttggcgtaagtcaggtcctcagattccataaggcggaggccattgtatctatgaccaccctcaactgctgtctgtggtgtctcagacctgtattggattga

SEQ ID NO: 1457 - DNA, 165 bp, synthetic construct
  source 1..165: mol_type = other DNA
  misc_feature 1..165: note = Synthetic
atgtctgtagtccaaagttcattgatgtccacatttcgaaagacgaaaaattcaatgtatctcgagctcgtttgtctctgtagggtaatcgtttcggagatcttttctgaaattgcgctgtacatttttccaggtgacgactcggtccgcactagcctgaggtaa

SEQ ID NO: 1458 - DNA, 168 bp, synthetic construct
  source 1..168: mol_type = other DNA
  misc_feature 1..168: note = Synthetic
atgcctgtggattttcactatggggtcagggtggacgtgaccctcctgtctaaaatcaggagggtcaatgaacacattaagagtgccactaaaaccggagtagtgcaagtgcacggatcggcttgcacgccaaccctcagcgactcggtccgcactagcctgaggtaa

SEQ ID NO: 1459 - DNA, 129 bp, synthetic construct
  source 1..129: mol_type = other DNA
  misc_feature 1..129: note = Synthetic
atggtcaatgggggaaagctaaaaaaatcccacatcaaaagatatgtgtcagtcagctcgaatcatcaggccagacctaactcctttgcagaattcttgaacaagacttattcgagtgatccaagataa

SEQ ID NO: 1460 - DNA, 150 bp, synthetic construct
  source 1..150: mol_type = other DNA
  misc_feature 1..150: note = Synthetic
atgttcggtccgcctacatcgtcacgccctactggccacctgcccggagcatcagatcacctgggatcccatcgatggacgcgttatcggctcagctctacagttccttatccctcgactcccctccttccccacccagagaacctctaa

SEQ ID NO: 1461 - DNA, 39 bp, synthetic construct
  source 1..39: mol_type = other DNA
  misc_feature 1..39: note = Synthetic
ctgtgttcgtggttggcgatgcggtatcgcgcacaataa

SEQ ID NO: 1462 - DNA, 180 bp, synthetic construct
  source 1..180: mol_type = other DNA
  misc_feature 1..180: note = Synthetic
ctgcagctaaacatggaggaagacatagcctgtgtcaaagacttagtatcaaaatacctagtggacaacgagagattgtcaagacagaagttagcatttcttgtgcagacagagcctaggatgctattaatggaagggttgaaactcttgtccgactcggtccgcactagcctgaggtaa

SEQ ID NO: 1463 - DNA, 120 bp, synthetic construct
  misc_feature 1..120: note = Synthetic
  source 1..120: mol_type = other DNA
gtggacaacgagagattgtcaagacagaagttagcatttcttgtgcagacagagcctaggatgctattaatggaagggttgaaactcttgtccgactcggtccgcactagcctgaggtaa

SEQ ID NO: 1464 - DNA, 168 bp, synthetic construct
  source 1..168: mol_type = other DNA
  misc_feature 1..168: note = Synthetic
atgaggcgcgcggtggaactgcagacagtggcttttcctgagacaccacctccctcttacgaaaccgtgatggcagcggcgccaccctacgtgcctccccgctatttgggtcctacggagggaagaaacagtatccgttacgactcggtccgcactagcctgaggtaa

SEQ ID NO: 1465 - DNA, 117 bp, synthetic construct
  source 1..117: mol_type = other DNA
  misc_feature 1..117: note = Synthetic
atggcgaccagtgttcgtcttattttccttcttccgttagctgtgaagccaggcgcgcggtggaactgcagacagtggcttttcctgagacaccacctccctcttacgaaaccgtga

SEQ ID NO: 1466 - DNA, 156 bp, synthetic construct
  misc_feature 1..156: note = Synthetic
  source 1..156: mol_type = other DNA
gtggaactgcagacagtggcttttcctgagacaccacctccctcttacgaaaccgtgatggcagcggcgccaccctacgtgcctccccgctatttgggtcctacggagggaagaaacagtatccgttacgactcggtccgcactagcctgaggtaa

SEQ ID NO: 1467 - DNA, 63 bp, synthetic construct
  misc_feature 1..63: note = Synthetic
  source 1..63: mol_type = other DNA
ctgcccccctcgaatttcgagagaataagccagcagcaccgcacgccagcagcagaggagtag

SEQ ID NO: 1468 - DNA, 198 bp, synthetic construct
  misc_feature 1..198: note = Synthetic
  source 1..198: mol_type = other DNA
atggaaaaaacatgtaacatccctaaaaaggccaatttcctcaagaaaatgatcaagagctgtaaggatgaagagactcagaagtatccatcagcatctgcgcctccagacgatgatgacatttggatgcccccgcctgagtatgtccccttaacccaggtcaagggcaacgactcggtccgcactagcctgaggtaa

SEQ ID NO: 1469 - DNA, 168 bp, synthetic construct
  source 1..168: mol_type = other DNA
  misc_feature 1..168: note = Synthetic
atgagtaaatcacacgcggcctatatcgattatgccttacgcagaactactaatatgcccgttgaaatgatggggtcagacgtagtacgcctcaaggattatcaacattttgtagcaagagttttcttaggattagacagcgactcggtccgcactagcctgaggtaa

SEQ ID NO: 1470 - DNA, 39 bp, synthetic construct
  source 1..39: mol_type = other DNA
  misc_feature 1..39: note = Synthetic
atgccttacgcagaactactaatatgcccgttgaaatga

SEQ ID NO: 1471 - DNA, 18 bp, synthetic construct
  source 1..18: mol_type = other DNA
  misc_feature 1..18: note = Synthetic
atgatttttaaaacatag

SEQ ID NO: 1472 - DNA, 168 bp, synthetic construct
  misc_feature 1..168: note = Synthetic
  source 1..168: mol_type = other DNA
atgagtaaatcacatgcggcctatatcgattatgccttgcgcagaactactaatatgcctgttgaaatgatgggaacagacgtagtacgcctcaaggattatcaacattttgtagcaagagttttcttaggattagacagcgactcggtccgcactagcctgaggtaa

SEQ ID NO: 1473 - DNA, 51 bp, synthetic construct
  misc_feature 1..51: note = Synthetic
  source 1..51: mol_type = other DNA
ttgttaagtatgaatacggggtacaaaccgactcggtccgcactagcctga

SEQ ID NO: 1474 - DNA, 108 bp, synthetic construct
  misc_feature 1..108: note = Synthetic
  source 1..108: mol_type = other DNA
atatacttggtcatgatactgctgattgccccggcatacagcatcaggtgcataggagtcagcaatagggactttgtggaaggtacgactcggtccgcactagcctga

SEQ ID NO: 1475 - DNA, 15 bp, synthetic construct
  misc_feature 1..15: note = Synthetic
  source 1..15: mol_type = other DNA
ctggcttcgcgttag

SEQ ID NO: 1476 - DNA, 36 bp, synthetic construct
  misc_feature 1..36: note = Synthetic
  source 1..36: mol_type = other DNA
atgataagccgaaagatatacagatttagtaattag

SEQ ID NO: 1477 - DNA, 60 bp, synthetic construct
  misc_feature 1..60: note = Synthetic
  source 1..60: mol_type = other DNA
atgaatctccatctccatctccatctcaatactttgagaatccagaaaacaacacaataa

SEQ ID NO: 1478 - DNA, 36 bp, synthetic construct
  misc_feature 1..36: note = Synthetic
  source 1..36: mol_type = other DNA
atgagttctgtgcagatcatccgttcatctatgtga

SEQ ID NO: 1479 - DNA, 105 bp, synthetic construct
  source 1..105: mol_type = other DNA
  misc_feature 1..105: note = Synthetic
atgcaactcaaagactatcacaagcaacctacaactttgtttatgatgcttctacccttccaagggatggctttaatgcacttagtgatggagttcacagactag

SEQ ID NO: 1480 - DNA, 42 bp, synthetic construct
  source 1..42: mol_type = other DNA
  misc_feature 1..42: note = Synthetic
atgcttccggctcgtataatgtgtggagccgtgagcggataa

SEQ ID NO: 1481 - DNA, 213 bp, synthetic construct
  source 1..213: mol_type = other DNA
  misc_feature 1..213: note = Synthetic
atgtccatgggcgcactcacagacctgggccaaaaccttctctacgccaactccgcccacgcgctagacatgacttttgaggtggatcccatggacgagcccacccttctttatgttttgtttgaagtctttgacgtggtccgtgtgcaccagccgcaccgcggcgtcatcgagaccgtgtacctgcgcacgccccgactcggtccgcactag

SEQ ID NO: 1482 - DNA, 33 bp, synthetic construct
  source 1..33: mol_type = other DNA
  misc_feature 1..33: note = Synthetic
acgatagttacgactcggtccgcactagcctga

SEQ ID NO: 1483 - DNA, 174 bp, synthetic construct
  misc_feature 1..174: note = Synthetic
  source 1..174: mol_type = other DNA
ttgtacatgatggactcctcacctgaaaagacgaatcttgaacttttgtatgagcaagtctgtgagcagggaagggagtttgaggtcgtgttttatccaatgctgccacgattatatgaaatgatgcttccttctttggaggcgcgcgactcggtccgcactagcctgaggtaa

SEQ ID NO: 1484 - DNA, 24 bp, synthetic construct
  source 1..24: mol_type = other DNA
  misc_feature 1..24: note = Synthetic
atgccacgaataaaaaatacttaa

SEQ ID NO: 1485 - DNA, 162 bp, synthetic construct
  source 1..162: mol_type = other DNA
  misc_feature 1..162: note = Synthetic
atgtttctgaagtcgcgtggggtccggtcttgcagggaccggcgcctcttgtcggacgaggaggaagagacttcacagagcagcagctacactctggggtctcaggcctcccagtctatccaggaggaggacgtcgactcggtccgcactagcctgaggtaa

SEQ ID NO: 1486 - DNA, 72 bp, synthetic construct
  source 1..72: mol_type = other DNA
  misc_feature 1..72: note = Synthetic
ataataataagaccaataccgaaacagatagaaatgagacgtcttagagatagacgactcggtccgcactag

SEQ ID NO: 1487 - DNA, 129 bp, synthetic construct
  misc_feature 1..129: note = Synthetic
  source 1..129: mol_type = other DNA
ataaccatgactaaaaaaccaggagggcccggtaaaaaccgggctatcaatatgctgaaacgcggcctaccccgcgtattcccactagtgggagtgaagagggtagtaatgcgactcggtccgcactag

SEQ ID NO: 1488 - DNA, 78 bp, synthetic construct
  source 1..78: mol_type = other DNA
  misc_feature 1..78: note = Synthetic
atgatttcatcattgcattcacaacaggaaaggggacctcgacaagcttatgcatgtgccaagttaacaaagtgctaa

SEQ ID NO: 1489 - DNA, 39 bp, synthetic construct
  misc_feature 1..39: note = Synthetic
  source 1..39: mol_type = other DNA
atgatctttcccggaacgcacatactggtcatcacctag

SEQ ID NO: 1490 - DNA, 168 bp, synthetic construct
  source 1..168: mol_type = other DNA
  misc_feature 1..168: note = Synthetic
atggtagttatacttgacaagagatgttattgtaatcttttaatattgattttgatgatctcggagtgtagtgttgggattctacattatgagaaattgagtaaaattggacttgtcaaaggagtaacaagaaaatacaacgactcggtccgcactagcctgaggtaa

SEQ ID NO: 1491 - DNA, 63 bp, synthetic construct
  source 1..63: mol_type = other DNA
  misc_feature 1..63: note = Synthetic
gtgatcaaatcaaagcggttggcagacctaccaatcatataccacaagactcgacagccgtag

SEQ ID NO: 1492 - DNA, 45 bp, synthetic construct
  misc_feature 1..45: note = Synthetic
  source 1..45: mol_type = other DNA
attgacagctcaacacgagtgcgggcaaccgtaaacacagtttga

SEQ ID NO: 1493 - DNA, 156 bp, synthetic construct
  misc_feature 1..156: note = Synthetic
  source 1..156: mol_type = other DNA
ttgaacgttttttggagagagactactatgtcaaacaaaaaaccaggaagacccggggcaacccgggttgtcaatatgctaaagcgcggcgcatcccgcggaaatccgatatctcggatcaagaggatgttggcgactcggtccgcactagcctga

SEQ ID NO: 1494 - DNA, 129 bp, synthetic construct
  source 1..129: mol_type = other DNA
  misc_feature 1..129: note = Synthetic
atgtttaacaaaaaaccaggaaaacccggggcaacccgggttgtcaatatgctaaagcgcggtgcatcccgcggaaatccgatatctcggatcaagaggatgctcgcgactcggtccgcactagcctga

SEQ ID NO: 1495 - DNA, 129 bp, synthetic construct
  source 1..129: mol_type = other DNA
  misc_feature 1..129: note = Synthetic
atgtctaacaaaaaaccaggaagacccggctcaggccgggttgtcaatatgctaaagcgcggaacgtcccgcggaaatccgctagcgcggataaagaggacgattgcgactcggtccgcactagcctga

SEQ ID NO: 1496 - DNA, 165 bp, synthetic construct
  source 1..165: mol_type = other DNA
  misc_feature 1..165: note = Synthetic
atggactcctcacctgaaaagacgaatcttgaacttttgtatgagcaagtctgtgagcagggaagggagtttgaggtcgtgttttatccaatgctgccacgattatatgaaatgatgcttccttctttggaggcgcgcgactcggtccgcactagcctgaggtaa

SEQ ID NO: 1497 - DNA, 225 bp, synthetic construct
  misc_feature 1..225: note = Synthetic
  source 1..225: mol_type = other DNA
atctcgtttagtatctcagattgtataggcaacgcttctgagtcccatcctttgtacatgatggattcctcacctgaaaagacgaatcttgaacttttgtatgagcgagtctgtgagcagggaagggagtttgaggtcgtgttttatccaatgttgccacgattatatgaaatgatgcttccttctttggaggcgcgcgactcggtccgcactagcctgaggtaa

SEQ ID NO: 1498 - DNA, 75 bp, synthetic construct
  misc_feature 1..75: note = Synthetic
  source 1..75: mol_type = other DNA
atgagcgagtctgtgagcagggaagggagtttgaggtcgtgttttatccaatgttgccacgattatatgaaatga

SEQ ID NO: 1499 - DNA, 165 bp, synthetic construct
  misc_feature 1..165: note = Synthetic
  source 1..165: mol_type = other DNA
atggattcctcacctgaaaagacgaatcttgaacttttgtatgagcgagtctgtgagcagggaagggagtttgaggtcgtgttttatccaatgttgccacgattatatgaaatgatgcttccttctttggaggcgcgcgactcggtccgcactagcctgaggtaa

SEQ ID NO: 1500 - DNA, 87 bp, synthetic construct
  source 1..87: mol_type = other DNA
  misc_feature 1..87: note = Synthetic
ttgaacttttgtatgagcgagtctgtgagcagggaagggagtttgaggtcgtgttttatccaatgttgccacgattatatgaaatga

SEQ ID NO: 1501 - DNA, 99 bp, synthetic construct
  misc_feature 1..99: note = Synthetic
  source 1..99: mol_type = other DNA
atcatagcgttcgaggaggcggatcggattggtaggaggcgtcgtagaatcatgacgagtgatggaagtcgcgactcggtccgcactagcctgaggtaa

SEQ ID NO: 1502 - DNA, 33 bp, synthetic construct
  source 1..33: mol_type = other DNA
  misc_feature 1..33: note = Synthetic
atggtccaatccacccacgtgtcagattgttaa

SEQ ID NO: 1503 - DNA, 81 bp, synthetic construct
  source 1..81: mol_type = other DNA
  misc_feature 1..81: note = Synthetic
atgtccacatcctatatcaaacggaaaacttctagcggcttaaaagatcatactctcatacaactacaatgtagactttaa

SEQ ID NO: 1504 - DNA, 168 bp, synthetic construct
  misc_feature 1..168: note = Synthetic
  source 1..168: mol_type = other DNA
atggatcctcgtccaatcagaacctggatgatgcataacacatctgaagttgaagcagactaccataagattctaactgccggattgtccgtccagcaaggcattgtgagacaaagaatcattcctgtttaccaaatctccgactcggtccgcactagcctgaggtaa

SEQ ID NO: 1505 - DNA, 27 bp, synthetic construct
  misc_feature 1..27: note = Synthetic
  source 1..27: mol_type = other DNA
atcctcgtccaatcagaacctggatga

SEQ ID NO: 1506 - DNA, 138 bp, synthetic construct
  misc_feature 1..138: note = Synthetic
  source 1..138: mol_type = other DNA
atgcataacacatctgaagttgaagcagactaccataagattctaactgccggattgtccgtccagcaaggcattgtgagacaaagaatcattcctgtttaccaaatctccgactcggtccgcactagcctgaggtaa

SEQ ID NO: 1507 - DNA, 225 bp, synthetic construct
  misc_feature 1..225: note = Synthetic
  source 1..225: mol_type = other DNA
attagttctacgagcatcgacacaattatcttgatcgtgtttctttccgggcaagccatggaccaatttataaaacaagatgagactggtgatttaattgagacaggaatgaacgttgcaaatcatttcctatccgcccccattcagggaaccaactcgttgagcaaggccacaatcatccctggcgttgcaccagtcgactcggtccgcactagcctgaggtaa

SEQ ID NO: 1508 - DNA, 225 bp, synthetic construct
  source 1..225: mol_type = other DNA
  misc_feature 1..225: note = Synthetic
attagttctacgagcatcgacacaattatcttgatcgtgtttctttccgggcaagccgccgaccaatttataaaacaagatgagactggtgatttaattgagacaggaatgaacgttgcaaatcatttcctatccgcccccattcagggaaccaactcgttgagcaaggccacaatcatccctggcgttgcaccagtcgactcggtccgcactagcctgaggtaa

SEQ ID NO: 1509 - DNA, 33 bp, synthetic construct
  misc_feature 1..33: note = Synthetic
  source 1..33: mol_type = other DNA
ttgcgagctatatcactatcaggagtgtgttag

SEQ ID NO: 1510 - DNA, 60 bp, synthetic construct
  source 1..60: mol_type = other DNA
  misc_feature 1..60: note = Synthetic
atgaagattcctttgttgctaatactcccacacacctcggaccgcaatgtccagggttag

SEQ ID NO: 1511 - DNA, 123 bp, synthetic construct
  source 1..123: mol_type = other DNA
  misc_feature 1..123: note = Synthetic
agggttagtagtcagcggcatcgtcggtgtgctttgtgggttagcagttataatcatctgcatgttcatttttgcttgctgctacagaaggcttccgactcggtccgcactagcctgaggtaa

SEQ ID NO: 1512 - DNA, 108 bp, synthetic construct
  misc_feature 1..108: note = Synthetic
  source 1..108: mol_type = other DNA
atgcaacggaggacccgtctagtggctactattctaccacaattagatatcaggctaccggttttggaaccaatgagacagagtacttgttcgaggttgacaatttga

SEQ ID NO: 1513 - DNA, 108 bp, synthetic construct
  misc_feature 1..108: note = Synthetic
  source 1..108: mol_type = other DNA
atgcaacgggccacccgtctagtggctactattctaccacaattagatatcaggctaccggttttggaaccaatgagacagagtacttgttcgaggttgacaatttga

SEQ ID NO: 1514 - DNA, 198 bp, synthetic construct
  misc_feature 1..198: note = Synthetic
  source 1..198: mol_type = other DNA
atattcaccattatcgtttcagacccacctcccaaccccgaggggacccgacaggcccgaaggaatagaagaagaaggtggagagagagacagagacagatccattcgattagtgaacggatccttggcacttatctggggccatctgcggagcctgtgcctcttcagctcgactcggtccgcactagcctgaggtaa

SEQ ID NO: 1515 - DNA, 156 bp, synthetic construct
  misc_feature 1..156: note = Synthetic
  source 1..156: mol_type = other DNA
atttggtgttttatgatgtcgcatcaacaggtgcaaatggatttgatcctgatgcagggtatatggacttctgtgttaaaaatgcagaattactcaaccttgctgcagttaggatcttcttcctcaatgccgccgactcggtccgcactagcctga

SEQ ID NO: 1516 - DNA, 141 bp, synthetic construct
  source 1..141: mol_type = other DNA
  misc_feature 1..141: note = Synthetic
atgtcgcatcaacaggtgcaaatggatttgatcctgatgcagggtatatggacttctgtgttaaaaatgcagaattactcaaccttgctgcagttaggatcttcttcctcaatgccgccgactcggtccgcactagcctga

SEQ ID NO: 1517 - DNA, 21 bp, synthetic construct
  misc_feature 1..21: note = Synthetic
  source 1..21: mol_type = other DNA
atgcagaacaacagcatgtaa

SEQ ID NO: 1518 - DNA, 168 bp, synthetic construct
  source 1..168: mol_type = other DNA
  misc_feature 1..168: note = Synthetic
atggttctgcgccagctgtcacgacaagcttcagtgaaagttggtaaaacctggactggaacaaaaaaaagagctcagaggatttttatttttattttagagcttttgctggaattttgtagaggtgaagacagtgtagacgactcggtccgcactagcctgaggtaa

SEQ ID NO: 1519 - DNA, 162 bp, synthetic construct
  misc_feature 1..162: note = Synthetic
  source 1..162: mol_type = other DNA
ctgcgccagctgtcacgacaagcttcagtgaaagttggtaaaacctggactggaacaaaaaaaagagctcagaggatttttatttttattttagagcttttgctggaattttgtagaggtgaagacagtgtagacgactcggtccgcactagcctgaggtaa

SEQ ID NO: 1520 - DNA, 168 bp, synthetic construct
  misc_feature 1..168: note = Synthetic
  source 1..168: mol_type = other DNA
atggccacttttacagatgcggagatagatgacatatttgagaccagtgggactgtcattgacagcataattacggcccagggcaaatcagctgagaccgtcggaagaagcgcgatcccgcagggcaagaccaaagctctcgactcggtccgcactagcctgaggtaa

SEQ ID NO: 1521 - DNA, 15 bp, synthetic construct
  source 1..15: mol_type = other DNA
  misc_feature 1..15: note = Synthetic
atggtggatcgctag

SEQ ID NO: 1522 - DNA, 189 bp, synthetic construct
  source 1..189: mol_type = other DNA
  misc_feature 1..189: note = Synthetic
ctggccgggacaaaaaccaagtggagggtgaggtccagatcgtgtcaactgctacccaaaccttcctggcaacgtgcatcaatggggtatgctggactgtctaccacggggccggaacgaggaccatcgcatcacccaagggtcctgtcatccaggcctatcgactcggtccgcactagcctgaggtaa

SEQ ID NO: 1523 - DNA, 183 bp, synthetic construct
  misc_feature 1..183: note = Synthetic
  source 1..183: mol_type = other DNA
ctgactggccgggacaaaaaccaagtggagggtgaggtccagatcgtgtcaactgctacccaaaccttcctggcaacgtgcatcagccgggtatgctggactgtctaccacggggccggaacgaggaccatcgcatcacccaagggtcctgtcatccagatgtatcgactcggtccgcactag

SEQ ID NO: 1524 - DNA, 189 bp, synthetic construct
  source 1..189: mol_type = other DNA
  misc_feature 1..189: note = Synthetic
ctggccgggacaaaaaccaagtggagggtgaggtccagatcgtgtcaactgctacccaaaccttcctggcaacgtgcatcagccgggtatgctggactgtctaccacggggccggaacgaggaccatcgcatcacccaagggtcctgtcatccagatgtatcgactcggtccgcactagcctgaggtaa

SEQ ID NO: 1525 - DNA, 186 bp, synthetic construct
  source 1..186: mol_type = other DNA
  misc_feature 1..186: note = Synthetic
ttgcccgttctctttcttagtatgaatccagtatgcctgcctgtaattgttgcgccctacctgttttggctggcggctattgccgcctcgtgtttcacggcctcagttagtaccgttgtcagcgccaccggcttggccctctcacttctactcttggcagcagcgactcggtccgcactagcctga

SEQ ID NO: 1526 - DNA, 54 bp, synthetic construct
  source 1..54: mol_type = other DNA
  misc_feature 1..54: note = Synthetic
ttggccctctcacttctactcttggcagcagcgactcggtccgcactagcctga

SEQ ID NO: 1527 - DNA, 213 bp, synthetic construct
  source 1..213: mol_type = other DNA
  misc_feature 1..213: note = Synthetic
ttgctctattcacccttacttttcttcttgcccgttctctttcttagtatgaatccagtatgcctgcctgtaattgttgcgccctacctcttttggctggcggctattgccgcctcgtgtttcacggcctcagttagtaccgttgtgaccgccaccggcttggccctctcacttctactcttggcagcagcgactcggtccgcactagcctga

SEQ ID NO: 1528 - DNA, 30 bp, synthetic construct
  misc_feature 1..30: note = Synthetic
  source 1..30: mol_type = other DNA
ctgtgtatggagacacattggaaaaactaa

SEQ ID NO: 1529 - DNA, 27 bp, synthetic construct
  misc_feature 1..27: note = Synthetic
  source 1..27: mol_type = other DNA
atgaaaaacgacgatttcacaacatag

SEQ ID NO: 1530 - DNA, 42 bp, synthetic construct
  misc_feature 1..42: note = Synthetic
  source 1..42: mol_type = other DNA
aagatggttggtatattccatagtagcttgtggaatttataa

SEQ ID NO: 1531 - DNA, 45 bp, synthetic construct
  source 1..45: mol_type = other DNA
  misc_feature 1..45: note = Synthetic
ctgactatgagaatgatgatgatgctacagcggctgcagggatag

SEQ ID NO: 1532 - DNA, 99 bp, synthetic construct
  misc_feature 1..99: note = Synthetic
  source 1..99: mol_type = other DNA
ctggttgtggaggtgcttgattcgtcgtccgagctccccaagtcccacctgcctcccctagtcacagaggccgactcggtccgcactagcctgaggtaa

SEQ ID NO: 1533 - DNA, 213 bp, synthetic construct
  misc_feature 1..213: note = Synthetic
  source 1..213: mol_type = other DNA
ttgctctattcaccgttacttttcttcttgcccgttctctttcttagtatgaatccagtatgcctgcctgtaattgttgcgccctacctgttttggctggcggctattgccgcctcgtgtttcacggcctcagttagtaccgttgtgaccgccaccggcttggccctctcacttctactcttggcagcagcgactcggtccgcactagcctga

SEQ ID NO: 1534 - DNA, 213 bp, synthetic construct
  source 1..213: mol_type = other DNA
  misc_feature 1..213: note = Synthetic
ttgctctattcaccgttacttttcttcttgcccgttctctttcttagtgccaatccagtatgcctgcctgtaattgttgcgccctacctgttttggctggcggctattgccgcctcgtgtttcacggcctcagttagtaccgttgtgaccgccaccggcttggccctctcacttctactcttggcagcagcgactcggtccgcactagcctga

SEQ ID NO: 1535 - DNA, 168 bp, synthetic construct
  source 1..168: mol_type = other DNA
  misc_feature 1..168: note = Synthetic
atggctcctacagttaagagaatcattaacgactcaataattcagcctaaactaccggccaatgaggatccggtagaatatccagctgattacttcaaaaataataccaacatagtattatatgtgagcactaaagtagccgactcggtccgcactagcctgaggtaa

SEQ ID NO: 1536 - DNA, 87 bp, synthetic construct
  misc_feature 1..87: note = Synthetic
  source 1..87: mol_type = other DNA
attgacgctgggagagaccagagatcctgctgtctctacagcatcattccaggcacagaacgccaaaaaatggaatggtgctgttga

SEQ ID NO: 1537 - DNA, 174 bp, synthetic construct
  misc_feature 1..174: note = Synthetic
  source 1..174: mol_type = other DNA
gtgaaggccgccacttttacagatgcggagatagatgacatatttgagaccagtgggactgtcattgacagcataattacggcccagggcaaatcagctgagaccgtcggaagaagcgcgatcccgcagggcaagaccaaagctctcgactcggtccgcactagcctgaggtaa

SEQ ID NO: 1538 - DNA, 69 bp, synthetic construct
  source 1..69: mol_type = other DNA
  misc_feature 1..69: note = Synthetic
acgtctcggttcacctacgctatccggtgccgtcggatgagatggcggttacaatcagcaggggattag

SEQ ID NO: 1539 - DNA, 168 bp, synthetic construct
  misc_feature 1..168: note = Synthetic
  source 1..168: mol_type = other DNA
atgcatccggtgctgcggcagatgcgacctcagacgcccaccaccaccgccgcggcggcagtaaacctgagcggaggcggtgacagggaggaggaggagctggctttagacctggaagagggagaggggctggcccggctcgactcggtccgcactagcctgaggtaa

SEQ ID NO: 1540 - DNA, 153 bp, synthetic construct
  source 1..153: mol_type = other DNA
  misc_feature 1..153: note = Synthetic
ctgctccgcacgggtgcattcattcagtgtttcctgccggatatcctgcatcagttcaccacctgttcaaactctgcgctgaactcaacacgcagcatactgacccgcgacgaccattttgcgcaggtcacctttatctgccgccactcataa

SEQ ID NO: 1541 - DNA, 27 bp, synthetic construct
  misc_feature 1..27: note = Synthetic
  source 1..27: mol_type = other DNA
atttccagccgactcggtccgcactag

SEQ ID NO: 1542 - DNA, 204 bp, synthetic construct
  source 1..204: mol_type = other DNA
  misc_feature 1..204: note = Synthetic
ctgaaaacttatcccagaaaacgcactgtcgtaacaatggacacgcactggcgctgctatacgcgccagtgcgtgcactgtcttttcctcacgtcgctggtggtaatgggtatgggcttcggaacgctcttcgcatactcgaggtgggaatgcccgcaatgcaagcccgcgcctcccgactcggtccgcactagcctgaggtaa

SEQ ID NO: 1543 - DNA, 45 bp, synthetic construct
  misc_feature 1..45: note = Synthetic
  source 1..45: mol_type = other DNA
acgcgctctttttttcttttcgatcaaacggctgagttgctgtag

SEQ ID NO: 1544 - DNA, 69 bp, synthetic construct
  misc_feature 1..69: note = Synthetic
  source 1..69: mol_type = other DNA
atggcgtccagttcgtcgtcaataagcgccagcatctgttgttgttgcggtccggcggacgatccgtga

SEQ ID NO: 1545 - DNA, 51 bp, synthetic construct
  misc_feature 1..51: note = Synthetic
  source 1..51: mol_type = other DNA
atccgtgatgattattggctgaggaggggtgagaagaaccgaaagtcgtag

SEQ ID NO: 1546 - DNA, 159 bp, synthetic construct
  misc_feature 1..159: note = Synthetic
  source 1..159: mol_type = other DNA
gtgctgcggcagatgcgacctcagacgcccaccaccaccgccgcggcggcagtaaacctgagcggaggcggtgacagggaggaggaggagctggctttagacctggaagagggagaggggctggcccggctcgactcggtccgcactagcctgaggtaa

SEQ ID NO: 1547 - DNA, 210 bp, synthetic construct
  misc_feature 1..210: note = Synthetic
  source 1..210: mol_type = other DNA
aagccctcgagacctccccccatctccctcttaccttgtgtcatggcctcaaatgagggtgtggaaaacagacccttcccctatctgacggtggatgccgacctgctctcgaacctgcggcagtcagcggctgaggggttgtttcatagctttgacctgctggtgggcaaggatgccagagacgactcggtccgcactagcctgaggtaa

SEQ ID NO: 1548 - DNA, 36 bp, synthetic construct
  source 1..36: mol_type = other DNA
  misc_feature 1..36: note = Synthetic
atgagggtgtggaaaacagacccttcccctatctga

SEQ ID NO: 1549 - DNA, 150 bp, synthetic construct
  source 1..150: mol_type = other DNA
  misc_feature 1..150: note = Synthetic
gtggaaaacagacccttcccctatctgacggtggatgccgacctgctctcgaacctgcggcagtcagcggctgaggggttgtttcatagctttgacctgctggtgggcaaggatgccagagacgactcggtccgcactagcctgaggtaa

SEQ ID NO: 1550 - DNA, 93 bp, synthetic construct
  misc_feature 1..93: note = Synthetic
  source 1..93: mol_type = other DNA
aggcgagcggctgttgacaaaattgaggacttgttgcaggacatgggtggggatgaacctttggacctgagcttgaaacgccccaggaactag

SEQ ID NO: 1551 - DNA, 123 bp, synthetic construct
  misc_feature 1..123: note = Synthetic
  source 1..123: mol_type = other DNA
atgtctaaaaaaccaggaggacccgggaagccccgggtcgtcaatatgctaaaacgcggcataccccgcgtattcccactagtgggagtgaagagggtagtaatgcgactcggtccgcactag

SEQ ID NO: 1552 - DNA, 93 bp, synthetic construct
  misc_feature 1..93: note = Synthetic
  source 1..93: mol_type = other DNA
ctgcttagtactatgcagaaacccccgagcaaattaaaattgatgaagattaagaaaaagagggattttccgactcggtccgcactagcctga

SEQ ID NO: 1553 - DNA, 132 bp, synthetic construct
  misc_feature 1..132: note = Synthetic
  source 1..132: mol_type = other DNA
atccattcattggtcatgagcataccctgtacgatatatcacccggacatgtatacgcaaaaagtaaacgtatggtcgagcaactggtcacgaaagccaataattctgtcgactcggtccgcactagcctga

SEQ ID NO: 1554 - DNA, 144 bp, synthetic construct
  source 1..144: mol_type = other DNA
  misc_feature 1..144: note = Synthetic
ataaacacggtaatccattcattggtcatgagcataccctgtacgatatatcacccggacatgtatacgcaaaaagtaaacgtatggtcgagcaactggtcacgaaagccaataattctgtcgactcggtccgcactagcctga

SEQ ID NO: 1555 - DNA, 168 bp, synthetic construct
  source 1..168: mol_type = other DNA
  misc_feature 1..168: note = Synthetic
atggcgcaaagccgtataactagagaggacatccaaaagttggaggatgcaaaaaagcagatagaaatccagctatcatcctcaatccaaaaattggccactgagacagaacaatttgggcctgaccctgacccgatccacgactcggtccgcactagcctgaggtaa

SEQ ID NO: 1556 - DNA, 153 bp, synthetic construct
  misc_feature 1..153: note = Synthetic
  source 1..153: mol_type = other DNA
ataactagagaggacatccaaaagttggaggatgcaaaaaagcagatagaaatccagctatcatcctcaatccaaaaattggccactgagacagaacaatttgggcctgaccctgacccgatccacgactcggtccgcactagcctgaggtaa

SEQ ID NO: 1557 - DNA, 168 bp, synthetic construct
  misc_feature 1..168: note = Synthetic
  source 1..168: mol_type = other DNA
atggcaactagattgtacacatttagaaggaaaagttatcctggtagcagttcatgtagccagtggatatatagaagcagaagttattccagcagaaacagggcaggaaacagcatattttcttttaaaattagcaggaagatggccagtaaaaacaatacatactga

SEQ ID NO: 1558 - DNA, 168 bp, synthetic construct
  misc_feature 1..168: note = Synthetic
  source 1..168: mol_type = other DNA
atggcaactagattgtacacatttagaaggaaaagttatcctggtagcagttcatgtagccagtggatatatagaagcagaagttattccagcagaaacagggcaggaaacagcatattttcttttaaaattagcaggaagatggccagtaaaaacaatacgccctga

SEQ ID NO: 1559 - DNA, 93 bp, synthetic construct
  source 1..93: mol_type = other DNA
  misc_feature 1..93: note = Synthetic
ctgaaaacgaaagacacgaaaacttttacgctgagattgatgactttgccccctcagttcttaccccaaccgactcggtccgcactagcctga

SEQ ID NO: 1560 - DNA, 159 bp, synthetic construct
  misc_feature 1..159: note = Synthetic
  source 1..159: mol_type = other DNA
ctggatttccaggaaaggaggccggcccgcccggcggctggcgaaaatgtcaggaggatgagtcccctgaaaacgaaagacacgaaaacttttacgctgagattgatgactttgccccctcagttcttaccccaaccgactcggtccgcactagcctga

SEQ ID NO: 1561 - DNA, 201 bp, synthetic construct
  source 1..201: mol_type = other DNA
  misc_feature 1..201: note = Synthetic
gtggagagggcacacagaccccgggtgggatccatggctggatttccaggaaaggaggccggcccgcccggcggctggcgaaaatgtcaggaggatgagtcccctgaaaacgaaagacacgaaaacttttacgctgagattgatgactttgccccctcagttcttaccccaaccgactcggtccgcactagcctgaggtaa

SEQ ID NO: 1562 - DNA, 114 bp, synthetic construct
  misc_feature 1..114: note = Synthetic
  source 1..114: mol_type = other DNA
acgtcgctggtggtaatgggtatgggcttcggaacgctcttcgcatactcgaggtgggaatgcccgcaatgcaagcccgcgcctcccgactcggtccgcactagcctgaggtaa

SEQ ID NO: 1563 - DNA, 90 bp, synthetic construct
  misc_feature 1..90: note = Synthetic
  source 1..90: mol_type = other DNA
atgatttgcttcagggtggagatgaacctttggacttgtgtacccggaaacgccccaggcattaagtgccacacatgtgtgtttacttga

SEQ ID NO: 1564 - DNA, 120 bp, synthetic construct
  source 1..120: mol_type = other DNA
  misc_feature 1..120: note = Synthetic
ctgggaggagagcagctgtggaatgtttggatgacttgctacaggctggggatgaacctttggacttgtgtacccggaaacgccccaggcactaagtgccacacatgtgtgtttacttga

SEQ ID NO: 1565 - DNA, 168 bp, synthetic construct
  misc_feature 1..168: note = Synthetic
  source 1..168: mol_type = other DNA
atgagacgtgcggtgggagtgccgccggtgatggcgtacgccgagggtcctcctccttcttacgaaagcgtgatggaaacagcggatttgccggcaacgctgcaggcgctccacgtccctccccgttacctggggcctaccgactcggtccgcactagcctgaggtaa

SEQ ID NO: 1566 - DNA, 153 bp, synthetic construct
  misc_feature 1..153: note = Synthetic
  source 1..153: mol_type = other DNA
atcgattccatgatgttcatacattgtgttgtttttccagatttgtccaatccttcaaaaacgattaatgccccacgagacattttcgtaaacctaacatattttttacaatttatgcgtataatcgactcggtccgcactagcctgaggtaa

SEQ ID NO: 1567 - DNA, 75 bp, synthetic construct
  source 1..75: mol_type = other DNA
  misc_feature 1..75: note = Synthetic
atgccttacagacgctatcgcagacgccgaagaagaccgacacggagatggaggcaccgactcggtccgcactag

SEQ ID NO: 1568 - DNA, 216 bp, synthetic construct
  source 1..216: mol_type = other DNA
  misc_feature 1..216: note = Synthetic
agggagagcttaacttgtatgtgccttaccgccagagaacgcgcgaagatggccaccccctcgatgatgccgcagtgggcgtacatgcacatcgccgggcaggacgcctcggagtacctgagcccgggtctggtgcagtttgcccgcgccaccgacacgtacttcagcctgggcaacaagtttaggaacgactcggtccgcactagcctgaggtaa

SEQ ID NO: 1569 - DNA, 138 bp, synthetic construct
  misc_feature 1..138: note = Synthetic
  source 1..138: mol_type = other DNA
atggcgtacgccgagggtcctcctccttcttacgaaagcgtgatggaaacagcggatttgccggcaacgctgcaggcgctccacgtccctccccgttacctggggcctaccgactcggtccgcactagcctgaggtaa

SEQ ID NO: 1570 - DNA, 57 bp, synthetic construct
  source 1..57: mol_type = other DNA
  misc_feature 1..57: note = Synthetic
atgttctcacttggaatgcaggaccttttttctgacccaaggtgccttactgaatga

SEQ ID NO: 1571 - DNA, 42 bp, synthetic construct
  misc_feature 1..42: note = Synthetic
  source 1..42: mol_type = other DNA
atgcaggaccttttttctgacccaaggtgccttactgaatga

SEQ ID NO: 1572 - DNA, 168 bp, synthetic construct
  misc_feature 1..168: note = Synthetic
  source 1..168: mol_type = other DNA
atggaggcctgtccacacatacgctacgccttccagaatgacaagctgttgctccagcaggctagtgtagggcggctcaccttggtcaacaagaccaccatcctgctgcgcccgatgaagaccacaactgtggacctaggcgactcggtccgcactagcctgaggtaa

SEQ ID NO: 1573 - DNA, 174 bp, synthetic construct
  misc_feature 1..174: note = Synthetic
  source 1..174: mol_type = other DNA
atcaccgccgaggcctgtccacacatacgctacgccttccagaatgacaagctgttgctccagcaggctagtgtagggcggctcaccttggtcaacaagaccaccatcctgctgcgcccgatgaagaccacaactgtggacctaggcgactcggtccgcactagcctgaggtaa

SEQ ID NO: 1574 - DNA, 69 bp, synthetic construct
  source 1..69: mol_type = other DNA
  misc_feature 1..69: note = Synthetic
atggcttccagttcgtcgtcaataagcgccagcatctgttgttgttgcggtccggcggacgatccgtga

SEQ ID NO: 1575 - DNA, 186 bp, synthetic construct
  misc_feature 1..186: note = Synthetic
  source 1..186: mol_type = other DNA
atgtggcagaatgttgtgaacagttttcagatctgggagccttgctttggaggcgctttcaaaaatgatgcagtccatgagtgcacagtgcggggtgatctctttcttctttttgtcccttactattccagtatgcatcttacacaaccagccatatgcctcccgactcggtccgcactagcctga

SEQ ID NO: 1576 - DNA, 54 bp, synthetic construct
  source 1..54: mol_type = other DNA
  misc_feature 1..54: note = Synthetic
atgcatcttacacaaccagccatatttgtcccgactcggtccgcactagcctga

SEQ ID NO: 1577 - DNA, 117 bp, synthetic construct
  source 1..117: mol_type = other DNA
  misc_feature 1..117: note = Synthetic
atgatgcagtccatgagtgcacagtgcggggtgatctctttcttctttttgtcccttactattccagtatgcatcttacacaaccagccatatttgtcccgactcggtccgcactag

SEQ ID NO: 1578 - DNA, 51 bp, synthetic construct
  source 1..51: mol_type = other DNA
  misc_feature 1..51: note = Synthetic
gtgtttcccctggtccaggcaactctggtgtcatcactactgcatgattaa

SEQ ID NO: 1579 - DNA, 75 bp, synthetic construct
  source 1..75: mol_type = other DNA
  misc_feature 1..75: note = Synthetic
attaatagtacagtatccaatgagattgtagtggttgataacctagtaagtatcaatatgagctgcagccgttag

SEQ ID NO: 1580 - DNA, 63 bp, synthetic construct
  misc_feature 1..63: note = Synthetic
  source 1..63: mol_type = other DNA
atgccgcaccatcagcactcccactctccaatccatcctccgactcggtccgcactagcctga

SEQ ID NO: 1581 - DNA, 168 bp, synthetic construct
  misc_feature 1..168: note = Synthetic
  source 1..168: mol_type = other DNA
atgcgtcgtctgacagatagttttattctcggtcttgctaagggtgccgttattccggggctgtatccgtttagaatgacagaggggaggtcctccctcgaacagataggcgttgtgataaccgttgcgatttcctttttcgactcggtccgcactagcctgaggtaa

SEQ ID NO: 1582 - DNA, 15 bp, synthetic construct
  misc_feature 1..15: note = Synthetic
  source 1..15: mol_type = other DNA
aggatgatacattaa

SEQ ID NO: 1583 - DNA, 207 bp, synthetic construct
  misc_feature 1..207: note = Synthetic
  source 1..207: mol_type = other DNA
attgcaatattccttctcgtaggcacacaatctaatattgataaaatctccattctcttctctgtatttattatcttgtctcggtggctgattaggctgtggtctatcgttgttgaatctattttggtcattaaatctttcatttcttcctggtatatttctatcacctcgtttggttggatttttgtccgactcggtccgcactag

SEQ ID NO: 1584 - DNA, 66 bp, synthetic construct
  misc_feature 1..66: note = Synthetic
  source 1..66: mol_type = other DNA
attgacagtaccctaccacttcacttagcaaatctgaacgtctatcgaaacgtggccgaggtttga

SEQ ID NO: 1585 - DNA, 51 bp, synthetic construct
  misc_feature 1..51: note = Synthetic
  source 1..51: mol_type = other DNA
atgagatcaatagacagatggatgaaatggtacttcttaccaacatcttaa

SEQ ID NO: 1586 - DNA, 51 bp, synthetic construct
  misc_feature 1..51: note = Synthetic
  source 1..51: mol_type = other DNA
atgagatcaatagacaggccgatgaaatggtacttcttaccaacatcttaa

SEQ ID NO: 1587 - DNA, 33 bp, synthetic construct
  misc_feature 1..33: note = Synthetic
  source 1..33: mol_type = other DNA
atggcgcggccccagaagcgaggctccatttaa

SEQ ID NO: 1588 - DNA, 111 bp, synthetic construct
  misc_feature 1..111: note = Synthetic
  source 1..111: mol_type = other DNA
atgacagccggttcctcttcctcaaggcgcgccgcgccgacaacgccgtcgtgtacctgcgcttcgtgcagcacttttactacgtggtcgactcggtccgcactagcctga

SEQ ID NO: 1589 - DNA, 216 bp, synthetic construct
  source 1..216: mol_type = other DNA
  misc_feature 1..216: note = Synthetic
agggagagcttaacttgtatgtgccttaccgccagagaacgcgcgaaggccgccaccccctcgatgatgccgcagtgggcgtacatgcacatcgccgggcaggacgcctcggagtacctgagcccgggtctggtgcagtttgcccgcgccaccgacacgtacttcagcctgggcaacaagtttaggaacgactcggtccgcactagcctgaggtaa

SEQ ID NO: 1590 - DNA, 30 bp, synthetic construct
  misc_feature 1..30: note = Synthetic
  source 1..30: mol_type = other DNA
atgggagggctgcggagagagagagcttaa

SEQ ID NO: 1591 - DNA, 129 bp, synthetic construct
  source 1..129: mol_type = other DNA
  misc_feature 1..129: note = Synthetic
aggacgcttacgactcggccgatgatagtagcgtgttggacttggggggaaccggcgccgcttctgatccctttgctcatctgcggcctcagggtcaactgggtcgtttgtattaaaaaaataaaataa

SEQ ID NO: 1592 - DNA, 213 bp, synthetic construct
  source 1..213: mol_type = other DNA
  misc_feature 1..213: note = Synthetic
aaggcttacgaacggctgcagacgccgctggagaaatataccgcccgtcaggaagaactgaacaaggcactgaaagacgggaaaatcctgcaggcggattacaacacgctgatggcggcggcgaaaaaggattatgaagcgacgctgaaaaagccgaaacagtccagcgtgaaggtgtctgcgggcgatccgactcggtccgcactagcctga

SEQ ID NO: 1593 - DNA, 24 bp, synthetic construct
  misc_feature 1..24: note = Synthetic
  source 1..24: mol_type = other DNA
ataccgcccgtcaggaagaactga

SEQ ID NO: 1594 - DNA, 36 bp, synthetic construct
  misc_feature 1..36: note = Synthetic
  source 1..36: mol_type = other DNA
acgggaaaatcctgcaggcggattacaacacgctga

SEQ ID NO: 1595 - DNA, 213 bp, synthetic construct
  source 1..213: mol_type = other DNA
  misc_feature 1..213: note = Synthetic
aaggcttacgaacggctgcagacgccgctggagaaatataccgcccgtcaggaagaactgaacaaggcagccaaagacgggaaaatcctgcaggcggattacaacacgctgatggcggcggcgaaaaaggattatgaagcgacgctgaaaaagccgaaacagtccagcgtgaaggtgtctgcgggcgatccgactcggtccgcactagcctga

SEQ ID NO: 1596 - DNA, 177 bp, synthetic construct
  source 1..177: mol_type = other DNA
  misc_feature 1..177: note = Synthetic
ttgagtaagatggtttacaaattagtcttactcttttgtatcgcatctctcgggtattcggtagaatacaagaatactatatgtcctcctcgacaagattaccggtactggtactttgtcgccgaactcactattggtgtaaattacgacgactcggtccgcactagcctgaggtaa

SEQ ID NO: 1597 - DNA, 102 bp, synthetic construct
  misc_feature 1..102: note = Synthetic
  source 1..102: mol_type = other DNA
atacaagaatactatatgtcctcctcgacaagattaccggtactggtactttgtcgccgaactcactattggtgtaaattacgacgactcggtccgcactag

SEQ ID NO: 1598 - DNA, 102 bp, synthetic construct
  source 1..102: mol_type = other DNA
  misc_feature 1..102: note = Synthetic
gtgttggatctgcagtggtatcttgggcccttaagtgggaatatgtggtgctcgcgttcctgcttctcgcggacgcgagagtctctgcctacctatggatga

SEQ ID NO: 1599 - DNA, 129 bp, synthetic construct
  source 1..129: mol_type = other DNA
  misc_feature 1..129: note = Synthetic
atatcgtgggcctccagtacctctatggtgttggatctgcagtggtatcttgggcccttaagtgggaatatgtggtgctcgcgttcctgcttctcgcggacgcgagagtctctgcctacctatggatga

SEQ ID NO: 1600 - DNA, 24 bp, synthetic construct
  misc_feature 1..24: note = Synthetic
  source 1..24: mol_type = other DNA
atgttggctgttttttctctttaa

SEQ ID NO: 1601 - DNA, 93 bp, synthetic construct
  source 1..93: mol_type = other DNA
  misc_feature 1..93: note = Synthetic
ctggccaccgcgaggaactttcggtgctgttgtttaatcacaatgacaggttttacgagggtcgagctggagaccctgtggcttgtcttgtga

SEQ ID NO: 1602 - DNA, 54 bp, synthetic construct
  misc_feature 1..54: note = Synthetic
  source 1..54: mol_type = other DNA
atgccggactttactgcacacgacacgatacccccgcgcaccaggctctcatga

SEQ ID NO: 1603 - DNA, 57 bp, synthetic construct
  source 1..57: mol_type = other DNA
  misc_feature 1..57: note = Synthetic
atactcaataaagttgcgttggggtcaggctcgtccggaatgaatacaattagctaa

SEQ ID NO: 1604 - DNA, 168 bp, synthetic construct
  source 1..168: mol_type = other DNA
  misc_feature 1..168: note = Synthetic
atggagtgtaatttaggaaccgaacatcctagtacagatacgtggaatcgtagtaaaacggaacaagcggttgtggacgcatttgatgaatcgttgtttggtgatgtagcatcggatattggatttgaaacgtcgttatacgactcggtccgcactagcctgaggtaa

SEQ ID NO: 1605 - DNA, 174 bp, synthetic construct
  source 1..174: mol_type = other DNA
  misc_feature 1..174: note = Synthetic
ataagtgccgagtgtaatttaggaaccgaacatcctagtacagatacgtggaatcgtagtaaaacggaacaagcggttgtggacgcatttgatgaatcgttgtttggtgatgtagcatcggatattggatttgaaacgtcgttatacgactcggtccgcactagcctgaggtaa

SEQ ID NO: 1606 - DNA, 69 bp, synthetic construct
  source 1..69: mol_type = other DNA
  misc_feature 1..69: note = Synthetic
atggagtccagttcgtcgtcaataagcgccagcatctgttgttgttgcggtccggcggacgatccgtga

SEQ ID NO: 1607 - DNA, 18 bp, synthetic construct
  source 1..18: mol_type = other DNA
  misc_feature 1..18: note = Synthetic
atgacatttaccagttaa

SEQ ID NO: 1608 - DNA, 168 bp, synthetic construct
  misc_feature 1..168: note = Synthetic
  source 1..168: mol_type = other DNA
atggagtcctacctagtagacacctatcaaggcattccttacacagcagctgttcaagttgatctaatagaaaaggacctgttacctgcaagcctaacaatatggttccctttgtttcaggccaacacaccaccagcagtcgactcggtccgcactagcctgaggtaa

SEQ ID NO: 1609 - DNA, 183 bp, synthetic construct
  source 1..183: mol_type = other DNA
  misc_feature 1..183: note = Synthetic
atgggacaagtaaaagccgagtcctacctagtagacacctatcaaggcattccttacacagcagctgttcaagttgatctaatagaaaaggacctgttacctgcaagcctaacaatatggttccctttgtttcaggccaacacaccaccagcagtcgactcggtccgcactagcctgaggtaa

SEQ ID NO: 1610 - DNA, 99 bp, synthetic construct
  source 1..99: mol_type = other DNA
  misc_feature 1..99: note = Synthetic
atcataaagtttcaacagttgggctttttcagcagccagctatggctttacaattatttaatccagaagactactatgatattttatttcctggagtga

SEQ ID NO: 1611 - DNA, 168 bp, synthetic construct
  misc_feature 1..168: note = Synthetic
  source 1..168: mol_type = other DNA
atggctttacaattatttaatccagaagactactatgatattttatttcctggagtgaatgcctttgttaacaatattcactatttagatcctagacattggggcccgtccttgttctccacaatctcccaggctttttgcgactcggtccgcactagcctgaggtaa

SEQ ID NO: 1612 - DNA, 138 bp, synthetic construct
  source 1..138: mol_type = other DNA
  misc_feature 1..138: note = Synthetic
atgggagctgtcagaaacacaggaagactggatcacccaagtccacggacacgtcaggagagtggtagaatgctggaaatacaccatatgctgtctgataagcaacatgcacactcacaggggagcaccacaatatga

SEQ ID NO: 1613 - DNA, 168 bp, synthetic construct
  source 1..168: mol_type = other DNA
  misc_feature 1..168: note = Synthetic
atgagtaaagatattcccacgccttacatgtggagctttcaaccccaaatgggactggcggccggcgcggctcaagactattctagcaaaatgaattggttaagcgccggaccccacatgatttccagggtgaatggggtcgactcggtccgcactagcctgaggtaa

SEQ ID NO: 1614 - DNA, 24 bp, synthetic construct
  source 1..24: mol_type = other DNA
  misc_feature 1..24: note = Synthetic
gtgacgtcacaacaaggccagtaa

SEQ ID NO: 1615 - DNA, 171 bp, synthetic construct
  misc_feature 1..171: note = Synthetic
  source 1..171: mol_type = other DNA
aaggccagtaaagatattcccacgccttacatgtggagctttcaaccccaaatgggactggcggccggcgcggctcaagactattctagcaaaatgaattggttaagcgccggaccccacatgatttccagggtgaatggggtcgactcggtccgcactagcctgaggtaa

SEQ ID NO: 1616 - DNA, 30 bp, synthetic construct
  misc_feature 1..30: note = Synthetic
  source 1..30: mol_type = other DNA
atgttatatcatcgccataaaattgattaa

SEQ ID NO: 1617 - DNA, 90 bp, synthetic construct
  source 1..90: mol_type = other DNA
  misc_feature 1..90: note = Synthetic
atgtatcctcggatgggttgcatcgtctcactccaagaagtttcaactgctagttgggtcagagaagctgagcaagattatgcaggatga

SEQ ID NO: 1618 - DNA, 204 bp, synthetic construct
  source 1..204: mol_type = other DNA
  misc_feature 1..204: note = Synthetic
atggacagagaagaacccgcggaatcagagtgcaccttaagagctcttgtagaagagtacaatggagcatgcaaggaagcaccgaaagagatgtcgaagcaattcacagactacaacacattcaaaaggtataccacaagcaagaaggatcatgcaccccagatgagactagtgtattcagtgagacgactcggtccgcactag

SEQ ID NO: 1619 - DNA, 105 bp, synthetic construct
  misc_feature 1..105: note = Synthetic
  source 1..105: mol_type = other DNA
atggagcatgcaaggaagcaccgaaagagatgtcgaagcaattcacagactacaacacattcaaaaggtataccacaagcaagaaggatcatgcaccccagatga

SEQ ID NO: 1620 - DNA, 198 bp, synthetic construct
  misc_feature 1..198: note = Synthetic
  source 1..198: mol_type = other DNA
atggctacagaccagatggacatctcgggccctcctccaaagaaacagcatgtggacacagagagtcagatcccaaagatgtacgagatgatcagggaccagatgcgcactttggcatcgacacacaaaatccccctgaacattgaccacaactgcgaggttatcgggtccatcataatgcgactcggtccgcactag

SEQ ID NO: 1621 - DNA, 183 bp, synthetic construct
  misc_feature 1..183: note = Synthetic
  source 1..183: mol_type = other DNA
atggacatctcgggccctcctccaaagaaacagcatgtggacacagagagtcagatcccaaagatgtacgagatgatcagggaccagatgcgcactttggcatcgacacacaaaatccccctgaacattgaccacaactgcgaggttatcgggtccatcataatgcgactcggtccgcactag

SEQ ID NO: 1622 - DNA, 15 bp, synthetic construct
  source 1..15: mol_type = other DNA
  misc_feature 1..15: note = Synthetic
atggtaaaattataa

SEQ ID NO: 1623 - DNA, 102 bp, synthetic construct
  misc_feature 1..102: note = Synthetic
  source 1..102: mol_type = other DNA
ctggctagacgtcctactcctaaaaaaatgaacatagttactgattcggaaaatcgtttaaagaagaatagctacgactcggtccgcactagcctgaggtaa

SEQ ID NO: 1624 - DNA, 150 bp, synthetic construct
  misc_feature 1..150: note = Synthetic
  source 1..150: mol_type = other DNA
ttgagatcaaagatgttgaagagagtatctagaaaatcctcttccatactggctagacgtcctactcctaaaaaaatgaacatagttactgattcggaaaatcgtttaaagaagaatagctacgactcggtccgcactagcctgaggtaa

SEQ ID NO: 1625 - DNA, 114 bp, synthetic construct
  source 1..114: mol_type = other DNA
  misc_feature 1..114: note = Synthetic
atgaccacttctaaaggaaaggggggcggtccccctaggcgcaagcttaaagtgaccgcaaataagtcgcgaccagcaacgagccccgactcggtccgcactagcctgaggtaa

SEQ ID NO: 1626 - DNA, 147 bp, synthetic construct
  misc_feature 1..147: note = Synthetic
  source 1..147: mol_type = other DNA
ataggccagatgattactatgatattttatttcctggagtacaaacctttgttcacagtgttcagtatcttgaccccagacattggggtccaacactttttaatgccatttctcaagctttttgcgactcggtccgcactagcctga

SEQ ID NO: 1627 - DNA, 135 bp, synthetic construct
  source 1..135: mol_type = other DNA
  misc_feature 1..135: note = Synthetic
attactatgatattttatttcctggagtacaaacctttgttcacagtgttcagtatcttgaccccagacattggggtccaacactttttaatgccatttctcaagctttttgcgactcggtccgcactagcctga

SEQ ID NO: 1628 - DNA, 198 bp, synthetic construct
  misc_feature 1..198: note = Synthetic
  source 1..198: mol_type = other DNA
atgaacctgttcaccccacgctcagagatcaatcccaccaccactcaggagctactatacgcctacacaggaccggcgcccgttgcttatggcacaagaaccagagcagtattagagaacataatcagaccttaccaatacttctacaaagaacccaatgtccagagagctctagcgactcggtccgcactagcctga

SEQ ID NO: 1629 - DNA, 192 bp, synthetic construct
  misc_feature 1..192: note = Synthetic
  source 1..192: mol_type = other DNA
ctgttcaccccacgctcagagatcaatcccaccaccactcaggagctactatacgcctacacaggaccggcgcccgttgcttatggcacaagaaccagagcagtattagagaacataatcagaccttaccaatacttctacaaagaacccaatgtccagagagctctagcgactcggtccgcactagcctga

SEQ ID NO: 1630 - DNA, 198 bp, synthetic construct
  misc_feature 1..198: note = Synthetic
  source 1..198: mol_type = other DNA
atgaatccaaatcagaagataataaccattggatcaatctgtatggtagttgggataattagcttgatgttacaaattgggaacataatctcaatatgggtcagtcattcaattcagacagggaatcaacaccaagctgaaccatgcaatcaaagcattattacttatgaaaacaacacccgactcggtccgcactag

SEQ ID NO: 1631 - DNA, 162 bp, synthetic construct
  source 1..162: mol_type = other DNA
  misc_feature 1..162: note = Synthetic
gtgaacaagttttttgatcagtggataatgactaaaaaaccaggaaagtccggcaatcgtcggactgtcaatatgctaaagcgcggagcatcccgcgcacttggcccactagccaagtttaagaggatgttttccagcccgactcggtccgcactagcctga

SEQ ID NO: 1632 - DNA, 135 bp, synthetic construct
  source 1..135: mol_type = other DNA
  misc_feature 1..135: note = Synthetic
atgaccaaaaaaccaggaaggcccggtagaaatcgggccgtcaatatgctaaagcgcggtgcgtcccgcgcgcttggtccaatgatcaagcttaagaggatgctttttggcctgctgcgactcggtccgcactag

SEQ ID NO: 1633 - DNA, 105 bp, synthetic construct
  source 1..105: mol_type = other DNA
  misc_feature 1..105: note = Synthetic
atattgtggggcaacaacacaatgggcgttacaggaatattgcagttacctcgtgatcgattcaagaggacatcattctttctttggcgactcggtccgcactag

SEQ ID NO: 1634 - DNA, 18 bp, synthetic construct
  source 1..18: mol_type = other DNA
  misc_feature 1..18: note = Synthetic
atgaaaagaaggggttaa

SEQ ID NO: 1635 - DNA, 204 bp, synthetic construct
  source 1..204: mol_type = other DNA
  misc_feature 1..204: note = Synthetic
atgaatccaaatcaaaagataataacgattggctctgtttctctcaccatttccacaatatgcttcttcatgcaaattgccatcctgataaccactgtaacattgcatttcaagcaatatgaattcaactcccccccaaacaaccaagtgatgctgtgtgaaccaacaataatagaaagaacgactcggtccgcactagcctga

SEQ ID NO: 1636 - DNA, 189 bp, synthetic construct
  misc_feature 1..189: note = Synthetic
  source 1..189: mol_type = other DNA
aagataataacgattggctctgtttctctcaccatttccacaatatgcttcttcatgcaaattgccatcctgataaccactgtaacattgcatttcaagcaatatgaattcaactcccccccaaacaaccaagtgatgctgtgtgaaccaacaataatagaaagaacgactcggtccgcactagcctga

SEQ ID NO: 1637 - DNA, 204 bp, synthetic construct
  source 1..204: mol_type = other DNA
  misc_feature 1..204: note = Synthetic
atggatgtcaatccgaccttacttttcttgaaagttccagcgcaaaatgccataagtactacattcccttatactggagatcctccatacagccatgggacaggaacaggatacaccatggacacagtcaacagaacacatcaatattcagaaaaggggaagtggacaacaaacaccgactcggtccgcactagcctgaggtaa

SEQ ID NO: 1638 - DNA, 126 bp, synthetic construct
  misc_feature 1..126: note = Synthetic
  source 1..126: mol_type = other DNA
ctggagatcctccatacagccatgggacaggaacaggatacaccatggacacagtcaacagaacacatcaatattcagaaaaggggaagtggacaacaaacaccgactcggtccgcactagcctga

SEQ ID NO: 1639 - DNA, 204 bp, synthetic construct
  source 1..204: mol_type = other DNA
  misc_feature 1..204: note = Synthetic
atggatgtcaatccgactttacttttcttaaaagtgccagcgcaaaatgctataagtaccacattcccttatactggagatcctccatacagccatggaacaggaacaggatacaccatggacacagtcaacagaacacatcaatattcagaaaaggggaaatggacaacgaacaccgactcggtccgcactagcctgaggtaa

SEQ ID NO: 1640 - DNA, 126 bp, synthetic construct
  source 1..126: mol_type = other DNA
  misc_feature 1..126: note = Synthetic
ctggagatcctccatacagccatggaacaggaacaggatacaccatggacacagtcaacagaacacatcaatattcagaaaaggggaaatggacaacgaacaccgactcggtccgcactagcctga

SEQ ID NO: 1641 - DNA, 87 bp, synthetic construct
  source 1..87: mol_type = other DNA
  misc_feature 1..87: note = Synthetic
atggacacagtcaacagaacacatcaatattcagaaaaggggaagtggacaacaaacaccgactcggtccgcactagcctgaggtaa

SEQ ID NO: 1642 - DNA, 27 bp, synthetic construct
  source 1..27: mol_type = other DNA
  misc_feature 1..27: note = Synthetic
atgtcaatccgactttacttttcttaa

SEQ ID NO: 1643 - DNA, 153 bp, synthetic construct
  source 1..153: mol_type = other DNA
  misc_feature 1..153: note = Synthetic
ataagtaccacattcccttatactggagatcctccatacagccatggaacaggaacaggatacaccatggacacagtcaacagaacacatcaatattcagaaaaggggaaatggacaacgaacaccgactcggtccgcactagcctgaggtaa

SEQ ID NO: 1644 - DNA, 60 bp, synthetic construct
  source 1..60: mol_type = other DNA
  misc_feature 1..60: note = Synthetic
atgaccaaattgaagtcactaatgctactgaacgactcggtccgcactagcctgaggtaa

SEQ ID NO: 1645 - DNA, 186 bp, synthetic construct
  misc_feature 1..186: note = Synthetic
  source 1..186: mol_type = other DNA
ataacaatggccatcatttatctcatactcctgttcacagcagtgaggggggaccagatatgcattggataccatgccaataattccacagaaaaggtcgacacaattctagagcggaatgtcactgtgactcatgccaaggacatccttgagaagacccatacgactcggtccgcactagcctga

SEQ ID NO: 1646 - DNA, 183 bp, synthetic construct
  misc_feature 1..183: note = Synthetic
  source 1..183: mol_type = other DNA
atggcgtcccaaggcaccaaacggtcttacgaacagatggagactgatggagaacgccagaatgccactgaaatcagagcatccgtcggaaaaatgattggtggaattggacgattctacatccaaatgtgcacagaacttaaactcagtgattacgactcggtccgcactagcctgaggtaa

SEQ ID NO: 1647 - DNA, 186 bp, synthetic construct
  source 1..186: mol_type = other DNA
  misc_feature 1..186: note = Synthetic
atcgccgcgtcccaaggcaccaaacggtcttacgaacagatggagactgatggagaacgccagaatgccactgaaatcagagcatccgtcggaaaaatgattggtggaattggacgattctacatccaaatgtgcacagaacttaaactcagtgattacgactcggtccgcactagcctgaggtaa

SEQ ID NO: 1648 - DNA, 198 bp, synthetic construct
  misc_feature 1..198: note = Synthetic
  source 1..198: mol_type = other DNA
atgagtcttctaaccgaggtcgaaacgcctaccaaaaacgaatgggagtgcaaatgcagcgattcaagtgatcctcttgttgttgccgcaagtatcattgggatactgcacttgatattgtggattcttgatcgtcttttcttcaaatgcatttatcgtcgccttaaatacggttcgactcggtccgcactagcctga

SEQ ID NO: 1649 - DNA, 30 bp, synthetic construct
  source 1..30: mol_type = other DNA
  misc_feature 1..30: note = Synthetic
atgggagtgcaaatgcagcgattcaagtga

SEQ ID NO: 1650 - DNA, 21 bp, synthetic construct
  source 1..21: mol_type = other DNA
  misc_feature 1..21: note = Synthetic
atgcatttatcgtcgccttaa

SEQ ID NO: 1651 - DNA, 198 bp, synthetic construct
  source 1..198: mol_type = other DNA
  misc_feature 1..198: note = Synthetic
atgagtcttctaaccgaggtcgaaacgtacgttctctctatcgtcccgtcaggccccctcaaagccgagatcgcgcagagacttgaggatgtctttgcaggaaagaacaccgatctcgaggctctcatggaatggctaaagacaagaccaatcctgtcacctctgactaaagggacgactcggtccgcactagcctga

SEQ ID NO: 1652 - DNA, 51 bp, synthetic construct
  misc_feature 1..51: note = Synthetic
  source 1..51: mol_type = other DNA
atgtctttgcaggaaagaacaccgatctcgaggctctcatggaatggctaa

SEQ ID NO: 1653 - DNA, 174 bp, synthetic construct
  misc_feature 1..174: note = Synthetic
  source 1..174: mol_type = other DNA
acgtacgttctctctatcgtcccgtcaggccccctcaaagccgagatcgcgcagagacttgaggatgtctttgcaggaaagaacaccgatctcgaggctctcatggaatggctaaagacaagaccaatcctgtcacctctgactaaagggacgactcggtccgcactagcctga

SEQ ID NO: 1654 - DNA, 198 bp, synthetic construct
  misc_feature 1..198: note = Synthetic
  source 1..198: mol_type = other DNA
atgagccttctaaccgaggtcgaaacacctatcagaaacgaatgggggtgcagatgcaacgattcaagtgacccgcttgttgttgccgcgagtatcattgggatcttgcacttgatattgtggattcttgatcgtctttttttcaaatgcgtctatcgactcttcaaacacggcccgactcggtccgcactagcctga

SEQ ID NO: 1655 - DNA, 30 bp, synthetic construct
  source 1..30: mol_type = other DNA
  misc_feature 1..30: note = Synthetic
atgggggtgcagatgcaacgattcaagtga

SEQ ID NO: 1656 - DNA, 198 bp, synthetic construct
  source 1..198: mol_type = other DNA
  misc_feature 1..198: note = Synthetic
atgagccttctaaccgaggtcgaaacgcctatcagaaacgaatgggggtgcagatgcaacgattcaagtgacccccttgttgttgctgcgagtatcattgggatcttgcactttatattgtggattcttgatcgtctttttttcaaatgcatttatcgcttctttaaacacggtccgactcggtccgcactagcctga

SEQ ID NO: 1657 - DNA, 198 bp, synthetic construct
  misc_feature 1..198: note = Synthetic
  source 1..198: mol_type = other DNA
atgagccttctaaccgaggtcgaaacgtacgttctctctatcgtcccgtcaggccccctcaaagccgagatcgcacagagacttgaagatgtctttgctgggaagaacacagatcttgaggctctcatggaatggctaaagacaagaccaatcctgtcacctctgactaaggggacgactcggtccgcactagcctga

SEQ ID NO: 1658 - DNA, 78 bp, synthetic construct
  source 1..78: mol_type = other DNA
  misc_feature 1..78: note = Synthetic
aagccgagatcgcacagagacttgaagatgtctttgctgggaagaacacagatcttgaggctctcatggaatggctaa

SEQ ID NO: 1659 - DNA, 195 bp, synthetic construct
  misc_feature 1..195: note = Synthetic
  source 1..195: mol_type = other DNA
atagccgatccaaacactgtgtcaagctttcaggtagattgctttctttggcatgtccgcaaacgagttgcagaccaagaactaggtgatgccccattccttgatcggcttcgccgagatcagaaatccctaagaggaaggggcagcactcttggtctggacatcgagacagccacacgactcggtccgcactag

SEQ ID NO: 1660 - DNA, 33 bp, synthetic construct
  misc_feature 1..33: note = Synthetic
  source 1..33: mol_type = other DNA
atgtccgcaaacgagttgcagaccaagaactag

SEQ ID NO: 1661 - DNA, 195 bp, synthetic construct
  misc_feature 1..195: note = Synthetic
  source 1..195: mol_type = other DNA
atagccgattccaacactgtgtcaagctttcaggacatactgacgaggatgtcaaaaatgcaattggggtcctcatcggaggacttgaatggaatgataacacagttcgagtctctgaaactctacagagattcacttggagaagcagtgatgagaatgggagatctccactccctccgactcggtccgcactag

SEQ ID NO: 1662 - DNA, 195 bp, synthetic construct
  source 1..195: mol_type = other DNA
  misc_feature 1..195: note = Synthetic
atagccgattccaacactgtgtcaagctttcaggtagactgctttctttggcatgtccgcaaacgatttgcagaccaagaactgggtgatgccccattccttgaccggcttcgccgagatcagaagtccctaagaggaagaggcagcactcttggtctggacatcagaactgccactcgactcggtccgcactag

SEQ ID NO: 1663 - DNA, 15 bp, synthetic construct
  misc_feature 1..15: note = Synthetic
  source 1..15: mol_type = other DNA
gtgacaaagacatag

SEQ ID NO: 1664 - DNA, 195 bp, synthetic construct
  misc_feature 1..195: note = Synthetic
  source 1..195: mol_type = other DNA
atagccgattccaacactgtgtcaagtttccaggacatactattgaggatgtcaaaaatgcaattggggtcctcatcggaggacttgaatggaatgataacacagttcgagtctctaaaaatctacagagattcgcttggagaagcagtaatgagaatgggggacctccacttactccgactcggtccgcactag

SEQ ID NO: 1665 - DNA, 183 bp, synthetic construct
  misc_feature 1..183: note = Synthetic
  source 1..183: mol_type = other DNA
atggcgtcccaaggcaccaaacggtcttatgaacagatggaaactgatggggatcgccagaatgcaactgagattagggcatccgtcgggaagatgattgatggaattgggagattctacatccaaatgtgcactgaacttaaactcagtgatcacgactcggtccgcactagcctgaggtaa

SEQ ID NO: 1666 - DNA, 111 bp, synthetic construct
  misc_feature 1..111: note = Synthetic
  source 1..111: mol_type = other DNA
gtgacatcaaaatcgccgcgtcccaaggcaccaaacggtcttatgaacagatggaaactgatggggatcgccagaatgcaactgagattagggcatccgtcgggaagatga

SEQ ID NO: 1667 - DNA, 192 bp, synthetic construct
  source 1..192: mol_type = other DNA
  misc_feature 1..192: note = Synthetic
atcaaaatcgccgcgtcccaaggcaccaaacggtcttatgaacagatggaaactgatggggatcgccagaatgcaactgagattagggcatccgtcgggaagatgattgatggaattgggagattctacatccaaatgtgcactgaacttaaactcagtgatcacgactcggtccgcactagcctgaggtaa

SEQ ID NO: 1668 - DNA, 144 bp, synthetic construct
  source 1..144: mol_type = other DNA
  misc_feature 1..144: note = Synthetic
atgcttcaatccaatgattgtcgagcttgcggaaaaggcaatgaaagaatatggggaagatccgaaaatcgaaacgaacaaatttgccgcaatatgcacgcacttagaagtctgtttcatgtattcagatttccactttattga

SEQ ID NO: 1669 - DNA, 204 bp, synthetic construct
  source 1..204: mol_type = other DNA
  misc_feature 1..204: note = Synthetic
atggaagactttgtgcgacaatgcttcaatccaatgattgtcgagcttgcggaaaaggcaatgaaagaatatggggaagatccgaaaatcgaaacgaacaaatttgccgcaatatgcacgcacttagaagtctgtttcatgtattcagatttccactttattgatgaacggggcgacgactcggtccgcactagcctgaggtaa

SEQ ID NO: 1670 - DNA, 201 bp, synthetic construct
  misc_feature 1..201: note = Synthetic
  source 1..201: mol_type = other DNA
ctgagtgacatcaacatcatggcgtctcagggcaccaaacgatcttatgaacagatggaaactggtggagaacgccagaatgctactgagatcagagcatctgttggaagaatggttggtggaattgggaggttttatatacagatgtgcactgaactcaaactcagcgactacgactcggtccgcactagcctgaggtaa

SEQ ID NO: 1671 - DNA, 192 bp, synthetic construct
  misc_feature 1..192: note = Synthetic
  source 1..192: mol_type = other DNA
atcaacatcgccgcgtctcagggcaccaaacgatcttatgaacagatggaaactggtggagaacgccagaatgctactgagatcagagcatctgttggaagaatggttggtggaattgggaggttttatatacagatgtgcactgaactcaaactcagcgactacgactcggtccgcactagcctgaggtaa

SEQ ID NO: 1672 - DNA, 192 bp, synthetic construct
  source 1..192: mol_type = other DNA
  misc_feature 1..192: note = Synthetic
atggatccaaacactgtgtcaagctttcaggacatactgctgaggatgtcaaaaatgcagttggagtcctcatcggaggacttgaatggaatgataacacagttcgagtctctgaaactctacagagattcgcttggagaagcagtaatgagaatgggagacctccactcactccgactcggtccgcactag

SEQ ID NO: 1673 - DNA, 192 bp, synthetic construct
  misc_feature 1..192: note = Synthetic
  source 1..192: mol_type = other DNA
atggatccaaacactgtgtcaagctttcaggtagattgctttctttggcatgtccgcaaacgagttgcagaccaagaactaggtgatgccccattccttgatcggcttcgccgagatcagaaatccctaagaggaaggggcagcactcttggtctggacatcgagacagccacacgactcggtccgcactag

SEQ ID NO: 1674 - DNA, 189 bp, synthetic construct
  source 1..189: mol_type = other DNA
  misc_feature 1..189: note = Synthetic
atagcaaaggaatacaaaagactatgccaagatgctaaggcagctcaaatgatgacagtaggaactgtatcaaactacactacgttcaagaaatggactacatcaaggaaggaaaagaatccttcactaagaatgagatgggcaatgagcagcaaattccccgactcggtccgcactagcctgaggtaa

SEQ ID NO: 1675 - DNA, 21 bp, synthetic construct
  source 1..21: mol_type = other DNA
  misc_feature 1..21: note = Synthetic
atgctaaggcagctcaaatga

SEQ ID NO: 1676 - DNA, 87 bp, synthetic construct
  source 1..87: mol_type = other DNA
  misc_feature 1..87: note = Synthetic
atggactacatcaaggaaggaaaagaatccttcactaagaatgagatgggcaatgagcagcaaattccccgactcggtccgcactag

SEQ ID NO: 1677 - DNA, 24 bp, synthetic construct
  misc_feature 1..24: note = Synthetic
  source 1..24: mol_type = other DNA
atggggatcacgaaagaaaaataa

SEQ ID NO: 1678 - DNA, 198 bp, synthetic construct
  misc_feature 1..198: note = Synthetic
  source 1..198: mol_type = other DNA
atggcacatgaaatactgattgctgaaacagaggcatttctaaaaaatgttgctcctgagaccaggacagcaataatttcagcaataacaggaggaaaatcagcctgcaaatcagcagctaaactgattaagaatgaacatcttcccctaatgtctggagaagccaccacaatgccgactcggtccgcactagcctga

SEQ ID NO: 1679 - DNA, 27 bp, synthetic construct
  source 1..27: mol_type = other DNA
  misc_feature 1..27: note = Synthetic
atgccgactcggtccgcactagcctga

SEQ ID NO: 1680 - DNA, 192 bp, synthetic construct
  source 1..192: mol_type = other DNA
  misc_feature 1..192: note = Synthetic
atgtccgacaaaacagtcaaatcaacaaatttaatggcatttgtagccacaaaaatgttagagagacaagaagatttagacacatgcactgaaatgcaagtagaaaaaatgaaaacgtcaacaaaagccaggttgaaaacagaatcttcttttgcacctagaacatgggaagatcgactcggtccgcactag

SEQ ID NO: 1681 - DNA, 138 bp, synthetic construct
  misc_feature 1..138: note = Synthetic
  source 1..138: mol_type = other DNA
atgttagagagacaagaagatttagacacatgcactgaaatgcaagtagaaaaaatgaaaacgtcaacaaaagccaggttgaaaacagaatcttcttttgcacctagaacatgggaagatcgactcggtccgcactag

SEQ ID NO: 1682 - DNA, 54 bp, synthetic construct
  misc_feature 1..54: note = Synthetic
  source 1..54: mol_type = other DNA
aagatgtctttgctgggaaaaacacagatcttgaggctctcatggaatggctaa

SEQ ID NO: 1683 - DNA, 219 bp, synthetic construct
  misc_feature 1..219: note = Synthetic
  source 1..219: mol_type = other DNA
aggtcaattatattcaatatggaaagaataaaagaactaagagatctaatgtcgcagtcccgcactcgcgagatactaacaaaaaccactgtggatcatatggccataatcaagaaatacacatcaggaagacaagagaagaaccctgctctcagaatgaaatggatgatggcaatgaaatatccaatcaccgactcggtccgcactagcctgaggtaa

SEQ ID NO: 1684 - DNA, 219 bp, synthetic construct
  source 1..219: mol_type = other DNA
  misc_feature 1..219: note = Synthetic
aggtcaattatattcaatatggaaagaataaaagaactacggaatctgatgtcgcagtctcgcactcgcgagatactaacaaaaaccacagtggaccatatggccataattaagaagtacacatcagggagacaggaaaagaacccgtcacttaggatgaaatggatgatggcaatgaaatatccaattaccgactcggtccgcactagcctgaggtaa

SEQ ID NO: 1685 - DNA, 219 bp, synthetic construct
  source 1..219: mol_type = other DNA
  misc_feature 1..219: note = Synthetic
aggtcaattatattcaatgccgaaagaataaaagaactaagagatctaatgtcgcagtcccgcactcgcgagatactaacaaaaaccactgtggatcatatggccataatcaagaaatacacatcaggaagacaagagaagaaccctgctctcagaatgaaatggatgatggcaatgaaatatccaatcaccgactcggtccgcactagcctgaggtaa

SEQ ID NO: 1686 - DNA, 15 bp, synthetic construct
  misc_feature 1..15: note = Synthetic
  source 1..15: mol_type = other DNA
atgccgaaagaataa

SEQ ID NO: 1687 - DNA, 219 bp, synthetic construct
  misc_feature 1..219: note = Synthetic
  source 1..219: mol_type = other DNA
aggtcaattatattcaatgccgaaagaataaaagaactacggaatctgatgtcgcagtctcgcactcgcgagatactaacaaaaaccacagtggaccatatggccataattaagaagtacacatcagggagacaggaaaagaacccgtcacttaggatgaaatggatgatggcaatgaaatatccaattaccgactcggtccgcactagcctgaggtaa

SEQ ID NO: 1688 - DNA, 219 bp, synthetic construct
  source 1..219: mol_type = other DNA
  misc_feature 1..219: note = Synthetic
aggtcaattatattcagtatggaaagaataaaagaactacggaacctgatgtcgcagtctcgcactcgcgagatactgacaaaaaccacagtggaccatatggccataattaagaagtacacatcggggagacaggaaaagaacccgtcacttaggatgaaatggatgatggcaatgaaatacccaatcaccgactcggtccgcactagcctgaggtaa

SEQ ID NO: 1689 - DNA, 213 bp, synthetic construct
  source 1..213: mol_type = other DNA
  misc_feature 1..213: note = Synthetic
attatattcagtgccgaaagaataaaagaactacggaacctgatgtcgcagtctcgcactcgcgagatactgacaaaaaccacagtggaccatatggccataattaagaagtacacatcggggagacaggaaaagaacccgtcacttaggatgaaatggatgatggcaatgaaatacccaatcaccgactcggtccgcactagcctgaggtaa

SEQ ID NO: 1690 - DNA, 54 bp, synthetic construct
  misc_feature 1..54: note = Synthetic
  source 1..54: mol_type = other DNA
ctgataactctgttgtcctatcccgcaaatatacatcgtttccatggctgctag

SEQ ID NO: 1691 - DNA, 168 bp, synthetic construct
  source 1..168: mol_type = other DNA
  misc_feature 1..168: note = Synthetic
atggctgctaggctgtgctgccaactggatcctgcgcgggacgtcctttgtttacgtcccgtcggcgctgaatcctgcggacgacccttctcggggtcgcttgggactctctcgtccccttctccgtctgccgttccgaccgactcggtccgcactagcctgaggtaa

SEQ ID NO: 1692 - DNA, 54 bp, synthetic construct
  misc_feature 1..54: note = Synthetic
  source 1..54: mol_type = other DNA
ctgataactctgttgtcctatcccgcaaatatacatcgtttccgccgctgctag

SEQ ID NO: 1693 - DNA, 177 bp, synthetic construct
  source 1..177: mol_type = other DNA
  misc_feature 1..177: note = Synthetic
atcgtttccgccgctgctaggctgtgctgccaactggatcctgcgcgggacgtcctttgtttacgtcccgtcggcgctgaatcctgcggacgacccttctcggggtcgcttgggactctctcgtccccttctccgtctgccgttccgaccgactcggtccgcactagcctgaggtaa

SEQ ID NO: 1694 - DNA, 36 bp, synthetic construct
  misc_feature 1..36: note = Synthetic
  source 1..36: mol_type = other DNA
ataacaaagatctcgactcggtccgcactagcctga

SEQ ID NO: 1695 - DNA, 192 bp, synthetic construct
  source 1..192: mol_type = other DNA
  misc_feature 1..192: note = Synthetic
atggatccaaacactgtgtcaagctttcaggtagattgctttctttggcatgtccgcaaacgagttgcagaccaagaactaggtgatgccccattccttgatcggcttcgccgagatcagaaatccctaagaggaaggggcagcactcttggtgccgacatcgagacagccacacgactcggtccgcactag

SEQ ID NO: 1696 - DNA, 15 bp, synthetic construct
  misc_feature 1..15: note = Synthetic
  source 1..15: mol_type = other DNA
gtgacaaagacataa

SEQ ID NO: 1697 - DNA, 192 bp, synthetic construct
  misc_feature 1..192: note = Synthetic
  source 1..192: mol_type = other DNA
atggattccaacactgtgtcaagctttcaggacatactgacgaggatgtcaaaaatgcaattggggtcctcatcggaggacttgaatggaatgataacacagttcgagtctctgaaactctacagagattcacttggagaagcagtgatgagaatgggagatctccactccctccgactcggtccgcactag

SEQ ID NO: 1698 - DNA, 192 bp, synthetic construct
  source 1..192: mol_type = other DNA
  misc_feature 1..192: note = Synthetic
atggattccaacactgtgtcaagtttccaggacatactattgaggatgtcaaaaatgcaattggggtcctcatcggaggacttgaatggaatgataacacagttcgagtctctaaaaatctacagagattcgcttggagaagcagtaatgagaatgggggacctccacttactccgactcggtccgcactag

SEQ ID NO: 1699 - DNA, 192 bp, synthetic construct
  source 1..192: mol_type = other DNA
  misc_feature 1..192: note = Synthetic
atggattccaacactgtgtcaagtttccaggtagattgctttctttggcatatccggaaacaagttgtagaccaagaactgagtgatgccccattccttgatcggcttcgccgagatcagaggtccctaaggggaagaggcaatactctcggtctagacatcaaagcagccacccgactcggtccgcactag

SEQ ID NO: 1700 - DNA, 195 bp, synthetic construct
  source 1..195: mol_type = other DNA
  misc_feature 1..195: note = Synthetic
atagccgatccaaacactgtgtcaagctttcaggacatactgctgaggatgtcaaaaatgcagttggagtcctcatcggaggacttgaatggaatgataacacagttcgagtctctgaaactctacagagattcgcttggagaagcagtaatgagaatgggagacctccactcactccgactcggtccgcactag

SEQ ID NO: 1701 - DNA, 174 bp, synthetic construct
  misc_feature 1..174: note = Synthetic
  source 1..174: mol_type = other DNA
acgcctatcagaaacgaatgggggtgcagatgcaacgattcaagtgacccccttgttgttgctgcgagtatcattgggatcttgcactttatattgtggattcttgatcgtctttttttcaaatgcatttatcgcttctttaaacacggtccgactcggtccgcactagcctga

SEQ ID NO: 1702 - DNA, 174 bp, synthetic construct
  source 1..174: mol_type = other DNA
  misc_feature 1..174: note = Synthetic
acgtacgttctctctatcgtcccgtcaggccccctcaaagccgagatcgcacagagacttgaagatgtctttgctgggaagaacacagatcttgaggctctcatggaatggctaaagacaagaccaatcctgtcacctctgactaaggggacgactcggtccgcactagcctga

SEQ ID NO: 1703 - DNA, 51 bp, synthetic construct
  misc_feature 1..51: note = Synthetic
  source 1..51: mol_type = other DNA
atgtctttgctgggaagaacacagatcttgaggctctcatggaatggctaa

SEQ ID NO: 1704 - DNA, 168 bp, synthetic construct
  misc_feature 1..168: note = Synthetic
  source 1..168: mol_type = other DNA
atgactaggataactatccttcagattatcctgacactaacacttccggtcatgtgtcaagtctcatttgataaccttgaacaagtaggggtcatgtttgataagcccaagttcctgaagatcacgggtccggctagtaccgactcggtccgcactagcctgaggtaa

SEQ ID NO: 1705 - DNA, 159 bp, synthetic construct
  misc_feature 1..159: note = Synthetic
  source 1..159: mol_type = other DNA
ataactatccttcagattatcctgacactaacacttccggtcatgtgtcaagtctcatttgataaccttgaacaagtaggggtcatgtttgataagcccaagttcctgaagatcacgggtccggctagtaccgactcggtccgcactagcctgaggtaa

SEQ ID NO: 1706 - DNA, 48 bp, synthetic construct
  misc_feature 1..48: note = Synthetic
  source 1..48: mol_type = other DNA
atcaacaaaaacaactgcaccaacacgactcggtccgcactagcctga

SEQ ID NO: 1707 - DNA, 201 bp, synthetic construct
  source 1..201: mol_type = other DNA
  misc_feature 1..201: note = Synthetic
atggaaatcaacccatatttgatgtttctaaacaacgacgtcacatcgctgatatcaacaacatacccctatacagggccacctccaatgtcacatggatcatcaaccaaatacactttggaaactattaaaagaacatatgactactcaagaacatcagttgaaaaaacatcgaaagttttccgactcggtccgcactag

SEQ ID NO: 1708 - DNA, 180 bp, synthetic construct
  source 1..180: mol_type = other DNA
  misc_feature 1..180: note = Synthetic
atgtttctaaacaacgacgtcacatcgctgatatcaacaacatacccctatacagggccacctccaatgtcacatggatcatcaaccaaatacactttggaaactattaaaagaacatatgactactcaagaacatcagttgaaaaaacatcgaaagttttccgactcggtccgcactag

SEQ ID NO: 1709 - DNA, 213 bp, synthetic construct
  misc_feature 1..213: note = Synthetic
  source 1..213: mol_type = other DNA
ttggaaatgtcttttctattgacaatagcaaaggaatacaaaagactatgccaagatgctaaggcagctcaaatgatgacagtaggaactgtatcaaactacactacgttcaagaaatggactacatcaaggaaggaaaagaatccttcactaagaatgagatgggcaatgagcagcaaattccccgactcggtccgcactagcctgaggtaa

SEQ ID NO: 1710 - DNA, 78 bp, synthetic construct
  misc_feature 1..78: note = Synthetic
  source 1..78: mol_type = other DNA
aggcagcaatttcaacaacattcccatacaccggtgttcccccttattctcatggaacgggaacaggctacacaatag

SEQ ID NO: 1711 - DNA, 195 bp, synthetic construct
  misc_feature 1..195: note = Synthetic
  source 1..195: mol_type = other DNA
atgaaggcaataattgtactactcatggtagtaacatccaatgcagatcgaatctgcactgggataacatcgtcaaactcacctcatgtggttaaaactgccactcaaggggaagtcaatgtgactggtgtgataccactaacaacaacacctaccaaatctcatttcgactcggtccgcactagcctgaggtaa

SEQ ID NO: 1712 - DNA, 168 bp, synthetic construct
  source 1..168: mol_type = other DNA
  misc_feature 1..168: note = Synthetic
atgctgtatgtctaccccgcgtccgtgcgcagggcaatcgcgtgcttgctgcgctgcaacctcgacatttcgcgcctgtcctccgcacacgcgcgcgtgctgctggagtatggcatgcacggggacctccctgtggcgctcgactcggtccgcactagcctgaggtaa

SEQ ID NO: 1713 - DNA, 54 bp, synthetic construct
  source 1..54: mol_type = other DNA
  misc_feature 1..54: note = Synthetic
atggcatgcacggggacctccctgtggcgctcgactcggtccgcactagcctga

SEQ ID NO: 1714 - DNA, 69 bp, synthetic construct
  source 1..69: mol_type = other DNA
  misc_feature 1..69: note = Synthetic
atcttaggggactcaacccttggcaatgacagtctgagagcatacaacgacaaggatcttctcaactga

SEQ ID NO: 1715 - DNA, 27 bp, synthetic construct
  misc_feature 1..27: note = Synthetic
  source 1..27: mol_type = other DNA
atgaaacaaaggcgtggtttagagtag

SEQ ID NO: 1716 - DNA, 27 bp, synthetic construct
  source 1..27: mol_type = other DNA
  misc_feature 1..27: note = Synthetic
atggctaagatttcaatgactcgttaa

SEQ ID NO: 1717 - DNA, 36 bp, synthetic construct
  misc_feature 1..36: note = Synthetic
  source 1..36: mol_type = other DNA
ttgataccgactactttgatctttttcccatattag

SEQ ID NO: 1718 - DNA, 168 bp, synthetic construct
  source 1..168: mol_type = other DNA
  misc_feature 1..168: note = Synthetic
atgagctctatcttagacaaaatcaaaagatggcagaacaaaagggctacccaaacatcaagctcaatgatgagttccttaacgaaggtctcaacatcctcgggtgtttcctcagaggaaatgcccaaactgccccaacccgactcggtccgcactagcctgaggtaa

SEQ ID NO: 1719 - DNA, 150 bp, synthetic construct
  misc_feature 1..150: note = Synthetic
  source 1..150: mol_type = other DNA
ctgtcaggtctccgtagatcgctcccgggtgcccgagacggggggcagatggctataaaaacccaagtagcggcgcgccccggcgctcagtcgcggctgagcgtgtggaggacggggtggagcgggtcgactcggtccgcactagcctga

SEQ ID NO: 1720 - DNA, 135 bp, synthetic construct
  source 1..135: mol_type = other DNA
  misc_feature 1..135: note = Synthetic
ttgtcaagtcctctttccagagcccgcgtccttccctttgaggccgtggccgcgcttggttgttctcgacggccgcggttgcgcgcgcggcgcaaggcgttgttgccgcgcgcgcaccgactcggtccgcactag

SEQ ID NO: 1721 - DNA, 12 bp, synthetic construct
  misc_feature 1..12: note = Synthetic
  source 1..12: mol_type = other DNA
atgattacctaa

SEQ ID NO: 1722 - DNA, 201 bp, synthetic construct
  misc_feature 1..201: note = Synthetic
  source 1..201: mol_type = other DNA
ctgaactcttggcagacgacttctttggtccagatggccgacgtggatgagctcgaggatcccatggaggagatgacctcctacacgtttgcccgcttcctccgcagtccggagactgaggcctttgtccgtaaccttgaccgtccacctcagatgccggccatgcgctatgtcgactcggtccgcactagcctgaggtaa

SEQ ID NO: 1723 - DNA, 78 bp, synthetic construct
  misc_feature 1..78: note = Synthetic
  source 1..78: mol_type = other DNA
aggcctttgtccgtaaccttgaccgtccacctcagatgccggccatgcgctatgtcgactcggtccgcactagcctga

SEQ ID NO: 1724 - DNA, 201 bp, synthetic construct
  misc_feature 1..201: note = Synthetic
  source 1..201: mol_type = other DNA
ctgaactcttggcagacgacttctttggtccagatggccgacgtggatgagctcgaggatcccatggaggagatgacctcctacacgtttgcccgcttcctccgcagtccggagactgaggcctttgtccgtaaccttgaccgtccacctcagatgccggccatgcgctttgtcgactcggtccgcactagcctgaggtaa

SEQ ID NO: 1725 - DNA, 42 bp, synthetic construct
  source 1..42: mol_type = other DNA
  misc_feature 1..42: note = Synthetic
acgtcctcctcgtcctccccccacggcctgccccatgtctaa

SEQ ID NO: 1726 - DNA, 180 bp, synthetic construct
  misc_feature 1..180: note = Synthetic
  source 1..180: mol_type = other DNA
acggcctgccccatgtctaacaccgcgccgggacccacggtggccaacaagcgggacgaaaaacaccgtcacgtcgtcaacgtcgttttggagttgccgaccgagatctcagaggccacccacccggtgctggccaccatgctgagcaagtacgactcggtccgcactagcctgaggtaa

SEQ ID NO: 1727 - DNA, 42 bp, synthetic construct
  misc_feature 1..42: note = Synthetic
  source 1..42: mol_type = other DNA
acgtcctcctcgtcctccccccacggcctgccccgcctctaa

SEQ ID NO: 1728 - DNA, 141 bp, synthetic construct
  source 1..141: mol_type = other DNA
  misc_feature 1..141: note = Synthetic
gtggccaacaagcgggacgaaaaacaccgtcacgtcgtcaacgtcgttttggagttgccgaccgagatctcagaggccacccacccggtgctggccaccatgctgagcaagtacgactcggtccgcactagcctgaggtaa

SEQ ID NO: 1729 - DNA, 207 bp, synthetic construct
  source 1..207: mol_type = other DNA
  misc_feature 1..207: note = Synthetic
ctgagtgacatcaacatcatggcgtcgcaaggcaccaaacgatcctatgaacagatggaaactggtggagaacgccagaatgccactgagatcagggcatctgttggaagaatggttggtggaattgggaggttttacgtacagatgtgcactgaactcaaactcagcgaccaagaaggcgactcggtccgcactagcctgaggtaa

SEQ ID NO: 1730 - DNA, 174 bp, synthetic construct
  misc_feature 1..174: note = Synthetic
  source 1..174: mol_type = other DNA
aaggcaccaaacgatcctatgaacagatggaaactggtggagaacgccagaatgccactgagatcagggcatctgttggaagaatggttggtggaattgggaggttttacgtacagatgtgcactgaactcaaactcagcgaccaagaaggcgactcggtccgcactagcctga

SEQ ID NO: 1731 - DNA, 198 bp, synthetic construct
  misc_feature 1..198: note = Synthetic
  source 1..198: mol_type = other DNA
atcaacatcgccgcgtcgcaaggcaccaaacgatcctatgaacagatggaaactggtggagaacgccagaatgccactgagatcagggcatctgttggaagaatggttggtggaattgggaggttttacgtacagatgtgcactgaactcaaactcagcgaccaagaaggcgactcggtccgcactagcctgaggtaa

SEQ ID NO: 1732 - DNA, 156 bp, synthetic construct
  misc_feature 1..156: note = Synthetic
  source 1..156: mol_type = other DNA
atgaacagatggaaactggtggagaacgccagaatgccactgagatcagggcatctgttggaagaatggttggtggaattgggaggttttacgtacagatgtgcactgaactcaaactcagcgaccaagaaggcgactcggtccgcactagcctga

SEQ ID NO: 1733 - DNA, 168 bp, synthetic construct
  source 1..168: mol_type = other DNA
  misc_feature 1..168: note = Synthetic
atggctccacccgtgatcgaagagtacctcggctcgcgcccctccatggagcgctgcgtgctcttgcgcgcgcagcgccgcaacatgtcccgcgtcctcaacttcgataggaagctttttctctctcttgttgtaaagagcgactcggtccgcactagcctgaggtaa

SEQ ID NO: 1734 - DNA, 21 bp, synthetic construct
  source 1..21: mol_type = other DNA
  misc_feature 1..21: note = Synthetic
ctgtcgccgctccacccgtga

SEQ ID NO: 1735 - DNA, 156 bp, synthetic construct
  misc_feature 1..156: note = Synthetic
  source 1..156: mol_type = other DNA
gtgatcgaagagtacctcggctcgcgcccctccatggagcgctgcgtgctcttgcgcgcgcagcgccgcaacatgtcccgcgtcctcaacttcgataggaagctttttctctctcttgttgtaaagagcgactcggtccgcactagcctgaggtaa

SEQ ID NO: 1736 - DNA, 204 bp, synthetic construct
  misc_feature 1..204: note = Synthetic
  source 1..204: mol_type = other DNA
atgactcttcatatgccttgcaagacagtgaaagcactaatcaagtgcagtgagcatggtccagttttcattactatagaggttgatgacatgatatggactcacaaggacttaaaagaagctttatctgatgggatagtgaagtctcatactaacatttacaattgttatttagaaaacatagaacgactcggtccgcactag

SEQ ID NO: 1737 - DNA, 33 bp, synthetic construct
  misc_feature 1..33: note = Synthetic
  source 1..33: mol_type = other DNA
atgcgctctctcggaattacagacaaaccctaa

SEQ ID NO: 1738 - DNA, 201 bp, synthetic construct
  misc_feature 1..201: note = Synthetic
  source 1..201: mol_type = other DNA
ctgaactcttggcagacgacttctttggtccaggccgccgacgtggatgagctcgaggatcccatggaggagatgacctcctacacgtttgcccgcttcctccgcagtccggagactgaggcctttgtccgtaaccttgaccgtccacctcagatgccggccatgcgctatgtcgactcggtccgcactagcctgaggtaa

SEQ ID NO: 1739 - DNA, 201 bp, synthetic construct
  source 1..201: mol_type = other DNA
  misc_feature 1..201: note = Synthetic
ctgaactcttggcagacgacttctttggtccaggccgccgacgtggatgagctcgaggatcccatggaggagatgacctcctacacgtttgcccgcttcctccgcagtccggagactgaggcctttgtccgtaaccttgaccgtccacctcagatgccggccatgcgctttgtcgactcggtccgcactagcctgaggtaa

SEQ ID NO: 1740 - DNA, 186 bp, synthetic construct
  misc_feature 1..186: note = Synthetic
  source 1..186: mol_type = other DNA
ttgaccccaacgatggcgtggcggatgtcacgcagaagtggcgctgtgcgttgtatggcaaggtctacgtgtccgcatccgccttcggtttctatgcccagcctgacggcagcaagcgcaccttttccacgcgggatgactgtgtcgacttcaccttcggaactgcggatacttcgcgcgtcgtga

SEQ ID NO: 1741 - DNA, 219 bp, synthetic construct
  misc_feature 1..219: note = Synthetic
  source 1..219: mol_type = other DNA
ctgaatattagcgcattcattgtctattattaccatatttctaaatccaaaatgtatatgttgagcatcagtactatcgttgatgagtcttatagcatgaattcgcttatcgttatcgggtttatcttctgtcaccttagcaattccttttttattaaactctacataatcataaccatttctattgtttgcgactcggtccgcactagcctgaggtaa

SEQ ID NO: 1742 - DNA, 219 bp, synthetic construct
  misc_feature 1..219: note = Synthetic
  source 1..219: mol_type = other DNA
ctgaatattagcgcattcattgtctattattaccatatttctaaatccaaagcctatatgttgagcatcagtactatcgttgatgagtcttatagcatgaattcgcttatcgttatcgggtttatcttctgtcaccttagcaattccttttttattaaactctacataatcataaccatttctattgtttgcgactcggtccgcactagcctgaggtaa

SEQ ID NO: 1743 - DNA, 219 bp, synthetic construct
  source 1..219: mol_type = other DNA
  misc_feature 1..219: note = Synthetic
acgcactttcttaaaatgtcgctgtttggagacacaattgcctacctgctttcactaatagaagatggagaaggcaaagcagaactagctgaaaaattacactgttggttcggtgggaaagaatttgacctagattctgctttggaatggataaaaaacaaaaggtgcctaactgatatacaaaaagcactcgactcggtccgcactagcctgaggtaa

SEQ ID NO: 1744 - DNA, 30 bp, synthetic construct
  source 1..30: mol_type = other DNA
  misc_feature 1..30: note = Synthetic
atggataaaaaacaaaaggtgcctaactga

SEQ ID NO: 1745 - DNA, 198 bp, synthetic construct
  misc_feature 1..198: note = Synthetic
  source 1..198: mol_type = other DNA
ctgtttggagacacaattgcctacctgctttcactaatagaagatggagaaggcaaagcagaactagctgaaaaattacactgttggttcggtgggaaagaatttgacctagattctgctttggaatggataaaaaacaaaaggtgcctaactgatatacaaaaagcactcgactcggtccgcactagcctgaggtaa

SEQ ID NO: 1746 - DNA, 168 bp, synthetic construct
  misc_feature 1..168: note = Synthetic
  source 1..168: mol_type = other DNA
atgagccggcccgaaggaaggaaaaaccgcggggggagagaagaggttctcgagcagtgggtgagcggaagaaagaagttagaggaactcgagagagacctccggaaggttaagaagaaaatcaagaaacttgaggatgacgactcggtccgcactagcctgaggtaa

SEQ ID NO: 1747 - DNA, 171 bp, synthetic construct
  misc_feature 1..171: note = Synthetic
  source 1..171: mol_type = other DNA
aaggccagccggcccgaaggaaggaaaaaccgcggggggagagaagaggttctcgagcagtgggtgagcggaagaaagaagttagaggaactcgagagagacctccggaaggttaagaagaaaatcaagaaacttgaggatgacgactcggtccgcactagcctgaggtaa

SEQ ID NO: 1748 - DNA, 219 bp, synthetic construct
  source 1..219: mol_type = other DNA
  misc_feature 1..219: note = Synthetic
aggagattttcaaagatgtttttgcttctagcaacaattacagcaataactgcttgccaagcagaaagagaactgatatgcatagtgcaaagagtgaatgaaagcttctctcttcactctggatttggaggaaatgtttacagcatgaagactgagccaatgactggattcacaaacgtgaccaaaggtgccgactcggtccgcactagcctgaggtaa

SEQ ID NO: 1749 - DNA, 219 bp, synthetic construct
  source 1..219: mol_type = other DNA
  misc_feature 1..219: note = Synthetic
aggagattttcaaaggcctttttgcttctagcaacaattacagcaataactgcttgccaagcagaaagagaactgatatgcatagtgcaaagagtgaatgaaagcttctctcttcactctggatttggaggaaatgtttacagcatgaagactgagccaatgactggattcacaaacgtgaccaaaggtgccgactcggtccgcactagcctgaggtaa

SEQ ID NO: 1750 - DNA, 195 bp, synthetic construct
  misc_feature 1..195: note = Synthetic
  source 1..195: mol_type = other DNA
atgtctgaaaataagtcagtgaacacaacaaatatcagagcagcaatctccgaattggcattgggcgcagccagctggatggattcctctgggttaatgactttcgagaaaatgagaaagtctgctgagaattcactgagagtcgaacaggtttatgaaccgagaacttgggcgactcggtccgcactagcctga

SEQ ID NO: 1751 - DNA, 210 bp, synthetic construct
  misc_feature 1..210: note = Synthetic
  source 1..210: mol_type = other DNA
gtgtacaatttcaatgcctctgaaaataagtcagtgaacacaacaaatatcagagcagcaatctccgaattggcattgggcgcagccagctggatggattcctctgggttaatgactttcgagaaaatgagaaagtctgctgagaattcactgagagtcgaacaggtttatgaaccgagaacttgggcgactcggtccgcactagcctga

SEQ ID NO: 1752 - DNA, 24 bp, synthetic construct
  misc_feature 1..24: note = Synthetic
  source 1..24: mol_type = other DNA
atgcctctgaaaataagtcagtga

SEQ ID NO: 1753 - DNA, 198 bp, synthetic construct
  source 1..198: mol_type = other DNA
  misc_feature 1..198: note = Synthetic
gtggatacctcagcatccaaaactctccttcccgaatggatcaggatgccttcttttttgagagggatcctgaagccgaaggagaggcaccacgaaaacaagaatcactctcagatgtcatcggactccttgacgtcgtcttatcctacaagcccacagaaattggagaagacagcgactcggtccgcactagcctga

SEQ ID NO: 1754 - DNA, 198 bp, synthetic construct
  source 1..198: mol_type = other DNA
  misc_feature 1..198: note = Synthetic
gtggatacctcagcatccaaaactctccttcccgagccgatcaggatgccttcttttttgagagggatcctgaagccgaaggagaggcaccacgaaaacaagaatcactctcagatgtcatcggactccttgacgtcgtcttatcctacaagcccacagaaattggagaagacagcgactcggtccgcactagcctga

SEQ ID NO: 1755 - DNA, 90 bp, synthetic construct
  source 1..90: mol_type = other DNA
  misc_feature 1..90: note = Synthetic
ctgtcccagaccagtccagtaatggacgggccagtgcgtgtagtcgtcttccggcttgtccggggcatgtttggtgaaccggtggggtaa

SEQ ID NO: 1756 - DNA, 168 bp, synthetic construct
  misc_feature 1..168: note = Synthetic
  source 1..168: mol_type = other DNA
atgtatcctcgtggagtaaaacgctcacaacatgatcgtcataaacaaaccgccttcagaacgataaaacgttccatcacgcatagaccaaccagcaagttcatcagccatttcgccaaaaattttcgaggaaaactcgccgactcggtccgcactagcctgaggtaa

SEQ ID NO: 1757 - DNA, 36 bp, synthetic construct
  misc_feature 1..36: note = Synthetic
  source 1..36: mol_type = other DNA
atgatcgtcataaacaaaccgccttcagaacgataa

SEQ ID NO: 1758 - DNA, 81 bp, synthetic construct
  source 1..81: mol_type = other DNA
  misc_feature 1..81: note = Synthetic
atggtaggaatcttctcatcatctaggttcacagcacctgaatatattatcttttgtctcaacaccattcttaaaggatga

SEQ ID NO: 1759 - DNA, 21 bp, synthetic construct
  misc_feature 1..21: note = Synthetic
  source 1..21: mol_type = other DNA
attttgaagcgggaggtttga

SEQ ID NO: 1760 - DNA, 42 bp, synthetic construct
  misc_feature 1..42: note = Synthetic
  source 1..42: mol_type = other DNA
ctgggtggccgagaaggaatgggagttgccgccagattctga

SEQ ID NO: 1761 - DNA, 168 bp, synthetic construct
  misc_feature 1..168: note = Synthetic
  source 1..168: mol_type = other DNA
atggcatggagatggtggaaacgaaggcgccgctggtggtggaaacgacgctggacccgtggccgacttcgcggacgacgggctagaccagctggtcgccgccctcgacgaagacgagtaaggagacggagggcttggagcgactcggtccgcactagcctgaggtaa

SEQ ID NO: 1762 - DNA, 36 bp, synthetic construct
  misc_feature 1..36: note = Synthetic
  source 1..36: mol_type = other DNA
atcgccgcgaagaacatcaccgagatcttctgctag

SEQ ID NO: 1763 - DNA, 168 bp, synthetic construct
  source 1..168: mol_type = other DNA
  misc_feature 1..168: note = Synthetic
atgttccagtaccagctcgcgccgccgcgccgctgcgccggctgcgccaccaacttcgtggcctacctgcaggaggaccgcgagcgcatgcgcgccgcgctgctggccaaccctcgcaagctgagcgcgctgcgccgcttcgactcggtccgcactagcctgaggtaa

SEQ ID NO: 1764 - DNA, 12 bp, synthetic construct
  source 1..12: mol_type = other DNA
  misc_feature 1..12: note = Synthetic
atgatattctag

SEQ ID NO: 1765 - DNA, 225 bp, synthetic construct
  misc_feature 1..225: note = Synthetic
  source 1..225: mol_type = other DNA
atgctacctatgatcaccggtgtactggatcccgtgagacatcatcccgtcgtgatcgagctttgcttttgtttcttcacagagctgagaaaattacaatttatcgtagccgacgcggataagttccacgacgacgtatgcggcctgtggaccgaaatctacaggcagatcctgtccaatccggctattaaacccagcgactcggtccgcactagcctgaggtaa

SEQ ID NO: 1766 - DNA, 72 bp, synthetic construct
  source 1..72: mol_type = other DNA
  misc_feature 1..72: note = Synthetic
atgttgaatacaagtctgactcctatacaaaagatcttgacatcgtcaaaaataataaattggatgaaataa

SEQ ID NO: 1767 - DNA, 90 bp, synthetic construct
  source 1..90: mol_type = other DNA
  misc_feature 1..90: note = Synthetic
ctggcgacctatggccattttttctggggtgatgcagtagaaggtaagcgggtcttgttcccagcggtcccatccaaggtccacggctag

SEQ ID NO: 1768 - DNA, 30 bp, synthetic construct
  misc_feature 1..30: note = Synthetic
  source 1..30: mol_type = other DNA
atggccattttttctggggtgatgcagtag

SEQ ID NO: 1769 - DNA, 54 bp, synthetic construct
  misc_feature 1..54: note = Synthetic
  source 1..54: mol_type = other DNA
atgaagggcacgagctgcttcccaaacgactcggtccgcactagcctgaggtaa

SEQ ID NO: 1770 - DNA, 171 bp, synthetic construct
  source 1..171: mol_type = other DNA
  misc_feature 1..171: note = Synthetic
atcatgttaaacagggtacaaatcttgatgaaaacagctaacaattatgaaactattgagatattgcgtaattatttaagactgtatattattttggcacgaaatgaagaaggccgtggtatactaatatacgatgataacatcgactcggtccgcactagcctgaggtaa

SEQ ID NO: 1771 - DNA, 171 bp, synthetic construct
  misc_feature 1..171: note = Synthetic
  source 1..171: mol_type = other DNA
atcgccttaaacagggtacaaatcttgatgaaaacagctaacaattatgaaactattgagatattgcgtaattatttaagactgtatattattttggcacgaaatgaagaaggccgtggtatactaatatacgatgataacatcgactcggtccgcactagcctgaggtaa

SEQ ID NO: 1772 - DNA, 15 bp, synthetic construct
  source 1..15: mol_type = other DNA
  misc_feature 1..15: note = Synthetic
atggaaagtttatag

SEQ ID NO: 1773 - DNA, 15 bp, synthetic construct
  misc_feature 1..15: note = Synthetic
  source 1..15: mol_type = other DNA
atgcgacggctttag

SEQ ID NO: 1774 - DNA, 75 bp, synthetic construct
  misc_feature 1..75: note = Synthetic
  source 1..75: mol_type = other DNA
atgggagcaaccagctggtcatcagccgctgcgcaaacggactcaacgtggtctccttctttatctccatcctga

SEQ ID NO: 1775 - DNA, 102 bp, synthetic construct
  source 1..102: mol_type = other DNA
  misc_feature 1..102: note = Synthetic
acggactgccgcttcttcaacccggattttacaaccagaagaacgaaacttttcctgtcgtccaggactctgttaacttcgactcggtccgcactagcctga

SEQ ID NO: 1776 - DNA, 132 bp, synthetic construct
  misc_feature 1..132: note = Synthetic
  source 1..132: mol_type = other DNA
ttgcaggcgcgaacgtgcacggggacgtgtaaaacccggcgcggcatagcggagccgccgacgactattagagcgtcacagccgaggcggcgcggcgcagcgccggccacgactcggtccgcactagcctga

SEQ ID NO: 1777 - DNA, 168 bp, synthetic construct
  misc_feature 1..168: note = Synthetic
  source 1..168: mol_type = other DNA
atggaagagtgctctcagcacttaccgtacatcgagcaagggatgatgctcgctgagcagttcaagcagaaggccctcggcctcctgcagaccgcgtcccgccaagcagaggttatcacccctgctgtccagaccaactggcagaaactccgactcggtccgcactag

SEQ ID NO: 1778 - DNA, 24 bp, synthetic construct
  misc_feature 1..24: note = Synthetic
  source 1..24: mol_type = other DNA
aggatgtataagtttttatgttaa

SEQ ID NO: 1779 - DNA, 51 bp, synthetic construct
  misc_feature 1..51: note = Synthetic
  source 1..51: mol_type = other DNA
atcactctagccaagaaatatatcgactcggtccgcactagcctgaggtaa

SEQ ID NO: 1780 - DNA, 210 bp, synthetic construct
  source 1..210: mol_type = other DNA
  misc_feature 1..210: note = Synthetic
atattcaatatggaaagaataaaagaactaagaaatctaatgtcgcagtctcgcacccgcgagatactcacaaaaaccaccgtggaccatatggccataatcaagaagtacacatcaggaagacaggagaagaacccagcacttaggatgaaatggatgatggcaatgaaatatccaattaccgactcggtccgcactagcctgaggtaa

SEQ ID NO: 1781 - DNA, 120 bp, synthetic construct
  source 1..120: mol_type = other DNA
  misc_feature 1..120: note = Synthetic
atggccataatcaagaagtacacatcaggaagacaggagaagaacccagcacttaggatgaaatggatgatggcaatgaaatatccaattaccgactcggtccgcactagcctgaggtaa

SEQ ID NO: 1782 - DNA, 162 bp, synthetic construct
  source 1..162: mol_type = other DNA
  misc_feature 1..162: note = Synthetic
acgaggtacgcaagagggtgcactacaatgagcaccgaggaacaatcgaccttgctccgccatcatccatatcgcagggcccgtttatcacgatatgataaggagaccagggcctctttgactgaacaacaccccgactcggtccgcactagcctgaggtaa

SEQ ID NO: 1783 - DNA, 36 bp, synthetic construct
  misc_feature 1..36: note = Synthetic
  source 1..36: mol_type = other DNA
atggacagtgttagccgggaggtcgcgccggggtag

SEQ ID NO: 1784 - DNA, 24 bp, synthetic construct
  misc_feature 1..24: note = Synthetic
  source 1..24: mol_type = other DNA
atgtcgttcacccagttactttaa

SEQ ID NO: 1785 - DNA, 30 bp, synthetic construct
  misc_feature 1..30: note = Synthetic
  source 1..30: mol_type = other DNA
ataaaaatgaagcattacttcccatgctga

SEQ ID NO: 1786 - DNA, 165 bp, synthetic construct
  source 1..165: mol_type = other DNA
  misc_feature 1..165: note = Synthetic
ctgactcgcacaaccgacagcaccatgagctaccccacgagcgaccgcgccgccgcgctggtgcgctgcatgatagcctccggcctagacatctgggccatcgagcgcgaggacctgacgctggcggcgctcatgggcgactcggtccgcactagcctgaggtaa

SEQ ID NO: 1787 - DNA, 24 bp, synthetic construct
  misc_feature 1..24: note = Synthetic
  source 1..24: mol_type = other DNA
atgaagcattacttcccgccctga

SEQ ID NO: 1788 - DNA, 141 bp, synthetic construct
  misc_feature 1..141: note = Synthetic
  source 1..141: mol_type = other DNA
atgagctaccccacgagcgaccgcgccgccgcgctggtgcgctgcatgatagcctccggcctagacatctgggccatcgagcgcgaggacctgacgctggcggcgctcatgggcgactcggtccgcactagcctgaggtaa

SEQ ID NO: 1789 - DNA, 168 bp, synthetic construct
  source 1..168: mol_type = other DNA
  misc_feature 1..168: note = Synthetic
atgactgaatctctagatctagaattggatggaattaacaccgaacagcgcctactagaaaggcgcaaggcggcgtccgagcgagaacgcctaaaacaagaagttgaagacatggttaacctacaccagtgtaaaagaggcgactcggtccgcactagcctgaggtaa

SEQ ID NO: 1790 - DNA, 30 bp, synthetic construct
  misc_feature 1..30: note = Synthetic
  source 1..30: mol_type = other DNA
atggaattaacaccgaacagcgcctactag

SEQ ID NO: 1791 - DNA, 36 bp, synthetic construct
  source 1..36: mol_type = other DNA
  misc_feature 1..36: note = Synthetic
attagctactttaatttgacaggtggaggccactga

SEQ ID NO: 1792 - DNA, 174 bp, synthetic construct
  misc_feature 1..174: note = Synthetic
  source 1..174: mol_type = other DNA
gtggaggccactgaatctctagatctagaattggatggaattaacaccgaacagcgcctactagaaaggcgcaaggcggcgtccgagcgagaacgcctaaaacaagaagttgaagacatggttaacctacaccagtgtaaaagaggcgactcggtccgcactagcctgaggtaa

SEQ ID NO: 1793 - DNA, 24 bp, synthetic construct
  source 1..24: mol_type = other DNA
  misc_feature 1..24: note = Synthetic
atgtggctaatcctaaccccgtag

SEQ ID NO: 1794 - DNA, 75 bp, synthetic construct
  misc_feature 1..75: note = Synthetic
  source 1..75: mol_type = other DNA
atgtctgcagtcgtaatgggcaactatgggatggaaccaactactttgggtgtccgtcgactcggtccgcactag

SEQ ID NO: 1795 - DNA, 225 bp, synthetic construct
  misc_feature 1..225: note = Synthetic
  source 1..225: mol_type = other DNA
ctgtcgtcatcggcgcgcccccatcgcctcccgagcgagcgggccgccgctatcgccatggccccctcgcacgtggataaggtgaatacacggacatggagcgcttctatcgttttcatggtgctgacttttgtcaacgtcagcgtgcatctagtgctgagcaattttccgcacctgggctacccctgcgtctactacgactcggtccgcactagcctgaggtaa

SEQ ID NO: 1796 - DNA, 225 bp, synthetic construct
  source 1..225: mol_type = other DNA
  misc_feature 1..225: note = Synthetic
ctgtcgtcatcggcgcgcccccatcgcctcccgagcgagcgggccgccgctatcgccgccgccccctcgcacgtggataaggtgaatacacggacatggagcgcttctatcgttttcatggtgctgacttttgtcaacgtcagcgtgcatctagtgctgagcaattttccgcacctgggctacccctgcgtctactacgactcggtccgcactagcctgaggtaa

SEQ ID NO: 1797 - DNA, 204 bp, synthetic construct
  source 1..204: mol_type = other DNA
  misc_feature 1..204: note = Synthetic
atggatgtcaatccgaccttacttttcttaaaagtgccagcacaaaatgctataagcacaactttcccttataccggagaccctccttacagccatgggacaggaacaggatacaccatggatactgtcaacaggacacatcagtactcagaaaaggcaagatggacaacaaacaccgactcggtccgcactagcctgaggtaa

SEQ ID NO: 1798 - DNA, 87 bp, synthetic construct
  misc_feature 1..87: note = Synthetic
  source 1..87: mol_type = other DNA
atggatactgtcaacaggacacatcagtactcagaaaaggcaagatggacaacaaacaccgactcggtccgcactagcctgaggtaa

SEQ ID NO: 1799 - DNA, 213 bp, synthetic construct
  misc_feature 1..213: note = Synthetic
  source 1..213: mol_type = other DNA
acgaaaactgaaaatagagagtgcgggagcaagtctgcgcaggacatgatccgcgacgtcctagagcagaaggtgcgcagcctcgagcgccgtgcagttgagagcagcggctacttggacgcgatccttgcgtacttggaagagtcgcgctacccgttgctgcgccacgccaagcgcttgctcttcgactcggtccgcactagcctgaggtaa

SEQ ID NO: 1800 - DNA, 213 bp, synthetic construct
  source 1..213: mol_type = other DNA
  misc_feature 1..213: note = Synthetic
acgaaaactgaaaatagagagtgcgggagcaagtctgcgcaggacgccatccgcgacgtcctagagcagaaggtgcgcagcctcgagcgccgtgcagttgagagcagcggctacttggacgcgatccttgcgtacttggaagagtcgcgctacccgttgctgcgccacgccaagcgcttgctcttcgactcggtccgcactagcctgaggtaa

SEQ ID NO: 1801 - DNA, 39 bp, synthetic construct
  misc_feature 1..39: note = Synthetic
  source 1..39: mol_type = other DNA
atgttctgcccttcaacgactcggtccgcactagcctga

SEQ ID NO: 1802 - DNA, 204 bp, synthetic construct
  misc_feature 1..204: note = Synthetic
  source 1..204: mol_type = other DNA
atacgggtagaatcaaagtgccttgattgcaccaaaatggactcatccaggacaatcgggctgtactttgattttgccctcccttccagcagcctgttagcatttccgattgtcttacaagacacaggagacgggaagaagcaaatcaccccacaatacaggatccagcgtcttgacgactcggtccgcactagcctgaggtaa

SEQ ID NO: 1803 - DNA, 204 bp, synthetic construct
  source 1..204: mol_type = other DNA
  misc_feature 1..204: note = Synthetic
atacgggtagaatcaaagtgccttgattgcaccaaagccgactcatccaggacaatcgggctgtactttgattttgccctcccttccagcagcctgttagcatttccgattgtcttacaagacacaggagacgggaagaagcaaatcaccccacaatacaggatccagcgtcttgacgactcggtccgcactagcctgaggtaa

SEQ ID NO: 1804 - DNA, 114 bp, synthetic construct
  source 1..114: mol_type = other DNA
  misc_feature 1..114: note = Synthetic
atcaggccaacgaccagcatccgcaacagcagcgcccaggcgatctcgcgctcgacgacggctacggcgacgaggcagaacatctcaacccagacgacaagcgccaggaggtag

SEQ ID NO: 1805 - DNA, 204 bp, synthetic construct
  source 1..204: mol_type = other DNA
  misc_feature 1..204: note = Synthetic
atggaagattttgtgcgacaatgcttcaatccgatgattgtcgagcttgcggaaaaaacaatgaaagagtatggggaggacctgaaaatcgaaacaaacaaatttgcagcaatatgcactcacttggaagtatgcttcatgtattcagatttccacttcatcaatgagcaaggcgacgactcggtccgcactagcctgaggtaa

SEQ ID NO: 1806 - DNA, 171 bp, synthetic construct
  source 1..171: mol_type = other DNA
  misc_feature 1..171: note = Synthetic
atgattgtcgagcttgcggaaaaaacaatgaaagagtatggggaggacctgaaaatcgaaacaaacaaatttgcagcaatatgcactcacttggaagtatgcttcatgtattcagatttccacttcatcaatgagcaaggcgacgactcggtccgcactagcctgaggtaa

SEQ ID NO: 1807 - DNA, 198 bp, synthetic construct
  source 1..198: mol_type = other DNA
  misc_feature 1..198: note = Synthetic
atgagtcttctaaccgaggtcgaaacgcctatcagaaacgaatgggggtgcagatgcaacggttcaagtgatcctctcgctattgccgcaaatatcattgggatcttgcacttgatattgtggattcttgatcgtctttttttcaaatgcatttaccgtcgctttaaatacggaccgactcggtccgcactagcctga

SEQ ID NO: 1808 - DNA, 30 bp, synthetic construct
  source 1..30: mol_type = other DNA
  misc_feature 1..30: note = Synthetic
atgggggtgcagatgcaacggttcaagtga

SEQ ID NO: 1809 - DNA, 198 bp, synthetic construct
  misc_feature 1..198: note = Synthetic
  source 1..198: mol_type = other DNA
atgagtcttctaaccgaggtcgaaacgtacgttctctctatcatcccgtcaggccccctcaaagccgagatcgcacagagacttgaagatgtctttgcagggaagaacaccgatcttgaggttctcatggaatggctaaagacaagaccaatcctgtcacctctgactaaggggacgactcggtccgcactagcctga

SEQ ID NO: 1810 - DNA, 78 bp, synthetic construct
  source 1..78: mol_type = other DNA
  misc_feature 1..78: note = Synthetic
aagccgagatcgcacagagacttgaagatgtctttgcagggaagaacaccgatcttgaggttctcatggaatggctaa

SEQ ID NO: 1811 - DNA, 174 bp, synthetic construct
  source 1..174: mol_type = other DNA
  misc_feature 1..174: note = Synthetic
acgcctatcagaaacgaatgggggtgcagatgcaacggttcaagtgatcctctcgctattgccgcaaatatcattgggatcttgcacttgatattgtggattcttgatcgtctttttttcaaatgcatttaccgtcgctttaaatacggaccgactcggtccgcactagcctga

SEQ ID NO: 1812 - DNA, 174 bp, synthetic construct
  misc_feature 1..174: note = Synthetic
  source 1..174: mol_type = other DNA
acgtacgttctctctatcatcccgtcaggccccctcaaagccgagatcgcacagagacttgaagatgtctttgcagggaagaacaccgatcttgaggttctcatggaatggctaaagacaagaccaatcctgtcacctctgactaaggggacgactcggtccgcactagcctga

SEQ ID NO: 1813 - DNA, 51 bp, synthetic construct
  misc_feature 1..51: note = Synthetic
  source 1..51: mol_type = other DNA
atgtctttgcagggaagaacaccgatcttgaggttctcatggaatggctaa

SEQ ID NO: 1814 - DNA, 132 bp, synthetic construct
  source 1..132: mol_type = other DNA
  misc_feature 1..132: note = Synthetic
atggaaatcacactttcggtttcaaattcatttttgaagtcatgtgtgatatcacactgcatgtggctagacttcatggcttgtggccccctaccaaggaaaacatggttgggttttctttggcttttgtga

SEQ ID NO: 1815 - DNA, 54 bp, synthetic construct
  source 1..54: mol_type = other DNA
  misc_feature 1..54: note = Synthetic
atggctaaaggcacagtcccctgcgaagaaccttcgctctctaagacatactga

SEQ ID NO: 1816 - DNA, 48 bp, synthetic construct
  source 1..48: mol_type = other DNA
  misc_feature 1..48: note = Synthetic
atcctgagctacacgatgcccgactcggtccgcactagcctgaggtaa

SEQ ID NO: 1817 - DNA, 24 bp, synthetic construct
  misc_feature 1..24: note = Synthetic
  source 1..24: mol_type = other DNA
atgacagcctatcggtcgcaatga

SEQ ID NO: 1818 - DNA, 45 bp, synthetic construct
  misc_feature 1..45: note = Synthetic
  source 1..45: mol_type = other DNA
atgagaaattttgtcaaaacagtgaaacgttcagagtccggatag

SEQ ID NO: 1819 - DNA, 120 bp, synthetic construct
  source 1..120: mol_type = other DNA
  misc_feature 1..120: note = Synthetic
acggagattcccttgcgcctgcgtgccgtgtgtcaattagctcgagccttgttttacggactcacgatagcattcttggtctacgggacagacgactcggtccgcactagcctgaggtaa

SEQ ID NO: 1820 - DNA, 165 bp, synthetic construct
  misc_feature 1..165: note = Synthetic
  source 1..165: mol_type = other DNA
atgccgagcaggcgctcggatacaagtttttgttgcccgaccccaaggacgacgtctactaccgcccgctccacttccagtatgagtcctacgccaacttcatcaagcaccggcttaaggacatcctcacggtgcggcgcaccgactcggtccgcactagcctga

SEQ ID NO: 1821 - DNA, 42 bp, synthetic construct
  source 1..42: mol_type = other DNA
  misc_feature 1..42: note = Synthetic
ttgttcaaaacagagattccaaaaagctgcagtcaatcataa

SEQ ID NO: 1822 - DNA, 153 bp, synthetic construct
  misc_feature 1..153: note = Synthetic
  source 1..153: mol_type = other DNA
ctgagaaacctcttcgggtccggagattcctttgaacagtacaaccagacaggaatttactctcttaaggaactcgtcgttgctggattgaagagaaaaggaatttataatagaatcagaatcagatgtcatcttgagccccagttcaattga

SEQ ID NO: 1823 - DNA, 72 bp, synthetic construct
  misc_feature 1..72: note = Synthetic
  source 1..72: mol_type = other DNA
atagaatcagaatcagatgtcatcttgagccccagttcaattgaaatgatgcaccgactcggtccgcactag

SEQ ID NO: 1824 - DNA, 219 bp, synthetic construct
  misc_feature 1..219: note = Synthetic
  source 1..219: mol_type = other DNA
atggtgtttgttaccatgcgtagcataaaccacgacgtcttttctattatgttcttggttggtagacttgtcagcctggtatccatgtggtattttggagccaatttagaggaagaggtactattgttcctcacatccctatttggcacgtacacatggactactatgttgtcagccgctaccgctaaggttattgcgactcggtccgcactagcctga

SEQ ID NO: 1825 - DNA, 219 bp, synthetic construct
  misc_feature 1..219: note = Synthetic
  source 1..219: mol_type = other DNA
atggtgtttgttaccatgcgtagcataaaccacgacgtcttttctattatgttcttggttggtagacttgtcagcctggtatccatgtggtattttggagccaatttagaggaagaggtactattgttcctcacatccctatttggcacgtacacatggactactatgttgtcattggctaccgctaaggttattgcgactcggtccgcactagcctga

SEQ ID NO: 1826 - DNA, 195 bp, synthetic construct
  source 1..195: mol_type = other DNA
  misc_feature 1..195: note = Synthetic
atgagcggggggaaggttggcccgcaccggcgcatgcagggtgctgcaccaatccgcgtggagttgggccatcgaaattataaagagcgtcccctaacggattattgtcctcttgtgtcggtgttgttgtctgggtcaccatacacagagagacaggctcgggtgtccgactcggtccgcactagcctgaggtaa

SEQ ID NO: 1827 - DNA, 168 bp, synthetic construct
  misc_feature 1..168: note = Synthetic
  source 1..168: mol_type = other DNA
atggcatcccctgctgcacctcgtgctgtttcctttgccgataacaatgatataacaaatacaaacctgtctcgaggtagaggacgtaatccaaaaccacgagctgcaccaaataacactgtctcttggtacactgggctcgactcggtccgcactagcctgaggtaa

SEQ ID NO: 1828 - DNA, 96 bp, synthetic construct
  misc_feature 1..96: note = Synthetic
  source 1..96: mol_type = other DNA
atacagtccctaatggaatccgataagcctagattaccaaaggtgggggagatctgccggaaggaaactgtgctttgccacggtcagtatcgatga

SEQ ID NO: 1829 - DNA, 177 bp, synthetic construct
  misc_feature 1..177: note = Synthetic
  source 1..177: mol_type = other DNA
ttgccttcgatgtacggcgtcctggctcattactactccttcatcagtagtcccagcgttatggttaattttaagcatcataacgctgtgcagctgttgtgtgcacggacccgagacggcactgccggatgggaacgtttaacccatcacgactcggtccgcactagcctgaggtaa

SEQ ID NO: 1830 - DNA, 204 bp, synthetic construct
  misc_feature 1..204: note = Synthetic
  source 1..204: mol_type = other DNA
gtgctatcgtgctgtcactctttcttgttgccttcggcctacggcgtcctggctcattactactccttcatcagtagtcccagcgttatggttaattttaagcatcataacgctgtgcagctgttgtgtgcacggacccgagacggcactgccggatgggaacgtttaacccatcacgactcggtccgcactagcctgaggtaa

SEQ ID NO: 1831 - DNA, 168 bp, synthetic construct
  misc_feature 1..168: note = Synthetic
  source 1..168: mol_type = other DNA
atggcatcccctgctgcacctcgtgctgtttcctttgccgataacaatgatataacaaatacaaacctatctcgaggtagaggacgtaatccaaaaccacgagctgcaccaaataacactgtctcttggtacactgggctcgactcggtccgcactagcctgaggtaa

SEQ ID NO: 1832 - DNA, 168 bp, synthetic construct
  source 1..168: mol_type = other DNA
  misc_feature 1..168: note = Synthetic
atggcctgcacagcaaagccagcctgcacagcaaaaccaggaaggtcaccaagaagtcaacccacaagagtgcaaagccttccaaaacaagtcagaaaaggaggggtagacgtgctggccgccgtaccactgtcagaagacgactcggtccgcactagcctgaggtaa

SEQ ID NO: 1833 - DNA, 195 bp, synthetic construct
  misc_feature 1..195: note = Synthetic
  source 1..195: mol_type = other DNA
agggaattaaaagaaaactacaacaaagccgcctgcacagcaaagccagcctgcacagcaaaaccaggaaggtcaccaagaagtcaacccacaagagtgcaaagccttccaaaacaagtcagaaaaggaggggtagacgtgctggccgccgtaccactgtcagaagacgactcggtccgcactagcctgaggtaa

SEQ ID NO: 1834 - DNA, 216 bp, synthetic construct
  source 1..216: mol_type = other DNA
  misc_feature 1..216: note = Synthetic
ataccagaggtggttctagaactgcaagagcttgtccaacccactgctgacctgcattgttacgaagaattgacagaagaacctgcagaggaggagcagtgtctcactccctacaagatcgtagctggctgtggttgcggtgcaagacttcgtttatacgtgcttgctacaaatttaggaattcgagcgcaaccgactcggtccgcactagcctga

SEQ ID NO: 1835 - DNA, 216 bp, synthetic construct
  source 1..216: mol_type = other DNA
  misc_feature 1..216: note = Synthetic
atggggcagattgttgccgttttccaagctatccctgagattctaaacgaggcaattaacattgtgataattgtgatcataatgttcaccctcatcaagggcgttttcaatctatacaaatccggtcttttccagctggtcatctttctcctactctgtggcaagcgttgtgactcatcattgctatcaggatcgactcggtccgcactagcctga

SEQ ID NO: 1836 - DNA, 207 bp, synthetic construct
  misc_feature 1..207: note = Synthetic
  source 1..207: mol_type = other DNA
attgttgccgttttccaagctatccctgagattctaaacgaggcaattaacattgtgataattgtgatcataatgttcaccctcatcaagggcgttttcaatctatacaaatccggtcttttccagctggtcatctttctcctactctgtggcaagcgttgtgactcatcattgctatcaggatcgactcggtccgcactagcctga

SEQ ID NO: 1837 - DNA, 192 bp, synthetic construct
  misc_feature 1..192: note = Synthetic
  source 1..192: mol_type = other DNA
ttgactttgtttgctgcagacaccatgacggcgagatatgggttcggatctatctcgtttccgaataaatgtgggatatttttgtctaccactaagaactttatagcccccaacttccccatacactactggacggctcccgcgtttgagttaagagggcgtatcgactcggtccgcactagcctgaggtaa

SEQ ID NO: 1838 - DNA, 27 bp, synthetic construct
  misc_feature 1..27: note = Synthetic
  source 1..27: mol_type = other DNA
atgttccctattggcatcatttattag

SEQ ID NO: 1839 - DNA, 168 bp, synthetic construct
  misc_feature 1..168: note = Synthetic
  source 1..168: mol_type = other DNA
atgacggccataccggtgaccgatatcgccaacgaatacgcggtgaccacgttctcggaggacgggtacccgtgcaacaagaactacgagatcaccagcgggcagatgtccatcctgcgctccgtgcacgagaagctgctcgactcggtccgcactagcctgaggtaa

SEQ ID NO: 1840 - DNA, 165 bp, synthetic construct
  source 1..165: mol_type = other DNA
  misc_feature 1..165: note = Synthetic
acggccataccggtgaccgatatcgccaacgaatacgcggtgaccacgttctcggaggacgggtacccgtgcaacaagaactacgagatcaccagcgggcagatgtccatcctgcgctccgtgcacgagaagctgctcgactcggtccgcactagcctgaggtaa

SEQ ID NO: 1841 - DNA, 108 bp, synthetic construct
  misc_feature 1..108: note = Synthetic
  source 1..108: mol_type = other DNA
ctgggtttagaagggtacataacaaagctgttcccgcgccgcaagactagggtcagtaaaatacgcagccgggtgcttagatctctggtgattagtgggcgccgttaa

SEQ ID NO: 1842 - DNA, 111 bp, synthetic construct
  misc_feature 1..111: note = Synthetic
  source 1..111: mol_type = other DNA
ctggactctttaaccgagctgaaggacacggtagacgacgtgagagccaccttggtggactcggtttcggcgacgtgcgatttggacctggaggttgacgacgccgtctaa

SEQ ID NO: 1843 - DNA, 207 bp, synthetic construct
  source 1..207: mol_type = other DNA
  misc_feature 1..207: note = Synthetic
atgaactggcttaagtctgctgctaagctgctggctgctgaggtcaaagataagaagactggagagattcttcgcaagcgttgcgctgtgcattgggtaactcctgatggtttccctgtgtggcaggaatacaagaagcctattcagacgcgcttgaacctgatgttcctcggtcagttccgctcgactcggtccgcactagcctga

SEQ ID NO: 1844 - DNA, 84 bp, synthetic construct
  misc_feature 1..84: note = Synthetic
  source 1..84: mol_type = other DNA
ctgctgctaagctgctggctgctgaggtcaaagataagaagactggagagattcttcgcaagcgttgcgctgtgcattgggtaa

SEQ ID NO: 1845 - DNA, 51 bp, synthetic construct
  misc_feature 1..51: note = Synthetic
  source 1..51: mol_type = other DNA
atggtttccctgtgtggcaggaatacaagaagcctattcagacgcgcttga

SEQ ID NO: 1846 - DNA, 207 bp, synthetic construct
  source 1..207: mol_type = other DNA
  misc_feature 1..207: note = Synthetic
atgaactggcttaagtctgctgctaagctgctggctgctgaggtcaaagataagaagagccgagagattcttcgcaagcgttgcgctgtgcattgggtaactcctgatggtttccctgtgtggcaggaatacaagaagcctattcagacgcgcttgaacctgatgttcctcggtcagttccgctcgactcggtccgcactagcctga

SEQ ID NO: 1847 - DNA, 183 bp, synthetic construct
  source 1..183: mol_type = other DNA
  misc_feature 1..183: note = Synthetic
aagctgctggctgctgaggtcaaagataagaagactggagagattcttcgcaagcgttgcgctgtgcattgggtaactcctgatggtttccctgtgtggcaggaatacaagaagcctattcagacgcgcttgaacctgatgttcctcggtcagttccgctcgactcggtccgcactagcctga

SEQ ID NO: 1848 - DNA, 24 bp, synthetic construct
  source 1..24: mol_type = other DNA
  misc_feature 1..24: note = Synthetic
ataaagggtattgttttcatatag

SEQ ID NO: 1849 - DNA, 39 bp, synthetic construct
  misc_feature 1..39: note = Synthetic
  source 1..39: mol_type = other DNA
atgttattcaaaacagaagttccaaaaaactgcagctaa

SEQ ID NO: 1850 - DNA, 63 bp, synthetic construct
  misc_feature 1..63: note = Synthetic
  source 1..63: mol_type = other DNA
atgacattaaaagagaccaccagacagacaacacacgactcggtccgcactagcctgaggtaa

SEQ ID NO: 1851 - DNA, 93 bp, synthetic construct
  source 1..93: mol_type = other DNA
  misc_feature 1..93: note = Synthetic
ctggagctgctgctgcgcatggagaagacgctcaccgagcaggtggtggagaagaaggtggaggacattgctacgcacgtggaggacttttag

SEQ ID NO: 1852 - DNA, 192 bp, synthetic construct
  source 1..192: mol_type = other DNA
  misc_feature 1..192: note = Synthetic
ttgactttgtttgctgcagacaccgccacggcgagatatgggttcggatctatctcgtttccgaataaatgtgggatatttttgtctaccactaagaactttatagcccccaacttccccatacactactggacggctcccgcgtttgagttaagagggcgtatcgactcggtccgcactagcctgaggtaa

SEQ ID NO: 1853 - DNA, 168 bp, synthetic construct
  misc_feature 1..168: note = Synthetic
  source 1..168: mol_type = other DNA
atggataaaactttatctagagaagaggcaaagcagctaatgcaacttttatgtttggacatgagttgctggggcaatttaccattaatgagaagacaatacttagtaaagtgcaaagaatatcatccagataaaggaggcgactcggtccgcactagcctgaggtaa

SEQ ID NO: 1854 - DNA, 114 bp, synthetic construct
  misc_feature 1..114: note = Synthetic
  source 1..114: mol_type = other DNA
ttggacatgagttgctggggcaatttaccattaatgagaagacaatacttagtaaagtgcaaagaatatcatccagataaaggaggcgactcggtccgcactagcctgaggtaa

SEQ ID NO: 1855 - DNA, 168 bp, synthetic construct
  source 1..168: mol_type = other DNA
  misc_feature 1..168: note = Synthetic
atcatagccatgatggaaagtgcaagaccagaagatgtgtctttccaggggcggggagtcttcgagctctcggacgaaaaggcagcgagcccgatcgtgccttcctttgacatgagtaatgaaggatcttatttcttcggagacaatgcagaggagtacgacaattaa

SEQ ID NO: 1856 - DNA, 84 bp, synthetic construct
  source 1..84: mol_type = other DNA
  misc_feature 1..84: note = Synthetic
ctgctcaaatcaaccagatttctggcaacagttcaaaaaaagaagaagaaaagaaaaagcaacaaatgtttacgaatattctag

SEQ ID NO: 1857 - DNA, 174 bp, synthetic construct
  misc_feature 1..174: note = Synthetic
  source 1..174: mol_type = other DNA
ttgtcgatgaacacagggaggagctcactcttgagaatattagagtgttcttcctccgtgcgaatgaggctaaacagaagctccgtaagagttcggcaaagctcgctaaccttaaatttggcacttggaaggtcactgttgttaaccgactcggtccgcactagcctgaggtaa

SEQ ID NO: 1858 - DNA, 105 bp, synthetic construct
  source 1..105: mol_type = other DNA
  misc_feature 1..105: note = Synthetic
atttgggcttttgttgtgagcatcaccaacacgtacatctacgcgtacctgacatggccgcgcccaggggcagacccaaaaaggaccttacgatggaagacctaa

SEQ ID NO: 1859 - DNA, 168 bp, synthetic construct
  source 1..168: mol_type = other DNA
  misc_feature 1..168: note = Synthetic
atggccgcgcccaggggcagacccaaaaaggaccttacgatggaagacctaaccgcaaagataagccaattgactgtggagaatcgggagcttcggaaagcactgggatccactgccgatccgagagatcggcctctgaccgactcggtccgcactagcctgaggtaa

SEQ ID NO: 1860 - DNA, 156 bp, synthetic construct
  source 1..156: mol_type = other DNA
  misc_feature 1..156: note = Synthetic
acgagctcacacttgagaatattagggtcttcttcctgcgcgcgaatgaggctaagcagaagctccgtaagagttcggcaaagctcgctaaccttaaatttggcacttggaaggtccctgttgttaatcgactcggtccgcactagcctgaggtaa

SEQ ID NO: 1861 - DNA, 204 bp, synthetic construct
  source 1..204: mol_type = other DNA
  misc_feature 1..204: note = Synthetic
ttgatctgtagttatgaaaaaatgggacaagtcaaaatggagtcctatataattgacacttatcagggggttccctacactgcagccgttcaggttgacctcattgaaaaagactctaaccctgcaacactgactgtatggtttcccctattccagtcaagtacgcctgccccagtcgactcggtccgcactagcctgaggtaa

SEQ ID NO: 1862 - DNA, 204 bp, synthetic construct
  misc_feature 1..204: note = Synthetic
  source 1..204: mol_type = other DNA
ttgatctgtagttatgaaaaaatgggacaagtcaaagccgagtcctatataattgacacttatcagggggttccctacactgcagccgttcaggttgacctcattgaaaaagactctaaccctgcaacactgactgtatggtttcccctattccagtcaagtacgcctgccccagtcgactcggtccgcactagcctgaggtaa

SEQ ID NO: 1863 - DNA, 69 bp, synthetic construct
  misc_feature 1..69: note = Synthetic
  source 1..69: mol_type = other DNA
atactgacggaggagctgcagctgttgtgcccggagtgtcgcggaaactgcaagcatggcggatcctaa

SEQ ID NO: 1864 - DNA, 168 bp, synthetic construct
  misc_feature 1..168: note = Synthetic
  source 1..168: mol_type = other DNA
atcataaggatgatggaaagtgcaagaccagaagatgtgtctttccaggggcggggagtcttcgagctctcggacgaaaaggcagcgagcccgatcgtgccttcctttgacatgagtaatgaaggatcttatttcttcggagacaatgcagaggagtacgacaattaa

SEQ ID NO: 1865 - DNA, 216 bp, synthetic construct
  misc_feature 1..216: note = Synthetic
  source 1..216: mol_type = other DNA
atacgggctaaaggccacgctacagaggctttgtcttatgatcttatgttaaagccctaccttgccgaagcacagggagaagacacgcgcttcagcaccagccgcctcagtttaaagcgcacactggccagcgctcaaccaggagcgcatccattcaccgtgaccgaaacaaccctgacgcgcacattacgtccgactcggtccgcactagcctga

SEQ ID NO: 1866 - DNA, 69 bp, synthetic construct
  source 1..69: mol_type = other DNA
  misc_feature 1..69: note = Synthetic
atgtggactttactgtggacactaatggcgtgtattcagagcctcgccccattggcaccagatacctga

SEQ ID NO: 1867 - DNA, 51 bp, synthetic construct
  source 1..51: mol_type = other DNA
  misc_feature 1..51: note = Synthetic
atgcgggggatgaaggaagcgatgactcagctgacgacagtagtgtattag

SEQ ID NO: 1868 - DNA, 135 bp, synthetic construct
  misc_feature 1..135: note = Synthetic
  source 1..135: mol_type = other DNA
atgctgaaattgagaacgaaaagctgcgccgggaggttgaagaactgcggcaggccagcgaggcagatctccagccaggaactattgagtacgaacgccatcgacttcgactcggtccgcactagcctgaggtaa

SEQ ID NO: 1869 - DNA, 135 bp, synthetic construct
  misc_feature 1..135: note = Synthetic
  source 1..135: mol_type = other DNA
atgctgaaattgagaacgaaaagctgcgccgggaggttgaagaactgcggcaggccagcgaggcagatctccagccaggaactgccgagtacgaacgccatcgacttcgactcggtccgcactagcctgaggtaa

SEQ ID NO: 1870 - DNA, 57 bp, synthetic construct
  source 1..57: mol_type = other DNA
  misc_feature 1..57: note = Synthetic
atgagcgagttcgacatattcatcaactacatagaatcatacatgactactaaataa

SEQ ID NO: 1871 - DNA, 168 bp, synthetic construct
  misc_feature 1..168: note = Synthetic
  source 1..168: mol_type = other DNA
atgagcacagagacgagctcacacttgagaatattagggtcttcttcctgcgcgcgaatgaggctaagcagaagctccgtaagagttcggcaaagctcgctaaccttaaatttggcacttggaaggtccctgttgttaatcgactcggtccgcactagcctgaggtaa

SEQ ID NO: 1872 - DNA, 21 bp, synthetic construct
  misc_feature 1..21: note = Synthetic
  source 1..21: mol_type = other DNA
ttggcggtcgaaaaaagctag

SEQ ID NO: 1873 - DNA, 96 bp, synthetic construct
  misc_feature 1..96: note = Synthetic
  source 1..96: mol_type = other DNA
atggctcactgccgtagattggagaagaatcgccagggttgcgttgcggtgtgccccggttcgagaccgctcgggtcggccgaattccgcggctaa

SEQ ID NO: 1874 - DNA, 51 bp, synthetic construct
  misc_feature 1..51: note = Synthetic
  source 1..51: mol_type = other DNA
atactaccgttagaaattagacatttgattttctcgtacgcgttcctataa

SEQ ID NO: 1875 - DNA, 72 bp, synthetic construct
  source 1..72: mol_type = other DNA
  misc_feature 1..72: note = Synthetic
atcctaacaagacagaagacgacatacgtgatttttcggaaaacagctccgcatcgggggaactacatataa

SEQ ID NO: 1876 - DNA, 72 bp, synthetic construct
  misc_feature 1..72: note = Synthetic
  source 1..72: mol_type = other DNA
atgccgtataaaaaaccaataaaaagccgaatggacatttcgacaagtctttttcgactcggtccgcactag

SEQ ID NO: 1877 - DNA, 15 bp, synthetic construct
  source 1..15: mol_type = other DNA
  misc_feature 1..15: note = Synthetic
atgttggtttcttga

SEQ ID NO: 1878 - DNA, 168 bp, synthetic construct
  source 1..168: mol_type = other DNA
  misc_feature 1..168: note = Synthetic
atggcgatgtttgtgaggacctcgtctagcacacacgatgaagagagaatgcttccaattgaaggagcgcctcgcagacgaccccccgtgaagttcatattcccacctccacctctttcatcacttccaggatttggcagcgactcggtccgcactagcctgaggtaa

SEQ ID NO: 1879 - DNA, 84 bp, synthetic construct
  misc_feature 1..84: note = Synthetic
  source 1..84: mol_type = other DNA
atcaccaacacgtacatctacgcgtacctgacgccgccgcgcccaggggcagacccaaaaaggaccttacgatggaagacctaa

SEQ ID NO: 1880 - DNA, 135 bp, synthetic construct
  source 1..135: mol_type = other DNA
  misc_feature 1..135: note = Synthetic
atggctacatgtaactgtggattccacgaaagcgaaaacaaactctgcagagcaacctgtgcctgcgtaatatttggggattctcagtttcttcctactccccagagaaatccgactcggtccgcactagcctga

SEQ ID NO: 1881 - DNA, 180 bp, synthetic construct
  misc_feature 1..180: note = Synthetic
  source 1..180: mol_type = other DNA
atggacaaactgtacaccggcgtcttcggctccttcctctccaactcggacgaggactttgaggagttcctgaacatcgtgcgcaccgtaatgactgaaaagccggcgtgcgataggcccaagggcgtcccctggaccaccgtttttctaatcggcctgatacgactcggtccgcactag

SEQ ID NO: 1882 - DNA, 39 bp, synthetic construct
  source 1..39: mol_type = other DNA
  misc_feature 1..39: note = Synthetic
atgttgatagtataccaactatattacctcatcagttag

SEQ ID NO: 1883 - DNA, 54 bp, synthetic construct
  source 1..54: mol_type = other DNA
  misc_feature 1..54: note = Synthetic
aggaggaggatgcacccgctgcggggtactgacgcctccgtgatgtgtttttag

SEQ ID NO: 1884 - DNA, 72 bp, synthetic construct
  source 1..72: mol_type = other DNA
  misc_feature 1..72: note = Synthetic
atggccctgacgacccgcaaccccgagtcctttagacaacagcccgactcggtccgcactagcctgaggtaa

SEQ ID NO: 1885 - DNA, 75 bp, synthetic construct
  misc_feature 1..75: note = Synthetic
  source 1..75: mol_type = other DNA
atcatggccctgacgacccgcaaccccgagtcctttagacaacagcccgactcggtccgcactagcctgaggtaa

SEQ ID NO: 1886 - DNA, 78 bp, synthetic construct
  source 1..78: mol_type = other DNA
  misc_feature 1..78: note = Synthetic
atgcaacgcattatggccctgacgacccgcaaccccgagtcctttagacacgactcggtccgcactagcctgaggtaa

SEQ ID NO: 1887 - DNA, 51 bp, synthetic construct
  misc_feature 1..51: note = Synthetic
  source 1..51: mol_type = other DNA
atgacggtctcaagaaatccgaagtcccaccgaaaggaagaaatgttgtag

SEQ ID NO: 1888 - DNA, 225 bp, synthetic construct
  source 1..225: mol_type = other DNA
  misc_feature 1..225: note = Synthetic
atgcaccgcgcggtgagcgccagcaggcggcgcgagctgagcgaccaggagctgatgcacagcctgcagcgggccctgaccggggccgggaccgagggggagagctactttgacatgggcgcggacctgcactggcagcccagccgccgggccttggaggcggcaggcggtcccccctacatagaagaggtggacgacgactcggtccgcactagcctgaggtaa

SEQ ID NO: 1889 - DNA, 201 bp, synthetic construct
  misc_feature 1..201: note = Synthetic
  source 1..201: mol_type = other DNA
atgcaacaaacgaagccaaacccgaagacgcgcaacagtcaaacccaaacggacccaatttgcaatcatagttttgaggaggtagtacaaacattggcttcattggctactgttgtgcaacaacaaaccatcgcatcagaatcattagaacaacgcattacgagtcttgagaatggtccgactcggtccgcactagcctga

SEQ ID NO: 1890 - DNA, 30 bp, synthetic construct
  misc_feature 1..30: note = Synthetic
  source 1..30: mol_type = other DNA
atcattagaacaacgcattacgagtcttga

SEQ ID NO: 1891 - DNA, 219 bp, synthetic construct
  misc_feature 1..219: note = Synthetic
  source 1..219: mol_type = other DNA
ttgccctacgcatcccaaatgcaacaaacgaagccaaacccgaagacgcgcaacagtcaaacccaaacggacccaatttgcaatcatagttttgaggaggtagtacaaacattggcttcattggctactgttgtgcaacaacaaaccatcgcatcagaatcattagaacaacgcattacgagtcttgagaatggtccgactcggtccgcactagcctga

SEQ ID NO: 1892 - DNA, 186 bp, synthetic construct
  source 1..186: mol_type = other DNA
  misc_feature 1..186: note = Synthetic
ctggcgcgcggactcctgggcttctttcgcgtcgggttcttgcggttctgcaacaactactgcttcgcccgcgactgttttacccaccctgaaagcgtggcacccgcttaccgcgccaccggctgtcccagagaactgttttgtcgtcgtttgcgcaaaaagaaggggctctttgctcgaaggtga

SEQ ID NO: 1893 - DNA, 168 bp, synthetic construct
  source 1..168: mol_type = other DNA
  misc_feature 1..168: note = Synthetic
atggacgaggctcagcgcttcgacttccagcgagtcatcggcgagtttcatcgcgttgtcgagaatagctggggcaaagagttgcgcgagaactcgtgcctgtctcgcaagcaacgcaacgttgtgcgcaacgtcttccgcgactcggtccgcactagcctgaggtaa

SEQ ID NO: 1894 - DNA, 33 bp, synthetic construct
  source 1..33: mol_type = other DNA
  misc_feature 1..33: note = Synthetic
acgtcttccgcgactcggtccgcactagcctga

SEQ ID NO: 1895 - DNA, 132 bp, synthetic construct
  source 1..132: mol_type = other DNA
  misc_feature 1..132: note = Synthetic
atcggcgagtttcatcgcgttgtcgagaatagctggggcaaagagttgcgcgagaactcgtgcctgtctcgcaagcaacgcaacgttgtgcgcaacgtcttccgcgactcggtccgcactagcctgaggtaa

SEQ ID NO: 1896 - DNA, 216 bp, synthetic construct
  misc_feature 1..216: note = Synthetic
  source 1..216: mol_type = other DNA
ctgtcactgcgcggcctgccaactccaaagaaaaaaccacctcctgatatgagctactggaggccgcctgtacacaatgtcccggggctcgagcacctctggtacgagtcagtgcatcgtagccatgctgctgtttgtggttgtggggattttgtacgccatattactgctctggctgagagatacggcgactcggtccgcactagcctgaggtaa

SEQ ID NO: 1897 - DNA, 135 bp, synthetic construct
  misc_feature 1..135: note = Synthetic
  source 1..135: mol_type = other DNA
atgtcccggggctcgagcacctctggtacgagtcagtgcatcgtagccatgctgctgtttgtggttgtggggattttgtacgccatattactgctctggctgagagatacggcgactcggtccgcactagcctga

SEQ ID NO: 1898 - DNA, 165 bp, synthetic construct
  misc_feature 1..165: note = Synthetic
  source 1..165: mol_type = other DNA
atgccagctactggaggccgcctgtacacaatgtcccggggctcgagcacctctggtacgagtcagtgcatcgtagccatgctgctgtttgtggttgtggggattttgtacgccatattactgctctggctgagagatacggcgactcggtccgcactagcctga

SEQ ID NO: 1899 - DNA, 168 bp, synthetic construct
  misc_feature 1..168: note = Synthetic
  source 1..168: mol_type = other DNA
atggcatcaggaagagatccaagagaacctttaccaggatggctggaaatctgggatctagacagggagccatgggacgaatggctacaagacatgctcagggatctaaacgaagaagccagaaggcactttggaatgaacgactcggtccgcactagcctgaggtaa

SEQ ID NO: 1900 - DNA, 180 bp, synthetic construct
  misc_feature 1..180: note = Synthetic
  source 1..180: mol_type = other DNA
ttgcatatacaagccgcatcaggaagagatccaagagaacctttaccaggatggctggaaatctgggatctagacagggagccatgggacgaatggctacaagacatgctcagggatctaaacgaagaagccagaaggcactttggaatgaacgactcggtccgcactagcctgaggtaa

SEQ ID NO: 1901 - DNA, 33 bp, synthetic construct
  misc_feature 1..33: note = Synthetic
  source 1..33: mol_type = other DNA
gtgttgcagcccaagattttgttaattctgtga

SEQ ID NO: 1902 - DNA, 156 bp, synthetic construct
  misc_feature 1..156: note = Synthetic
  source 1..156: mol_type = other DNA
gtgaggacctcgtctagcacacacgatgaagagagaatgcttccaattgaaggagcgcctcgcagacgaccccccgtgaagttcatattcccacctccacctctttcatcacttccaggatttggcagcgactcggtccgcactagcctgaggtaa

SEQ ID NO: 1903 - DNA, 48 bp, synthetic construct
  misc_feature 1..48: note = Synthetic
  source 1..48: mol_type = other DNA
atgcttcctgctattagttacttcaatctaaccggtggagatgactga

SEQ ID NO: 1904 - DNA, 48 bp, synthetic construct
  source 1..48: mol_type = other DNA
  misc_feature 1..48: note = Synthetic
atgcttcctgctattagttacttcaatctaaccggtggaggccactga

SEQ ID NO: 1905 - DNA, 174 bp, synthetic construct
  misc_feature 1..174: note = Synthetic
  source 1..174: mol_type = other DNA
gtggaggccactgacccactcaacaacactgtcaacgacctcctggacatggacggccgcggctcggagcagcgtctcgcccaactccgcattcgccagcagcaggagagagccgtcaaggagctgcaggacgcagtggccatccacgactcggtccgcactagcctgaggtaa

SEQ ID NO: 1906 - DNA, 27 bp, synthetic construct
  misc_feature 1..27: note = Synthetic
  source 1..27: mol_type = other DNA
attcggcaaaacgtgcagaagatatag

SEQ ID NO: 1907 - DNA, 27 bp, synthetic construct
  misc_feature 1..27: note = Synthetic
  source 1..27: mol_type = other DNA
atgcggacacaacgagaaaggggatag

SEQ ID NO: 1908 - DNA, 96 bp, synthetic construct
  source 1..96: mol_type = other DNA
  misc_feature 1..96: note = Synthetic
ctgcgggaagtgcggtatcagcatcgcagagcaaaagtgcggcagaagcggcggcaatacgtgcagaaagcccggcaaaacgtgcagaagatatag

SEQ ID NO: 1909 - DNA, 177 bp, synthetic construct
  misc_feature 1..177: note = Synthetic
  source 1..177: mol_type = other DNA
acgcacgctatggccttgagcgtcaatgactgcgcgcgtcttaccggccagaccgtgccgaccatggactatttcctaccgctgcgcaacatctggaaccgcgtccgcgagttcccgcgcgcctccaccaccgccgccggcattacctgcgactcggtccgcactagcctgaggtaa

SEQ ID NO: 1910 - DNA, 147 bp, synthetic construct
  source 1..147: mol_type = other DNA
  misc_feature 1..147: note = Synthetic
atgactgcgcgcgtcttaccggccagaccgtgccgaccatggactatttcctaccgctgcgcaacatctggaaccgcgtccgcgagttcccgcgcgcctccaccaccgccgccggcattacctgcgactcggtccgcactagcctga

SEQ ID NO: 1911 - DNA, 48 bp, synthetic construct
  misc_feature 1..48: note = Synthetic
  source 1..48: mol_type = other DNA
atgcttcctgctattagttacttcaatctaaccggcggagatgactga

SEQ ID NO: 1912 - DNA, 168 bp, synthetic construct
  source 1..168: mol_type = other DNA
  misc_feature 1..168: note = Synthetic
atgactgaccccatggccaacaacaccgtcaacgacctcctggacatggacggccgcgcctcggagcagcgactcgcccaactccgcatccgccagcagcaggagagagccgtcaaggagctgcaggatgcggtggccatcgactcggtccgcactagcctgaggtaa

SEQ ID NO: 1913 - DNA, 48 bp, synthetic construct
  source 1..48: mol_type = other DNA
  misc_feature 1..48: note = Synthetic
atgcttcctgctattagttacttcaatctaaccggcggaggccactga

SEQ ID NO: 1914 - DNA, 156 bp, synthetic construct
  source 1..156: mol_type = other DNA
  misc_feature 1..156: note = Synthetic
atggccaacaacaccgtcaacgacctcctggacatggacggccgcgcctcggagcagcgactcgcccaactccgcatccgccagcagcaggagagagccgtcaaggagctgcaggatgcggtggccatcgactcggtccgcactagcctgaggtaa

SEQ ID NO: 1915 - DNA, 153 bp, synthetic construct
  misc_feature 1..153: note = Synthetic
  source 1..153: mol_type = other DNA
atgtcccggggctcgagcacctctggtacgagtcagtgcatcgtagccatgctgctgtttgtggttgtggggattttgtacgccatattactgctctggctgagagatacggccaccccgggggcccgcgcgcgcctggggctccgggagtag

SEQ ID NO: 1916 - DNA, 162 bp, synthetic construct
  misc_feature 1..162: note = Synthetic
  source 1..162: mol_type = other DNA
atcaaggggcttatcgggcagccgatccgtacagcaaaactgggcaagctaagatggaagaaaccttacatctttacaaagtgtgttttgatctactctatgacactggtctttgttttacaggtatggacaattttcagctatatttatggaaactggtga

SEQ ID NO: 1917 - DNA, 168 bp, synthetic construct
  misc_feature 1..168: note = Synthetic
  source 1..168: mol_type = other DNA
atggaagaaaccttacatctttacaaagtgtgttttgatctactctatgacactggtctttgttttacaggtatggacaattttcagctatatttatggaaactggtgaccggggggtgggaatttttcatgctatgtctcgactcggtccgcactagcctgaggtaa

SEQ ID NO: 1918 - DNA, 162 bp, synthetic construct
  misc_feature 1..162: note = Synthetic
  source 1..162: mol_type = other DNA
atcaaggggcttatcgggcagccgatccgtacagcaaaactgggcaagctaaggccgaagaaaccttacatctttacaaagtgtgttttgatctactctatgacactggtctttgttttacaggtatggacaattttcagctatatttatggaaactggtga

SEQ ID NO: 1919 - DNA, 141 bp, synthetic construct
  misc_feature 1..141: note = Synthetic
  source 1..141: mol_type = other DNA
gtgtgttttgatctactctatgacactggtctttgttttacaggtatggacaattttcagctatatttatggaaactggtgaccggggggtgggaatttttcatgctatgtctcgactcggtccgcactagcctgaggtaa

SEQ ID NO: 1920 - DNA, 39 bp, synthetic construct
  misc_feature 1..39: note = Synthetic
  source 1..39: mol_type = other DNA
acgcacgagaacacgcgagacatcggccgccgagattaa

SEQ ID NO: 1921 - DNA, 168 bp, synthetic construct
  misc_feature 1..168: note = Synthetic
  source 1..168: mol_type = other DNA
atgacagcgacccccctcaccaacctgttcttacgggccccggacataacccacgtggcccccccttactgcctcaacgccacctggcaggccgaaacggccatgcacaccagcaaaacggactccgcttgcgtggccgtcgactcggtccgcactagcctgaggtaa

SEQ ID NO: 1922 - DNA, 54 bp, synthetic construct
  misc_feature 1..54: note = Synthetic
  source 1..54: mol_type = other DNA
acggttaattctcgcagtcatatggacaagctcatctgcggccttacggcgtaa

SEQ ID NO: 1923 - DNA, 33 bp, synthetic construct
  source 1..33: mol_type = other DNA
  misc_feature 1..33: note = Synthetic
atggacaagctcatctgcggccttacggcgtaa

SEQ ID NO: 1924 - DNA, 168 bp, synthetic construct
  misc_feature 1..168: note = Synthetic
  source 1..168: mol_type = other DNA
atgtccccttctgtggaggagactacctcagtcaccgagtccatcatgttcgctatcgtgagtttcaaacacatgggcccgttcgaaggctactctatgtcggccgatcgcgccgcctcggatctactcatcggcatgttcgactcggtccgcactagcctgaggtaa

SEQ ID NO: 1925 - DNA, 174 bp, synthetic construct
  source 1..174: mol_type = other DNA
  misc_feature 1..174: note = Synthetic
gtgggtgcctccccttctgtggaggagactacctcagtcaccgagtccatcatgttcgctatcgtgagtttcaaacacatgggcccgttcgaaggctactctatgtcggccgatcgcgccgcctcggatctactcatcggcatgttcgactcggtccgcactagcctgaggtaa

SEQ ID NO: 1926 - DNA, 15 bp, synthetic construct
  source 1..15: mol_type = other DNA
  misc_feature 1..15: note = Synthetic
ctgctgcatcgctaa

SEQ ID NO: 1927 - DNA, 222 bp, synthetic construct
  misc_feature 1..222: note = Synthetic
  source 1..222: mol_type = other DNA
ctgtcactgcgtgctgtgcgaacaacaaacaaggcttgcaaactactaatagtaatgtggaccccacctcgcaatgatcaacactaccttaactggcaatggtactcaagtatacttagctcccacgctgctatgtgcgggtgtcccgacgctgtcgctcattttaatcatcttgcttctgtgcttcgtgcccccgactcggtccgcactagcctgaggtaa

SEQ ID NO: 1928 - DNA, 144 bp, synthetic construct
  source 1..144: mol_type = other DNA
  misc_feature 1..144: note = Synthetic
atgatcaacactaccttaactggcaatggtactcaagtatacttagctcccacgctgctatgtgcgggtgtcccgacgctgtcgctcattttaatcatcttgcttctgtgcttcgtgcccccgactcggtccgcactagcctga

SEQ ID NO: 1929 - DNA, 222 bp, synthetic construct
  misc_feature 1..222: note = Synthetic
  source 1..222: mol_type = other DNA
ctgtcactgcgtgctgtgcgaacaacaaacaaggcttgcaaactactaatagtagcctggaccccacctcgcaatgatcaacactaccttaactggcaatggtactcaagtatacttagctcccacgctgctatgtgcgggtgtcccgacgctgtcgctcattttaatcatcttgcttctgtgcttcgtgcccccgactcggtccgcactagcctgaggtaa

SEQ ID NO: 1930 - DNA, 141 bp, synthetic construct
  misc_feature 1..141: note = Synthetic
  source 1..141: mol_type = other DNA
atcaacactaccttaactggcaatggtactcaagtatacttagctcccacgctgctatgtgcgggtgtcccgacgctgtcgctcattttaatcatcttgcttctgtgcttcgtgcccccgactcggtccgcactagcctga

SEQ ID NO: 1931 - DNA, 27 bp, synthetic construct
  source 1..27: mol_type = other DNA
  misc_feature 1..27: note = Synthetic
ttgggccggctgacacataaggactaa

SEQ ID NO: 1932 - DNA, 57 bp, synthetic construct
  misc_feature 1..57: note = Synthetic
  source 1..57: mol_type = other DNA
atgacgtactcgcgagattggccgcctaaacacggttcggggcatgccatggggtaa

SEQ ID NO: 1933 - DNA, 168 bp, synthetic construct
  misc_feature 1..168: note = Synthetic
  source 1..168: mol_type = other DNA
atggagatttggacggttttggaagactttcacaagactaggcagctgctagagaacgcctcgaacggagtctcttacctgtggagattctgcttcggcggtgacctagctaagctagtctatagggccaaacaggattacgactcggtccgcactagcctgaggtaa

SEQ ID NO: 1934 - DNA, 18 bp, synthetic construct
  misc_feature 1..18: note = Synthetic
  source 1..18: mol_type = other DNA
atggaggaaagattttaa

SEQ ID NO: 1935 - DNA, 168 bp, synthetic construct
  source 1..168: mol_type = other DNA
  misc_feature 1..168: note = Synthetic
atgaggcctaaaaaggatggcttggaagactttctgaggctaactcctgaaatcaaaaagcagctgggctctctggtctctgactactgcaacgtcctcaacaaggaatttacagccgggagtgtggagattactctgagcgactcggtccgcactagcctgaggtaa

SEQ ID NO: 1936 - DNA, 147 bp, synthetic construct
  misc_feature 1..147: note = Synthetic
  source 1..147: mol_type = other DNA
ttggaagactttctgaggctaactcctgaaatcaaaaagcagctgggctctctggtctctgactactgcaacgtcctcaacaaggaatttacagccgggagtgtggagattactctgagcgactcggtccgcactagcctgaggtaa

SEQ ID NO: 1937 - DNA, 102 bp, synthetic construct
  source 1..102: mol_type = other DNA
  misc_feature 1..102: note = Synthetic
acgctgtacacaactatagtcgacctaaacgtttacatcggagttttaaccatctgcgcaagggtctctatacagtcggtaactgatcgggaaccgttatag

SEQ ID NO: 1938 - DNA, 48 bp, synthetic construct
  source 1..48: mol_type = other DNA
  misc_feature 1..48: note = Synthetic
atgcctaaaaccacgcggcgcgtaaatttccgactcggtccgcactag

SEQ ID NO: 1939 - DNA, 168 bp, synthetic construct
  misc_feature 1..168: note = Synthetic
  source 1..168: mol_type = other DNA
atgcacaagggaatccccaaaagctccaaaacccaaacacatacccaacaagaccgccccccacaacccagcaccgaactcgaagagaccaggacctcccgagcacgacacagcacaacatcagctcagcgatccacgcacgactcggtccgcactagcctgaggtaa

SEQ ID NO: 1940 - DNA, 213 bp, synthetic construct
  misc_feature 1..213: note = Synthetic
  source 1..213: mol_type = other DNA
ctgccacatatagctcgtccacacgccgtctcgtcacacggcaacgcctgttccgtgctggcgatcgcgctcgtagttgcgctcttgggcgacatgcacccgggagtgaaaagtagcaccacaagcgccgtcacttcccctagtaataccaccgtcacgtctactacgtcaataagtacctctaacgactcggtccgcactagcctgaggtaa

SEQ ID NO: 1941 - DNA, 192 bp, synthetic construct
  misc_feature 1..192: note = Synthetic
  source 1..192: mol_type = other DNA
atctgcccttccccaatcagaaccatgggaaagacttatagctctccggtaaaccctatccccaaagccccaaaagggctagcaattcaccactggctaaactttctccaagccgcgtaccgactgcagccagggccctctgaatttgacttccatcagttacgcgactcggtccgcactagcctgaggtaa

SEQ ID NO: 1942 - DNA, 90 bp, synthetic construct
  source 1..90: mol_type = other DNA
  misc_feature 1..90: note = Synthetic
atgtacgacacaagcagtcagaggacgcaggaaacccagcctccgatcacccacctgacccccgactcggtccgcactagcctgaggtaa

SEQ ID NO: 1943 - DNA, 81 bp, synthetic construct
  source 1..81: mol_type = other DNA
  misc_feature 1..81: note = Synthetic
atgtcaaattttagctcctctcctgtacccacaatcttcatgtctttcttcccagatgaccaagagagtccggctcagtga

SEQ ID NO: 1944 - DNA, 48 bp, synthetic construct
  misc_feature 1..48: note = Synthetic
  source 1..48: mol_type = other DNA
ctgtctacccctatgaagatgaaagcacctcccaacacccctttataa

SEQ ID NO: 1945 - DNA, 81 bp, synthetic construct
  misc_feature 1..81: note = Synthetic
  source 1..81: mol_type = other DNA
atgtcaaattttagctcctctcctgtacccacaatcttcatgtctttcttcccaggccaccaagagagtccggctcagtga

SEQ ID NO: 1946 - DNA, 36 bp, synthetic construct
  source 1..36: mol_type = other DNA
  misc_feature 1..36: note = Synthetic
atgggcaagcagggagctagaacgattcgcagttaa

SEQ ID NO: 1947 - DNA, 24 bp, synthetic construct
  misc_feature 1..24: note = Synthetic
  source 1..24: mol_type = other DNA
atgggctggcgcgcggccaggtag

SEQ ID NO: 1948 - DNA, 66 bp, synthetic construct
  source 1..66: mol_type = other DNA
  misc_feature 1..66: note = Synthetic
atggaaaaatacataactgagaatagagaagttcagatcaaggtcaggaacagatggaacagctga

SEQ ID NO: 1949 - DNA, 156 bp, synthetic construct
  source 1..156: mol_type = other DNA
  misc_feature 1..156: note = Synthetic
atggaaaaatacataactgagaatagagaagttcagatcaaggtcaggaacagatggaacaggccaatatgggccaaacaggatatctgtggtaagcagttcctgccccggctcagggccaagaacagatggacgactcggtccgcactagcctga

SEQ ID NO: 1950 - DNA, 27 bp, synthetic construct
  misc_feature 1..27: note = Synthetic
  source 1..27: mol_type = other DNA
atgggccaaacaggatatctgtggtaa

SEQ ID NO: 1951 - DNA, 168 bp, synthetic construct
  source 1..168: mol_type = other DNA
  misc_feature 1..168: note = Synthetic
atggagatttggacgatcttggaagatcttcacaagactagacagctgctagagaacgcctcgaacggagtctctcacctgtggagattctgcttcggtggcgacctagctaagctagtctatagggccaaacaggattacgactcggtccgcactagcctgaggtaa

SEQ ID NO: 1952 - DNA, 24 bp, synthetic construct
  misc_feature 1..24: note = Synthetic
  source 1..24: mol_type = other DNA
acgtctgccatttgtatcatataa

SEQ ID NO: 1953 - DNA, 168 bp, synthetic construct
  source 1..168: mol_type = other DNA
  misc_feature 1..168: note = Synthetic
atgggcgataagagcgagtggtacgccaggctcctgttgcggtgcacgcgcgcggggccgccgctggccatgccctcaggcatgacgcggctcacggaccacgtgtacttgggcagcgctgaggacgcgcgcgccgtgctcgactcggtccgcactagcctgaggtaa

SEQ ID NO: 1954 - DNA, 222 bp, synthetic construct
  misc_feature 1..222: note = Synthetic
  source 1..222: mol_type = other DNA
atgtggcgcatcccattctccagcaacttcatgtctatgggcgcccttaccgacctgggtcaaaacatgctttacgccaactcggcgcacgcgctcgacatgacctttgaggtggaccccatggatgagcccaccctcctctatcttctctttgaagttttcgacgtggtcagagtgcaccagccgcaccgcggcgactcggtccgcactagcctgaggtaa

SEQ ID NO: 1955 - DNA, 222 bp, synthetic construct
  source 1..222: mol_type = other DNA
  misc_feature 1..222: note = Synthetic
atgtggcgcatccccttctccagcaacttcatgtccatgggcgccctcaccgacctgggtcagaacatgctctatgccaactcggcccacgcgctcgacatgaccttcgaggtggaccccatggatgagcccaccctcctctatcttctcttcgaagttttcgacgtggtcagagtgcaccagccgcaccgcggcgactcggtccgcactagcctgaggtaa

SEQ ID NO: 1956 - DNA, 183 bp, synthetic construct
  misc_feature 1..183: note = Synthetic
  source 1..183: mol_type = other DNA
attttttctgaaatgtgcgatctggccatgttcatgagcaaacagtattctctatggcctcctagcaaggacaacatcgtaacgttctccattgcttattgcttgtgcgcttgccttcttactgctttactgtgcgtatgcatacacctgcttgtaaccacgactcggtccgcactagcctga

SEQ ID NO: 1957 - DNA, 15 bp, synthetic construct
  misc_feature 1..15: note = Synthetic
  source 1..15: mol_type = other DNA
atgctacccttctaa

SEQ ID NO: 1958 - DNA, 213 bp, synthetic construct
  misc_feature 1..213: note = Synthetic
  source 1..213: mol_type = other DNA
ctgccacatatagctcgtccacacgccgtctcgtcacacggcaacatgtgttccgtgctggcgatcgcgctcgtagttgcgctcttgggcgacatgcacccgggagtgaaaagtagcaccacaagcgccgtcacttcccctagtaataccaccgtcacgtctactacgtcaataagtacctctaacgactcggtccgcactagcctgaggtaa

SEQ ID NO: 1959 - DNA, 21 bp, synthetic construct
  source 1..21: mol_type = other DNA
  misc_feature 1..21: note = Synthetic
atgactaaacaattagggtaa

SEQ ID NO: 1960 - DNA, 228 bp, synthetic construct
  misc_feature 1..228: note = Synthetic
  source 1..228: mol_type = other DNA
aggtgggggctcgtccgggatcgatcacctctctgtatctgcccttccccaatcagaaccgccggaaagacttatagctctccggtaaaccctatccccaaagccccaaaagggctagcaattcaccactggctaaactttctccaagccgcgtaccgactgcagccagggccctctgaatttgacttccatcagttacgcgactcggtccgcactagcctgaggtaa

SEQ ID NO: 1961 - DNA, 57 bp, synthetic construct
  source 1..57: mol_type = other DNA
  misc_feature 1..57: note = Synthetic
atgagaggtttgtggacaatcaatctcaggtgtcaaggaaggatcatcggtccttag

SEQ ID NO: 1962 - DNA, 174 bp, synthetic construct
  misc_feature 1..174: note = Synthetic
  source 1..174: mol_type = other DNA
atcacaatggctggtgtcttttcccagtatgagaggtttgtggacaatcaatctcaggtgtcaaggaaggatcatcggtccttagcaggagggtgccttaaagtgaacatccctatgcttgtcactgcatccgaagaccccaccaccgactcggtccgcactagcctgaggtaa

SEQ ID NO: 1963 - DNA, 174 bp, synthetic construct
  source 1..174: mol_type = other DNA
  misc_feature 1..174: note = Synthetic
atcacagccgctggtgtcttttcccagtatgagaggtttgtggacaatcaatctcaggtgtcaaggaaggatcatcggtccttagcaggagggtgccttaaagtgaacatccctatgcttgtcactgcatccgaagaccccaccaccgactcggtccgcactagcctgaggtaa

SEQ ID NO: 1964 - DNA, 45 bp, synthetic construct
  misc_feature 1..45: note = Synthetic
  source 1..45: mol_type = other DNA
atgcacacatcttccaccactctatttaggtcactgggatcgtag

SEQ ID NO: 1965 - DNA, 12 bp, synthetic construct
  misc_feature 1..12: note = Synthetic
  source 1..12: mol_type = other DNA
atgtttggctag

SEQ ID NO: 1966 - DNA, 168 bp, synthetic construct
  misc_feature 1..168: note = Synthetic
  source 1..168: mol_type = other DNA
atgagaccacaagtggcggtttgggctttgcgcttattggccaccggcctagctatgatctccttagtgttctgcctgaaccaggtaattatgcaggtgctaattagggacattggggacttgttgacatcctcagaaatcgactcggtccgcactagcctgaggtaa

SEQ ID NO: 1967 - DNA, 156 bp, synthetic construct
  source 1..156: mol_type = other DNA
  misc_feature 1..156: note = Synthetic
gtggcggtttgggctttgcgcttattggccaccggcctagctatgatctccttagtgttctgcctgaaccaggtaattatgcaggtgctaattagggacattggggacttgttgacatcctcagaaatcgactcggtccgcactagcctgaggtaa

SEQ ID NO: 1968 - DNA, 60 bp, synthetic construct
  source 1..60: mol_type = other DNA
  misc_feature 1..60: note = Synthetic
atgagggtgatgaacgacaatattctattactgcagagggaaaatgctataaaggaataa

SEQ ID NO: 1969 - DNA, 60 bp, synthetic construct
  source 1..60: mol_type = other DNA
  misc_feature 1..60: note = Synthetic
atgatggtgatgagcgacaatattctattactgcagagggaaaatgctataaaggaataa

SEQ ID NO: 1970 - DNA, 63 bp, synthetic construct
  source 1..63: mol_type = other DNA
  misc_feature 1..63: note = Synthetic
atggacatagtaatacatattattcaaaatatgatcgactcggtccgcactagcctgaggtaa

SEQ ID NO: 1971 - DNA, 210 bp, synthetic construct
  misc_feature 1..210: note = Synthetic
  source 1..210: mol_type = other DNA
acggactcgacaagggagagccggtcaacgaggcagacgccgcggccctcgagcacgacaaagcctacgaccggcagctcgacagcggagacaacccgtacctcaagtacaaccacgccgacgcggagtttcaggagcgccttaaagaagatacgtcttttgggggcaacctcggacgagcacgactcggtccgcactagcctgaggtaa

SEQ ID NO: 1972 - DNA, 99 bp, synthetic construct
  source 1..99: mol_type = other DNA
  misc_feature 1..99: note = Synthetic
acgaagaacgaaaaaaatatctacctctccaaaaagaaaaaactactgatgttatcaaacctgattatcttgagtacgactcggtccgcactagcctga

SEQ ID NO: 1973 - DNA, 36 bp, synthetic construct
  source 1..36: mol_type = other DNA
  misc_feature 1..36: note = Synthetic
atgtcctcgcgcaacatgtgcgacgttctgtgttaa

SEQ ID NO: 1974 - DNA, 168 bp, synthetic construct
  source 1..168: mol_type = other DNA
  misc_feature 1..168: note = Synthetic
atggaccgcgacgacgtctggttcgcggcgtactcggtcgagctcgacccgccgcggcgctgcacgcggtgctcgctgaacctcacgcgcttcatcaacgaggaccccgagaacgcgcgcatgctgctgctctcgcagcccgactcggtccgcactagcctgaggtaa

SEQ ID NO: 1975 - DNA, 84 bp, synthetic construct
  source 1..84: mol_type = other DNA
  misc_feature 1..84: note = Synthetic
acgcgcttcatcaacgaggaccccgagaacgcgcgcatgctgctgctctcgcagcccgactcggtccgcactagcctgaggtaa

SEQ ID NO: 1976 - DNA, 24 bp, synthetic construct
  source 1..24: mol_type = other DNA
  misc_feature 1..24: note = Synthetic
ctgcgctcgccgtcgatgctatag

SEQ ID NO: 1977 - DNA, 150 bp, synthetic construct
  misc_feature 1..150: note = Synthetic
  source 1..150: mol_type = other DNA
atgtcaaaggaaggcacgatcgggctcgctgccttttcgtccgagagctcgaagactccccgcccctggaaagacacatcttctggtcttgcactttccatcatccttatgatttcggtcctcgactcggtccgcactagcctgaggtaa

SEQ ID NO: 1978 - DNA, 36 bp, synthetic construct
  source 1..36: mol_type = other DNA
  misc_feature 1..36: note = Synthetic
ttgtcgtactcctctgcattgtctccgaagaaataa

SEQ ID NO: 1979 - DNA, 33 bp, synthetic construct
  source 1..33: mol_type = other DNA
  misc_feature 1..33: note = Synthetic
atgagtatggaggacaccaggacagtattgtga

SEQ ID NO: 1980 - DNA, 75 bp, synthetic construct
  source 1..75: mol_type = other DNA
  misc_feature 1..75: note = Synthetic
attacgacgttgaaaagatccacatacagtagccgctctaggtttgttcacattgcaacttgtgtctgctgttaa

SEQ ID NO: 1981 - DNA, 168 bp, synthetic construct
  misc_feature 1..168: note = Synthetic
  source 1..168: mol_type = other DNA
atggctctaggtttgtttactctgcaaatcgagtctgctgttaatcaatcgctaagcaagtcgaaagttagtgccgtagtttcgcgccaggttatccaggatgttagagctgccgctgtcactttcaacttgctagcttacgactcggtccgcactagcctgaggtaa

SEQ ID NO: 1982 - DNA, 36 bp, synthetic construct
  misc_feature 1..36: note = Synthetic
  source 1..36: mol_type = other DNA
atgttagagctgccgctgtcactttcaacttgctag

SEQ ID NO: 1983 - DNA, 156 bp, synthetic construct
  misc_feature 1..156: note = Synthetic
  source 1..156: mol_type = other DNA
ttgtttactctgcaaatcgagtctgctgttaatcaatcgctaagcaagtcgaaagttagtgccgtagtttcgcgccaggttatccaggatgttagagctgccgctgtcactttcaacttgctagcttacgactcggtccgcactagcctgaggtaa

SEQ ID NO: 1984 - DNA, 168 bp, synthetic construct
  source 1..168: mol_type = other DNA
  misc_feature 1..168: note = Synthetic
atgaagaccatatattttctgattagtctcattttaatccaaagtataaaaactctccctgttttagaaattgctagtaacagccaacctcaagatgtagattcagtgtgctccggaaccctccaaaagacagaagatgtcgactcggtccgcactagcctgaggtaa

SEQ ID NO: 1985 - DNA, 150 bp, synthetic construct
  source 1..150: mol_type = other DNA
  misc_feature 1..150: note = Synthetic
ctgattagtctcattttaatccaaagtataaaaactctccctgttttagaaattgctagtaacagccaacctcaagatgtagattcagtgtgctccggaaccctccaaaagacagaagatgtcgactcggtccgcactagcctgaggtaa

SEQ ID NO: 1986 - DNA, 105 bp, synthetic construct
  source 1..105: mol_type = other DNA
  misc_feature 1..105: note = Synthetic
atgtctggtcgtaaagctcagggaaaaaccctgggcgtcaatatggtacgacgaggagttcgctccttgtcaaacaaaataacgactcggtccgcactagcctga

SEQ ID NO: 1987 - DNA, 42 bp, synthetic construct
  misc_feature 1..42: note = Synthetic
  source 1..42: mol_type = other DNA
atacagaaaaaaacaaaaagtgaaaaaacaatatttagatag

SEQ ID NO: 1988 - DNA, 15 bp, synthetic construct
  misc_feature 1..15: note = Synthetic
  source 1..15: mol_type = other DNA
ctgctgttttcataa

SEQ ID NO: 1989 - DNA, 33 bp, synthetic construct
  misc_feature 1..33: note = Synthetic
  source 1..33: mol_type = other DNA
atgatgaagattaaaaccttcatcatcctttaa

SEQ ID NO: 1990 - DNA, 204 bp, synthetic construct
  source 1..204: mol_type = other DNA
  misc_feature 1..204: note = Synthetic
atgacattgacagaaacggcagggggctccggacaatccctgcccgcatgcaggaaagacgcagaaaagaagagcaagagagcgaaaagccagggtgacggcggccgagaaagactttccttcatgttgttgccacgagtgcgtatgttcacgctcttacgccttgcccgacttctttttgcgactcggtccgcactagcctga

SEQ ID NO: 1991 - DNA, 150 bp, synthetic construct
  source 1..150: mol_type = other DNA
  misc_feature 1..150: note = Synthetic
atgtcaaaggaaggcacgatcgggctcgctgccttttcgtccgagagctcgaagactccccgcccctggaaagacacatcttctggtcttgcactttccatcgcccttatgatttcggtcctcgactcggtccgcactagcctgaggtaa

SEQ ID NO: 1992 - DNA, 57 bp, synthetic construct
  misc_feature 1..57: note = Synthetic
  source 1..57: mol_type = other DNA
atgagaaagttcttatctcttgctccacttcaagcaatagatgtaaggcttgcataa

SEQ ID NO: 1993 - DNA, 126 bp, synthetic construct
  source 1..126: mol_type = other DNA
  misc_feature 1..126: note = Synthetic
atgttatttgctcaaaactattctctgttaccttcagtttgtgtctcacttcttcaatcaaccatcttatttcttcaaacttctgacctaattgttcccgccacgactcggtccgcactagcctga

SEQ ID NO: 1994 - DNA, 168 bp, synthetic construct
  source 1..168: mol_type = other DNA
  misc_feature 1..168: note = Synthetic
atcgtcagcatccacagcactctgctgttcctttcgatattcttccctcatagactttggcactccttccgtagaaggccctcctttcagtccgtatttaaagcgacggtaaatgcatttgaaaaaaagacgatcaagaatccacaatatcgactcggtccgcactag

SEQ ID NO: 1995 - DNA, 66 bp, synthetic construct
  source 1..66: mol_type = other DNA
  misc_feature 1..66: note = Synthetic
atgcatttgaaaaaaagacgatcaagaatccacaatatcgactcggtccgcactagcctgaggtaa

SEQ ID NO: 1996 - DNA, 168 bp, synthetic construct
  misc_feature 1..168: note = Synthetic
  source 1..168: mol_type = other DNA
atcgtcagcatccacagcactctgctgttcctttcgatattcttccctcatagactttggcactccttccgtagaaggccctcctttcagtccgtatttaaagcggccgtaaatgcatttgaaaaaaagacgatcaagaatccacaatatcgactcggtccgcactag

SEQ ID NO: 1997 - DNA, 30 bp, synthetic construct
  source 1..30: mol_type = other DNA
  misc_feature 1..30: note = Synthetic
attctaccaaagaattatacttctctatag

SEQ ID NO: 1998 - DNA, 180 bp, synthetic construct
  misc_feature 1..180: note = Synthetic
  source 1..180: mol_type = other DNA
attcactatttttgccgtctgagctcttcaatggtggaacagatcttcatgatctcagccaactcttctttctttatccttccagattcgaaatcaatccgtgcatcaattcgggctctggaaaccatagcctccaccatactggatatcccgactggtcttcgactcggtccgcactag

SEQ ID NO: 1999 - DNA, 180 bp, synthetic construct
  misc_feature 1..180: note = Synthetic
  source 1..180: mol_type = other DNA
attcactatttttgccgtctgagctcttcaatggtggaacagatcttcatgatctcagtgaactcttctttctttatccttccagattcgaaatcaatccgtgcatcaattcgggctctggaaaccatagcctccaccatactggatatcccgactggtcttcgactcggtccgcactag

SEQ ID NO: 2000 - DNA, 165 bp, synthetic construct
  source 1..165: mol_type = other DNA
  misc_feature 1..165: note = Synthetic
atgacaccagaaaacgacgaagagcaaacatctgtgttctccgctactgtttacggagacaaaattcagggaaagaataaacgcaaacgcgtgattggtctatgtattagaatatctatggttatttcactactatccgactcggtccgcactagcctgaggtaa

SEQ ID NO: 2001 - DNA, 201 bp, synthetic construct
  misc_feature 1..201: note = Synthetic
  source 1..201: mol_type = other DNA
atgaaaacaatccttcgtatcgcctcaattttagcacaatgtgctatcatgatatgcttaccattgaagaactccataggtgggaggtgcttcacaggtggtgagccatttaaaaccattaatgcaacatcagcaccgagtgaggtctgcctcagagatgatatatcgatggttaaatctatccgactcggtccgcactag

SEQ ID NO: 2002 - DNA, 111 bp, synthetic construct
  source 1..111: mol_type = other DNA
  misc_feature 1..111: note = Synthetic
gtgagccatttaaaaccattaatgcaacatcagcaccgagtgaggtctgcctcagagatgatatatcgatggttaaatctatccgactcggtccgcactagcctgaggtaa

SEQ ID NO: 2003 - DNA, 150 bp, synthetic construct
  misc_feature 1..150: note = Synthetic
  source 1..150: mol_type = other DNA
atgcagctacatttaatccggatgcagggtatgtggcatttatcagtaagtatgggcagcagctcaactttactgttgctagagtcttcttcctcaaccagaagaaggccaagatggtcttacataacgactcggtccgcactagcctga

SEQ ID NO: 2004 - DNA, 219 bp, synthetic construct
  source 1..219: mol_type = other DNA
  misc_feature 1..219: note = Synthetic
gtgaactccactattaactacgcattgcaatggcaaatcaattcattttcaacggccttccacaacggaatgcagctacatttaatccggatgcagggtatgtggcatttatcagtaagtatgggcagcagctcaactttactgttgctagagtcttcttcctcaaccagaagaaggccaagatggtcttacataacgactcggtccgcactagcctga

SEQ ID NO: 2005 - DNA, 195 bp, synthetic construct
  source 1..195: mol_type = other DNA
  misc_feature 1..195: note = Synthetic
atggcaaatcaattcattttcaacggccttccacaacggaatgcagctacatttaatccggatgcagggtatgtggcatttatcagtaagtatgggcagcagctcaactttactgttgctagagtcttcttcctcaaccagaagaaggccaagatggtcttacataacgactcggtccgcactagcctgaggtaa

SEQ ID NO: 2006 - DNA, 219 bp, synthetic construct
  misc_feature 1..219: note = Synthetic
  source 1..219: mol_type = other DNA
gtgaactccactattaactacgcattgcagccgcaaatcaattcattttcaacgatgttccacaacggaatgcagctacatttaatccggatgcagggtatgtggcatttatcagtaagtatgggcagcagctcaactttactgttgctagagtcttcttcctcaaccagaagaaggccaagatggtcttacataacgactcggtccgcactagcctga

SEQ ID NO: 2007 - DNA, 204 bp, synthetic construct
  misc_feature 1..204: note = Synthetic
  source 1..204: mol_type = other DNA
atagtgtcttgcaggatggatatttcaaagcacatgcaaatgttggtagtgctctacttgataagcttgtctggaactactccggtggtgtttaacaagtgtttcaccggtgggtctctggttttctcaaaaaagtcagacacaggaatgtctgaaatttgtcttaaagatgatatcgactcggtccgcactagcctgaggtaa

SEQ ID NO: 2008 - DNA, 147 bp, synthetic construct
  source 1..147: mol_type = other DNA
  misc_feature 1..147: note = Synthetic
ttgataagcttgtctggaactactccggtggtgtttaacaagtgtttcaccggtgggtctctggttttctcaaaaaagtcagacacaggaatgtctgaaatttgtcttaaagatgatatcgactcggtccgcactagcctgaggtaa

SEQ ID NO: 2009 - DNA, 165 bp, synthetic construct
  misc_feature 1..165: note = Synthetic
  source 1..165: mol_type = other DNA
aagatgatttgtatattggtgctaattacagttgcagctgcaagcccagtgtatcaaaggtgtttccaagatggggctatagtgaagcaaaacccatccaaagaagcagttacagaggtgtgcctgaaagatgatgttagcacgactcggtccgcactagcctga

SEQ ID NO: 2010 - DNA, 219 bp, synthetic construct
  source 1..219: mol_type = other DNA
  misc_feature 1..219: note = Synthetic
gtgtactaccacatacaacaaacttttcagagaattaaaatgatcgctgtacttttgctatcagctgttgctgcaatagcttcagcacaccctcttgctaaaagccacatgggcgagaggtgttttgcaggaggctccatattaaaagatgttaaccaaactacgggcataggtgaagtctgtgtaaaggatgacacgactcggtccgcactagcctga

SEQ ID NO: 2011 - DNA, 123 bp, synthetic construct
  source 1..123: mol_type = other DNA
  misc_feature 1..123: note = Synthetic
atgatgtcgactcggttaatgccaatgagtttgaccctgatacaggatacctggattttaaaaataactatccaggggcactcaatacaaataccgctagcgactcggtccgcactagcctga

SEQ ID NO: 2012 - DNA, 162 bp, synthetic construct
  misc_feature 1..162: note = Synthetic
  source 1..162: mol_type = other DNA
atgatgaacctctacggattcaaagtggatttgatcctgaaagacaatacatggaatttatccgtggtgtcggaaatgggatcagtctgccttccattaaaatcttcttcctcaatgccaggaaagccaaagataaactctctccgactcggtccgcactag

SEQ ID NO: 2013 - DNA, 87 bp, synthetic construct
  misc_feature 1..87: note = Synthetic
  source 1..87: mol_type = other DNA
atgggatcagtctgccttccattaaaatcttcttcctcaatgccaggaaagccaaagataaactctctccgactcggtccgcactag

SEQ ID NO: 2014 - DNA, 45 bp, synthetic construct
  misc_feature 1..45: note = Synthetic
  source 1..45: mol_type = other DNA
ataaagaacattcttttctctagcctcagagattgtattctatga

SEQ ID NO: 2015 - DNA, 135 bp, synthetic construct
  misc_feature 1..135: note = Synthetic
  source 1..135: mol_type = other DNA
atttggtgttttatgatgtcgcatcaacaggtgcaaatggatttgatcctgatgcagggtatatggacttctgtgttaaaaatgcagaattactcaaccttgctgcagttagcgactcggtccgcactagcctga

SEQ ID NO: 2016 - DNA, 81 bp, synthetic construct
  misc_feature 1..81: note = Synthetic
  source 1..81: mol_type = other DNA
acgccgacaattacaagatcaatcaatatcgtgctaggatcaacgatgcaaatgatccagaaactgctaaagatatattag

SEQ ID NO: 2017 - DNA, 186 bp, synthetic construct
  misc_feature 1..186: note = Synthetic
  source 1..186: mol_type = other DNA
attctaagaacatatcaatcaaaaatgaatcctgataaaattgaggaataccgtaataggattgaattgtgccgagacccagaaagagctcaggagatatggagagctttactggttgaaaggcataattacttctctagagaattttgtgattctgcaggatgggagcgactcggtccgcactag

SEQ ID NO: 2018 - DNA, 162 bp, synthetic construct
  misc_feature 1..162: note = Synthetic
  source 1..162: mol_type = other DNA
atggactatcaagagtatcaacaattcttggctaggattaatactgcaagggatgcatgtgtagccaaggatatcgatgttgacctattaatggccagacatgattattttggtagagagctgtgcaagtccttaaatacgactcggtccgcactagcctga

SEQ ID NO: 2019 - DNA, 48 bp, synthetic construct
  misc_feature 1..48: note = Synthetic
  source 1..48: mol_type = other DNA
attaccaaagtgctgacagaagacaacaagaatggctattttgcttga

SEQ ID NO: 2020 - DNA, 174 bp, synthetic construct
  source 1..174: mol_type = other DNA
  misc_feature 1..174: note = Synthetic
atggctattttgcttgaagatgtcatcagacaatattctgctaggatcaggaattgtaataatcctgagattggtcgtgatatcctagcagagataactatgactagacacaactattttgctcaacgtttttgtgaggctataggcgactcggtccgcactagcctgaggtaa

SEQ ID NO: 2021 - DNA, 72 bp, synthetic construct
  source 1..72: mol_type = other DNA
  misc_feature 1..72: note = Synthetic
aagatgtcatcagacaatattctgctaggatcaggaattgtaataatcctgagattggtcgtgatatcctag

SEQ ID NO: 2022 - DNA, 48 bp, synthetic construct
  misc_feature 1..48: note = Synthetic
  source 1..48: mol_type = other DNA
attaccaaagtgctgacagaagacaacaagagccgctattttgcttga

SEQ ID NO: 2023 - DNA, 168 bp, synthetic construct
  misc_feature 1..168: note = Synthetic
  source 1..168: mol_type = other DNA
attttgcttgaagatgtcatcagacaatattctgctaggatcaggaattgtaataatcctgagattggtcgtgatatcctagcagagataactatgactagacacaactattttgctcaacgtttttgtgaggctataggcgactcggtccgcactagcctgaggtaa

SEQ ID NO: 2024 - DNA, 168 bp, synthetic construct
  source 1..168: mol_type = other DNA
  misc_feature 1..168: note = Synthetic
atggaggaccaagcttatgatcaatacctgcacagaatccaagcagctagaacagctacagttgctaaagacatcagtgctgatatccttgaggcaaggcatgactattttggtcgggagctttgtaactctttaggaattgaatacaaacgactcggtccgcactag

SEQ ID NO: 2025 - DNA, 201 bp, synthetic construct
  misc_feature 1..201: note = Synthetic
  source 1..201: mol_type = other DNA
atactaaatatccttcttgagaatccaaagaagaggatggatcaggcattatatcaacaatttgtgcgtcggattgaaaacgccaaggatgccacagtggcaaaggatatagatgttgatctgctgattgcaaggcatgattactttggcagggaactgtgtagatcattagggataccgactcggtccgcactagcctga

SEQ ID NO: 2026 - DNA, 201 bp, synthetic construct
  source 1..201: mol_type = other DNA
  misc_feature 1..201: note = Synthetic
atactaaatatccttcttgagaatccaaagaagagggccgatcaggcattatatcaacaatttgtgcgtcggattgaaaacgccaaggatgccacagtggcaaaggatatagatgttgatctgctgattgcaaggcatgattactttggcagggaactgtgtagatcattagggataccgactcggtccgcactagcctga

SEQ ID NO: 2027 - DNA, 219 bp, synthetic construct
  source 1..219: mol_type = other DNA
  misc_feature 1..219: note = Synthetic
gtgtactaccacatacaacaaacttttcagagaattaaagccatcgctgtacttttgctatcagctgttgctgcaatagcttcagcacaccctcttgctaaaagccacatgggcgagaggtgttttgcaggaggctccatattaaaagatgttaaccaaactacgggcataggtgaagtctgtgtaaaggatgacacgactcggtccgcactagcctga

SEQ ID NO: 2028 - DNA, 27 bp, synthetic construct
  source 1..27: mol_type = other DNA
  misc_feature 1..27: note = Synthetic
gtgtttgtgaggattaacaacaattaa

SEQ ID NO: 2029 - DNA, 27 bp, synthetic construct
  misc_feature 1..27: note = Synthetic
  source 1..27: mol_type = other DNA
attaacacagtgcgagctgtttcttag

SEQ ID NO: 2030 - DNA, 132 bp, synthetic construct
  source 1..132: mol_type = other DNA
  misc_feature 1..132: note = Synthetic
atgtctaagaaaccaggagggcccggcaagagccgggctgtcaatatgctaaaacgcggaatgccccgcgtgttgtccttgattggactgaagagggctatgttcgactcggtccgcactagcctgaggtaa

SEQ ID NO: 2031 - DNA, 24 bp, synthetic construct
  misc_feature 1..24: note = Synthetic
  source 1..24: mol_type = other DNA
aagataaatcgttcaatagtgtag

SEQ ID NO: 2032 - DNA, 45 bp, synthetic construct
  misc_feature 1..45: note = Synthetic
  source 1..45: mol_type = other DNA
atgttaaacaagatactcgactcggtccgcactagcctgaggtaa

SEQ ID NO: 2033 - DNA, 168 bp, synthetic construct
  source 1..168: mol_type = other DNA
  misc_feature 1..168: note = Synthetic
atggcacacgccagagacaaggcaggcgctgtcctggccatgatactcatctgtgagacaagccttatctggacatctagtggcagttcgacggcctcggcggggaacgtgacaggcacaacggctgtgactacaccatccgactcggtccgcactagcctgaggtaa

SEQ ID NO: 2034 - DNA, 99 bp, synthetic construct
  source 1..99: mol_type = other DNA
  misc_feature 1..99: note = Synthetic
ttgggtgtggagactagctataaaagaggccgggaggccttctgcgtccagacgcgatggcacacgccagagacaaggcaggcgctgttatggccatga

SEQ ID NO: 2035 - DNA, 168 bp, synthetic construct
  misc_feature 1..168: note = Synthetic
  source 1..168: mol_type = other DNA
atggcacacgccagagacaaggcaggcgctgttatggccatgatactcatctgtgagacaagccttatttggacatctagtggcagttcgacggcctcggcggggaacgtgacaggcacaacggctgtgactacaccatccgactcggtccgcactagcctgaggtaa

SEQ ID NO: 2036 - DNA, 99 bp, synthetic construct
  source 1..99: mol_type = other DNA
  misc_feature 1..99: note = Synthetic
ttgggtgtggagactagctataaaagaggccgggaggccttctgcgtccagacgcggccgcacacgccagagacaaggcaggcgctgtcctggccatga

SEQ ID NO: 2037 - DNA, 120 bp, synthetic construct
  misc_feature 1..120: note = Synthetic
  source 1..120: mol_type = other DNA
atctgtgagacaagccttatctggacatctagtggcagttcgacggcctcggcggggaacgtgacaggcacaacggctgtgactacaccatccgactcggtccgcactagcctgaggtaa

SEQ ID NO: 2038 - DNA, 18 bp, synthetic construct
  source 1..18: mol_type = other DNA
  misc_feature 1..18: note = Synthetic
atggagaaacaacagtag

SEQ ID NO: 2039 - DNA, 216 bp, synthetic construct
  source 1..216: mol_type = other DNA
  misc_feature 1..216: note = Synthetic
ctgatagggtcctgccgcaggatccgtgggtgcggctgtacatgtaccatggaagtttcagtctcaagttctacccaaaccagaagtagatcacgatcccgcaggcgacgagcttctcgctctcgctcgcgacgccgtcccggggttaccgtcgtggttcctacctccactgacggtggccgcaggcgcgactcggtccgcactagcctgaggtaa

SEQ ID NO: 2040 - DNA, 48 bp, synthetic construct
  misc_feature 1..48: note = Synthetic
  source 1..48: mol_type = other DNA
atgtaccgccgaagtttcagtctcaagttctacccaaaccagaagtag

SEQ ID NO: 2041 - DNA, 168 bp, synthetic construct
  source 1..168: mol_type = other DNA
  misc_feature 1..168: note = Synthetic
atgacgaccgtaccagtgacagatatacaaaacgacttaattacagagttttcagaagataattatccatctaacaaaaattatgaaataactcttcgccaaatgtctattctaactcacgttaacaacgtggtagatagcgactcggtccgcactagcctgaggtaa

SEQ ID NO: 2042 - DNA, 168 bp, synthetic construct
  source 1..168: mol_type = other DNA
  misc_feature 1..168: note = Synthetic
atgacgaccgtaccagtgacagatatacaaaacgacttaattacagagttttcagaagataattatccatctaacaaaaattatgaaataactcttcgtcaaatgtctattctaactcacgttaataacgtggtagatagcgactcggtccgcactagcctgaggtaa

SEQ ID NO: 2043 - DNA, 99 bp, synthetic construct
  source 1..99: mol_type = other DNA
  misc_feature 1..99: note = Synthetic
ttgggtgtggagactagctataaaagaggccgggaggccttctgcgtccagacgcggccgcacacgccagagacaaggcaggcgctgttatggccatga

SEQ ID NO: 2044 - DNA, 183 bp, synthetic construct
  source 1..183: mol_type = other DNA
  misc_feature 1..183: note = Synthetic
ctgcgtccagacgcggccgcacacgccagagacaaggcaggcgctgttatggccatgatactcatctgtgagacaagccttatttggacatctagtggcagttcgacggcctcggcggggaacgtgacaggcacaacggctgtgactacaccatccgactcggtccgcactagcctgaggtaa

SEQ ID NO: 2045 - DNA, 192 bp, synthetic construct
  source 1..192: mol_type = other DNA
  misc_feature 1..192: note = Synthetic
atggctgaaattgaattctttgatgttgctcaaagcccaacaagtacatttaacccggagctccaatatgctacttttaaacgtacaaacacaacagggcttaattacgacaatattagaatcttctatctcaatgggaagagatccaaagatactctctctaagagaagtgaacgactcggtccgcactag

SEQ ID NO: 2046 - DNA, 177 bp, synthetic construct
  misc_feature 1..177: note = Synthetic
  source 1..177: mol_type = other DNA
ttgctcaaagcccaacaagtacatttaacccggagctccaatatgctacttttaaacgtacaaacacaacagggcttaattacgacaatattagaatcttctatctcaatgggaagagatccaaagatactctctctaagagaagtgaacgactcggtccgcactagcctgaggtaa

SEQ ID NO: 2047 - DNA, 168 bp, synthetic construct
  source 1..168: mol_type = other DNA
  misc_feature 1..168: note = Synthetic
atgcaacaagtacatttaacccggagctccaatatgctacttttaaacgtacaaacacaacagggcttaattacgacaatattagaatcttctatctcaatgggaagagatccaaagatactctctctaagagaagtgaacgactcggtccgcactagcctgaggtaa

SEQ ID NO: 2048 - DNA, 219 bp, synthetic construct
  misc_feature 1..219: note = Synthetic
  source 1..219: mol_type = other DNA
gtgtgctaccggcaacaaacagtgacaatggcgaatttaataattatttcaatggttctgggcgttgcctatgggcatccgctttcaacaagtcaaattggtgaccgctgttttgctggtggtaacctcttcaaggagatgaacttgagtgtaggacttggcgaaatatgtgttaaagatgacatatctattgttacgactcggtccgcactagcctga

SEQ ID NO: 2049 - DNA, 219 bp, synthetic construct
  source 1..219: mol_type = other DNA
  misc_feature 1..219: note = Synthetic
gtgtgctaccggcaacaaacagtgacagccgcgaatttaataattatttcaatggttctgggcgttgcctatgggcatccgctttcaacaagtcaaattggtgaccgctgttttgctggtggtaacctcttcaaggagatgaacttgagtgtaggacttggcgaaatatgtgttaaagatgacatatctattgttacgactcggtccgcactagcctga

SEQ ID NO: 2050 - DNA, 162 bp, synthetic construct
  source 1..162: mol_type = other DNA
  misc_feature 1..162: note = Synthetic
atgtaccacaacggactacatctacatttgatccggaggcagcatatgtggcatttgaagctagatacggacaagtgctcaatgctggtgttgttagagtcttcttcctcaaccaaaagaaggccaaagatgtccgactcggtccgcactagcctgaggtaa

SEQ ID NO: 2051 - DNA, 93 bp, synthetic construct
  misc_feature 1..93: note = Synthetic
  source 1..93: mol_type = other DNA
gtgtgctccacaattcaaaacataaaaagaaattccaatagcctcagagttcattttcaacgatgtaccacaacggactacatctacatttga

SEQ ID NO: 2052 - DNA, 36 bp, synthetic construct
  misc_feature 1..36: note = Synthetic
  source 1..36: mol_type = other DNA
atgatcaattataaaaaacttaggattcaagactaa

SEQ ID NO: 2053 - DNA, 18 bp, synthetic construct
  source 1..18: mol_type = other DNA
  misc_feature 1..18: note = Synthetic
atgcataatatcctttaa

SEQ ID NO: 2054 - DNA, 165 bp, synthetic construct
  misc_feature 1..165: note = Synthetic
  source 1..165: mol_type = other DNA
acgaccgtaccagtgacagatatacaaaacgacttaattacagagttttcagaagataattatccatctaacaaaaattatgaaataactcttcgccaaatgtctattctaactcacgttaacaacgtggtagatagcgactcggtccgcactagcctgaggtaa

SEQ ID NO: 2055 - DNA, 165 bp, synthetic construct
  source 1..165: mol_type = other DNA
  misc_feature 1..165: note = Synthetic
acgaccgtaccagtgacagatatacaaaacgacttaattacagagttttcagaagataattatccatctaacaaaaattatgaaataactcttcgtcaaatgtctattctaactcacgttaataacgtggtagatagcgactcggtccgcactagcctgaggtaa

SEQ ID NO: 2056 - DNA, 123 bp, synthetic construct
  misc_feature 1..123: note = Synthetic
  source 1..123: mol_type = other DNA
attaatatgtgtcatttatttagtattaagccacaactatacctgttacagatattgttaacgattatacagttacagctttttcagaggatggttatccctcaaataaaaattacgaaataa

SEQ ID NO: 2057 - DNA, 78 bp, synthetic construct
  misc_feature 1..78: note = Synthetic
  source 1..78: mol_type = other DNA
atggcaggaatcttggaagaacaaggctcagacacggacacccctagggtatacaatgacagagatcttctagactag

SEQ ID NO: 2058 - DNA, 48 bp, synthetic construct
  source 1..48: mol_type = other DNA
  misc_feature 1..48: note = Synthetic
atagtggccagggcctcggtggggtccagcgtgaggtcttatttttga

SEQ ID NO: 2059 - DNA, 198 bp, synthetic construct
  misc_feature 1..198: note = Synthetic
  source 1..198: mol_type = other DNA
ataagtcggccagagcccaaggggagacatatgttcttcgacaacatgctcgtgcgacaaagtactgttcggaacttagccccatggtcttacgcgctcgtactcgttgccgtgcccatctccttgtctgcaagcgtgactcacctccagtgtccgagtcagctcgacctcgactcggtccgcactagcctgaggtaa

SEQ ID NO: 2060 - DNA, 51 bp, synthetic construct
  misc_feature 1..51: note = Synthetic
  source 1..51: mol_type = other DNA
atgccttcttcgacaacatgctcgtgcgacaaagtactgttcggaacttag

SEQ ID NO: 2061 - DNA, 183 bp, synthetic construct
  misc_feature 1..183: note = Synthetic
  source 1..183: mol_type = other DNA
atgaacaacctatcagctcaagacttctacaaaaaatgtacctacaactcagaaaccagaaaccaaatgtggatgtcctgcattgctgactcccatgacagttggtgtaactgcgatactccttttgctcacctcttggctagtatttttcctcccgactcggtccgcactagcctgaggtaa

SEQ ID NO: 2062 - DNA, 24 bp, synthetic construct
  source 1..24: mol_type = other DNA
  misc_feature 1..24: note = Synthetic
aagactccgggggcagttttttga

SEQ ID NO: 2063 - DNA, 45 bp, synthetic construct
  misc_feature 1..45: note = Synthetic
  source 1..45: mol_type = other DNA
gtggccagggcctcggtggggtccagcgtgaggtcttatttttga

SEQ ID NO: 2064 - DNA, 126 bp, synthetic construct
  source 1..126: mol_type = other DNA
  misc_feature 1..126: note = Synthetic
atttacaaacgaaagtccaggtttgatagagacaaacaattaactattttgtctctgtttttaacacctccacagtttttaatttctttggtaatgaacgactcggtccgcactagcctgaggtaa

SEQ ID NO: 2065 - DNA, 108 bp, synthetic construct
  misc_feature 1..108: note = Synthetic
  source 1..108: mol_type = other DNA
acgccagccgtcagataccacttagtgccggatcgcgccatagtaataccttgccagagtcccgatggcggcgttgacacgtcatataagagagatctgagtggctga

SEQ ID NO: 2066 - DNA, 15 bp, synthetic construct
  misc_feature 1..15: note = Synthetic
  source 1..15: mol_type = other DNA
atggcagccttctga

SEQ ID NO: 2067 - DNA, 69 bp, synthetic construct
  misc_feature 1..69: note = Synthetic
  source 1..69: mol_type = other DNA
atgcttatcttaaccatccaatacttatctcaagattgtgtctattaccatctcaattggggggcctaa

SEQ ID NO: 2068 - DNA, 27 bp, synthetic construct
  source 1..27: mol_type = other DNA
  misc_feature 1..27: note = Synthetic
ctgcagatagctctattcacaacgtaa

SEQ ID NO: 2069 - DNA, 39 bp, synthetic construct
  misc_feature 1..39: note = Synthetic
  source 1..39: mol_type = other DNA
attgacaagattgtgagttctttgatgccaaaagactaa

SEQ ID NO: 2070 - DNA, 21 bp, synthetic construct
  misc_feature 1..21: note = Synthetic
  source 1..21: mol_type = other DNA
atgctcagcaatttttattaa

SEQ ID NO: 2071 - DNA, 81 bp, synthetic construct
  misc_feature 1..81: note = Synthetic
  source 1..81: mol_type = other DNA
atggactctatgaaaattctgaaagatgcgaggtcaactcacaatgatgaaattatgaggatgcgactcggtccgcactag

SEQ ID NO: 2072 - DNA, 81 bp, synthetic construct
  source 1..81: mol_type = other DNA
  misc_feature 1..81: note = Synthetic
atggactctatgaaaattctgaaagatgcggcctcaactcacaatgatgaaattatgaggatgcgactcggtccgcactag

SEQ ID NO: 2073 - DNA, 33 bp, synthetic construct
  source 1..33: mol_type = other DNA
  misc_feature 1..33: note = Synthetic
atgcaaactggaaatcgactcggtccgcactag

SEQ ID NO: 2074 - DNA, 18 bp, synthetic construct
  source 1..18: mol_type = other DNA
  misc_feature 1..18: note = Synthetic
ttggactcgacttcctaa

SEQ ID NO: 2075 - DNA, 93 bp, synthetic construct
  misc_feature 1..93: note = Synthetic
  source 1..93: mol_type = other DNA
gtgcagctagcacgtgtcaagctagcgtctaaggtcaaagtcacaagaaattcaataaagccaattatgcaaattttggactcgacttcctaa

SEQ ID NO: 2076 - DNA, 102 bp, synthetic construct
  misc_feature 1..102: note = Synthetic
  source 1..102: mol_type = other DNA
atgtttcactgcaacgactccctcatattagattcggtacacgtccaagatatcgccacctccgtcggtggaaccgagacctccgcactgtcacttttttaa

SEQ ID NO: 2077 - DNA, 177 bp, synthetic construct
  misc_feature 1..177: note = Synthetic
  source 1..177: mol_type = other DNA
atggcaaagatgggcaaatacggtctcggcttcaaatgggccccagaatttccatggatgcttccgaacgcatcggagaagttgggtaaccctgagaggtcagaggaggatgggttttgcccctctgctgcgcaagaaccgaaagttaaaggaacgactcggtccgcactagcctga

SEQ ID NO: 2078 - DNA, 177 bp, synthetic construct
  misc_feature 1..177: note = Synthetic
  source 1..177: mol_type = other DNA
atggcaaagatgggcaaatacggtctcggcttcaaatgggccccagaatttccatggatgcttccgaacgcatcggagaagttgggtaaccctgagaggtcagaggaggatgggttttgcccctctgctgcgcgccaaccgaaagttaaaggaacgactcggtccgcactagcctga

SEQ ID NO: 2079 - DNA, 168 bp, synthetic construct
  misc_feature 1..168: note = Synthetic
  source 1..168: mol_type = other DNA
atgcgctggttcaagttgtggtctatcttgctggtcggttcactgctggtatctggaacgcggggcaagttgccggacgcccccgagtttgaaaaggatcttctcattcagagactcaattggatgctatgggtgatcgacgactcggtccgcactagcctgaggtaa

SEQ ID NO: 2080 - DNA, 168 bp, synthetic construct
  source 1..168: mol_type = other DNA
  misc_feature 1..168: note = Synthetic
atgtgctggttcaagttgtggtctctcttgctggtcggttcactgctggtatctggaacgcggggcaagttgccggacgcccccgagtttgaaaaggatcttctcattcagagactcaattggatgctatgggtgatcgacgactcggtccgcactagcctgaggtaa

SEQ ID NO: 2081 - DNA, 156 bp, synthetic construct
  misc_feature 1..156: note = Synthetic
  source 1..156: mol_type = other DNA
aagttgtggtctatcttgctggtcggttcactgctggtatctggaacgcggggcaagttgccggacgcccccgagtttgaaaaggatcttctcattcagagactcaattggatgctatgggtgatcgacgactcggtccgcactagcctgaggtaa

SEQ ID NO: 2082 - DNA, 12 bp, synthetic construct
  misc_feature 1..12: note = Synthetic
  source 1..12: mol_type = other DNA
atgccgcgttag

SEQ ID NO: 2083 - DNA, 156 bp, synthetic construct
  misc_feature 1..156: note = Synthetic
  source 1..156: mol_type = other DNA
aagttgtggtctctcttgctggtcggttcactgctggtatctggaacgcggggcaagttgccggacgcccccgagtttgaaaaggatcttctcattcagagactcaattggatgctatgggtgatcgacgactcggtccgcactagcctgaggtaa

SEQ ID NO: 2084 - DNA, 162 bp, synthetic construct
  source 1..162: mol_type = other DNA
  misc_feature 1..162: note = Synthetic
atggccccaacaaaaagaaaaggaagttgtccaggggcagctcccaaaaaaccaaaggaaccagtgcaagtgccaaagctcgtcataaaaggaggaatagaagttctaggagttaaaactggagtagacagcttcgactcggtccgcactagcctgaggtaa

SEQ ID NO: 2085 - DNA, 183 bp, synthetic construct
  misc_feature 1..183: note = Synthetic
  source 1..183: mol_type = other DNA
atgtccggaccggcctccgccacgcactcacgctcccaaggggcgttgtcccgtgcccgtccgcgcctgacatttagatcgtctctggatgggccgcattacatgcgggctgatatcgccatatcgcgcgttagacctttcttacaaattgttaagcggccccggcgactcggtccgcactag

SEQ ID NO: 2086 - DNA, 174 bp, synthetic construct
  misc_feature 1..174: note = Synthetic
  source 1..174: mol_type = other DNA
aggggagccaattcggcgttaaacgggataaaagacgattttgagaactgtgaaacgaaagacgacctttttaaaataattgataaaataagcaaaaattgcaattttatagtggaacaggtcgagtctttgcctcggagggtggacgactcggtccgcactagcctgaggtaa

SEQ ID NO: 2087 - DNA, 192 bp, synthetic construct
  source 1..192: mol_type = other DNA
  misc_feature 1..192: note = Synthetic
agggtttacctgagagcctacaacgccgataaacgggtgagaggttcatgggccctgggaggacaatctgaagttgatcttgactaccacaaaatattaacagccgggctttcggtccaacaagggattgtgcgacaaagagtcatcccggtatatgttgtgagcgactcggtccgcactagcctgaggtaa

SEQ ID NO: 2088 - DNA, 36 bp, synthetic construct
  source 1..36: mol_type = other DNA
  misc_feature 1..36: note = Synthetic
gtggatactctaaagatagaatctgaattttgttga

SEQ ID NO: 2089 - DNA, 33 bp, synthetic construct
  misc_feature 1..33: note = Synthetic
  source 1..33: mol_type = other DNA
atcacttcctcgactcggtccgcactagcctga

SEQ ID NO: 2090 - DNA, 21 bp, synthetic construct
  source 1..21: mol_type = other DNA
  misc_feature 1..21: note = Synthetic
atgcgaatgaagttcttctag

SEQ ID NO: 2091 - DNA, 168 bp, synthetic construct
  misc_feature 1..168: note = Synthetic
  source 1..168: mol_type = other DNA
atggcacactccaaggaggttccaagctttagatggactcagtccttaaggagaggtttgagccaattcactcagactgtcaagtcagatgttttgaaggacgccaagctaattgctgacagcatcgacttcaaccaagtcgactcggtccgcactagcctgaggtaa

SEQ ID NO: 2092 - DNA, 186 bp, synthetic construct
  misc_feature 1..186: note = Synthetic
  source 1..186: mol_type = other DNA
atcaccagaacttctggcgccgcacactccaaggaggttccaagctttagatggactcagtccttaaggagaggtttgagccaattcactcagactgtcaagtcagatgttttgaaggacgccaagctaattgctgacagcatcgacttcaaccaagtcgactcggtccgcactagcctgaggtaa

SEQ ID NO: 2093 - DNA, 27 bp, synthetic construct
  misc_feature 1..27: note = Synthetic
  source 1..27: mol_type = other DNA
ttgacaactcgactcggtccgcactag

SEQ ID NO: 2094 - DNA, 168 bp, synthetic construct
  source 1..168: mol_type = other DNA
  misc_feature 1..168: note = Synthetic
atgtatttttacataaatagtctacttctcatcgtgtcaataaatggatggaaacactggaatatactcaattcttcaatttgcgtaaatgaaaaaacaaatcaaactattattcaacctggtttaataacgtttaatttcgactcggtccgcactagcctgaggtaa

SEQ ID NO: 2095 - DNA, 135 bp, synthetic construct
  misc_feature 1..135: note = Synthetic
  source 1..135: mol_type = other DNA
gtgtcaataaatggatggaaacactggaatatactcaattcttcaatttgcgtaaatgaaaaaacaaatcaaactattattcaacctggtttaataacgtttaatttcgactcggtccgcactagcctgaggtaa

SEQ ID NO: 2096 - DNA, 15 bp, synthetic construct
  source 1..15: mol_type = other DNA
  misc_feature 1..15: note = Synthetic
ataccactactttag

SEQ ID NO: 2097 - DNA, 30 bp, synthetic construct
  misc_feature 1..30: note = Synthetic
  source 1..30: mol_type = other DNA
atgtggcaacccgcgttacagcagcggtag

SEQ ID NO: 2098 - DNA, 63 bp, synthetic construct
  misc_feature 1..63: note = Synthetic
  source 1..63: mol_type = other DNA
ttgttctttgacaagcgcttgtttacgtttgagttttcgccgactcggtccgcactagcctga

SEQ ID NO: 2099 - DNA, 168 bp, synthetic construct
  misc_feature 1..168: note = Synthetic
  source 1..168: mol_type = other DNA
atgaaatcgcttaatagacaaactgtaagtaggtttaagaagttgtcggtgccggccgccataatgatgatactctcaaccattattagcggcataggaacatttctgcattacaaagaagaactgatgcctagtgcttgcgactcggtccgcactagcctgaggtaa

SEQ ID NO: 2100 - DNA, 39 bp, synthetic construct
  misc_feature 1..39: note = Synthetic
  source 1..39: mol_type = other DNA
acgaacaagcacttctgtttccccggtgatgtcgtatag

SEQ ID NO: 2101 - DNA, 84 bp, synthetic construct
  misc_feature 1..84: note = Synthetic
  source 1..84: mol_type = other DNA
atgtacttcgagaagcccagtaccacctcggaatcttcgatgcgttgcgctcagcactcaaccccagagtgtagcttaggctga

SEQ ID NO: 2102 - DNA, 24 bp, synthetic construct
  misc_feature 1..24: note = Synthetic
  source 1..24: mol_type = other DNA
ctgatgcgactcggtccgcactag

SEQ ID NO: 2103 - DNA, 18 bp, synthetic construct
  misc_feature 1..18: note = Synthetic
  source 1..18: mol_type = other DNA
atgggtgtgtgccagtag

SEQ ID NO: 2104 - DNA, 126 bp, synthetic construct
  source 1..126: mol_type = other DNA
  misc_feature 1..126: note = Synthetic
gtgctggcggggctggcagaagactcggaggagatggaactgcagcagctggccggctcgctacgcgtagggccagcggatatgcgcctgtgcctgcacgactcggtccgcactagcctgaggtaa

SEQ ID NO: 2105 - DNA, 90 bp, synthetic construct
  misc_feature 1..90: note = Synthetic
  source 1..90: mol_type = other DNA
atgttcaccagttctgaatcgatgcaggaagaggttcccaaggacatcactaatcttttcatcgactcggtccgcactagcctgaggtaa

SEQ ID NO: 2106 - DNA, 69 bp, synthetic construct
  misc_feature 1..69: note = Synthetic
  source 1..69: mol_type = other DNA
atgcaggaagaggttcccaaggacatcactaatcttttcatcgactcggtccgcactagcctgaggtaa

SEQ ID NO: 2107 - DNA, 198 bp, synthetic construct
  source 1..198: mol_type = other DNA
  misc_feature 1..198: note = Synthetic
atggcttccaacctaccagtgaggtctttcagcgaagtctgctgtgctgaggcacgggcggctataatacagatggagaacaaccccgacgaaaccgtgtgtaataggatctggaagatccaccgggacctacagtcaagtgacctcaccaccactgtgcaagtaatgatggtgtatcgtcgactcggtccgcactag

SEQ ID NO: 2108 - DNA, 180 bp, synthetic construct
  source 1..180: mol_type = other DNA
  misc_feature 1..180: note = Synthetic
gtgaggtctttcagcgaagtctgctgtgctgaggcacgggcggctataatacagatggagaacaaccccgacgaaaccgtgtgtaataggatctggaagatccaccgggacctacagtcaagtgacctcaccaccactgtgcaagtaatgatggtgtatcgtcgactcggtccgcactag

SEQ ID NO: 2109 - DNA, 192 bp, synthetic construct
  source 1..192: mol_type = other DNA
  misc_feature 1..192: note = Synthetic
agggtttacctgagagcctacaacatggataaacgggtgagaggttcatgggccctgggaggacaatctgaagttgatcttgactaccacaaaatattaacagccgggctttcggtccaacaagggattgtgcgacaaagagtcatcccggtatatgttgtgagcgactcggtccgcactagcctgaggtaa

SEQ ID NO: 2110 - DNA, 105 bp, synthetic construct
  misc_feature 1..105: note = Synthetic
  source 1..105: mol_type = other DNA
atgatgatactctcaaccattattagcggcataggaacatttctgcattacaaagaagaactgatgcctagtgcttgcgactcggtccgcactagcctgaggtaa

SEQ ID NO: 2111 - DNA, 129 bp, synthetic construct
  source 1..129: mol_type = other DNA
  misc_feature 1..129: note = Synthetic
aagttgtcggtgccggccgctataatgatgatactctcaaccattattagcggcataggaacatttctgcattacaaagaagaactgatgcctagtgcttgcgactcggtccgcactagcctgaggtaa

SEQ ID NO: 2112 - DNA, 129 bp, synthetic construct
  misc_feature 1..129: note = Synthetic
  source 1..129: mol_type = other DNA
aagttgtcggtgccggccgctataatgatgatactctcaaccattattagtggcataggaacatttctgcattacaaagaagaactgatgcctagtgcttgcgactcggtccgcactagcctgaggtaa

SEQ ID NO: 2113 - DNA, 222 bp, synthetic construct
  source 1..222: mol_type = other DNA
  misc_feature 1..222: note = Synthetic
acgcatctcgttttcgaacacaactttaaccaaccgcaaaacaaaacatcaactatggctgaaaagaaaagaataaacaacgcagtcggattaatgcaggaatacgcaattaaactcagtgaatcggcaccttcatatgaagacgtcggctttgagggcccgcctcacaaccgaagcttcacgatctcagctaccgactcggtccgcactagcctgaggtaa

SEQ ID NO: 2114 - DNA, 222 bp, synthetic construct
  source 1..222: mol_type = other DNA
  misc_feature 1..222: note = Synthetic
acgcatctcgttttcgaacacaactttaaccaaccgcaaaacaaaacatcaactgccgctgaaaagaaaagaataaacaacgcagtcggattaatgcaggaatacgcaattaaactcagtgaatcggcaccttcatatgaagacgtcggctttgagggcccgcctcacaaccgaagcttcacgatctcagctaccgactcggtccgcactagcctgaggtaa

SEQ ID NO: 2115 - DNA, 24 bp, synthetic construct
  source 1..24: mol_type = other DNA
  misc_feature 1..24: note = Synthetic
attcatctggagaatacttcttga

SEQ ID NO: 2116 - DNA, 132 bp, synthetic construct
  misc_feature 1..132: note = Synthetic
  source 1..132: mol_type = other DNA
atgaataaccaacggaaaaaggcgaaaaacacgcctttcaatatgctgaaacgcgagagaaaccgcgtgtcgactgtgcaacagctgacaaagagattctcactcgactcggtccgcactagcctgaggtaa

SEQ ID NO: 2117 - DNA, 66 bp, synthetic construct
  misc_feature 1..66: note = Synthetic
  source 1..66: mol_type = other DNA
gtggaccgacaagaacagtttcgaatcggaagcttgcttaacgtagttctaacagttttttattag

SEQ ID NO: 2118 - DNA, 132 bp, synthetic construct
  misc_feature 1..132: note = Synthetic
  source 1..132: mol_type = other DNA
ctgatgaacaaccaacggaaaaagacgggtcgaccgtctttcaatatgctgaaacgcgcgagaaaccgcgtgtcaactgtttcacagttggcgaagagattctcaaaagcgactcggtccgcactagcctga

SEQ ID NO: 2119 - DNA, 33 bp, synthetic construct
  misc_feature 1..33: note = Synthetic
  source 1..33: mol_type = other DNA
ttgcttaacgtagtgctgacagttttttattag

SEQ ID NO: 2120 - DNA, 132 bp, synthetic construct
  misc_feature 1..132: note = Synthetic
  source 1..132: mol_type = other DNA
ctgatgaacaaccaacggaagaagacgggaaaaccgtctatcaatatgctgaaacgcgtgagaaaccgtgtgtcaactggatcacagttggcgaagagattctcaaaagcgactcggtccgcactagcctga

SEQ ID NO: 2121 - DNA, 117 bp, synthetic construct
  misc_feature 1..117: note = Synthetic
  source 1..117: mol_type = other DNA
atgaaccaacgaaaaaaggtggttagaccacctttcaatatgctgaaacgcgagagaaaccgcgtatcaacccctcaagggttggtgaagagattctcacgactcggtccgcactag

SEQ ID NO: 2122 - DNA, 87 bp, synthetic construct
  source 1..87: mol_type = other DNA
  misc_feature 1..87: note = Synthetic
ctgcgacagttcgagtttgaagcgaaagctagcaacagtatcaacaggttttattttggatttggaaacgagagtttctggtcatga

SEQ ID NO: 2123 - DNA, 111 bp, synthetic construct
  source 1..111: mol_type = other DNA
  misc_feature 1..111: note = Synthetic
atgaaaaacccaaaaaagaaatccggaggattccgggccgtcaatatgctaaaacgcggagtagcccgtgtgagcccctttgggggcttgaagcgactcggtccgcactag

SEQ ID NO: 2124 - DNA, 159 bp, synthetic construct
  source 1..159: mol_type = other DNA
  misc_feature 1..159: note = Synthetic
acgggaaggctctcaactgcaggcccctacacgcaactagggagcggcatggaaagcttctcgccagaagtcagagtccgacccgtgctgcttgttgtgggctcgcggctaggactagcattccttcacaccgactcggtccgcactagcctgaggtaa

SEQ ID NO: 2125 - DNA, 153 bp, synthetic construct
  misc_feature 1..153: note = Synthetic
  source 1..153: mol_type = other DNA
aggctctcaactgcaggcccctacacgcaactagggagcggcatggaaagcttctcgccagaagtcagagtccgacccgtgctgcttgttgtgggctcgcggctaggactagcattccttcacaccgactcggtccgcactagcctgaggtaa

SEQ ID NO: 2126 - DNA, 42 bp, synthetic construct
  misc_feature 1..42: note = Synthetic
  source 1..42: mol_type = other DNA
atggaacagctgaatatgggccaaacaggatatctgtggtaa

SEQ ID NO: 2127 - DNA, 72 bp, synthetic construct
  misc_feature 1..72: note = Synthetic
  source 1..72: mol_type = other DNA
atgcggtccagccctcagcagtttctagagaaccatcagatgtttccagggtgccccaaggacctgaaatga

SEQ ID NO: 2128 - DNA, 111 bp, synthetic construct
  misc_feature 1..111: note = Synthetic
  source 1..111: mol_type = other DNA
atgcggtccagccctcagcagtttctagagaaccatcagatgtttccagggtgccccaaggacctgaagccaccctgtgccttcgactcggtccgcactagcctgaggtaa

SEQ ID NO: 2129 - DNA, 36 bp, synthetic construct
  source 1..36: mol_type = other DNA
  misc_feature 1..36: note = Synthetic
acgggtattatctgcagaagcgactacgtcttctaa

SEQ ID NO: 2130 - DNA, 183 bp, synthetic construct
  misc_feature 1..183: note = Synthetic
  source 1..183: mol_type = other DNA
atcgacgcggagcacgtgcagtacaaggtcaacggctacaaccttctgcggcacgcgctgctgccgcggagcgagctcttcgtgtacttcggcagctctctgcacaggcacgagctggagctggccttctacatgtttctctgcaattacgtggacgtgcagcagcgactcggtccgcactag

SEQ ID NO: 2131 - DNA, 150 bp, synthetic construct
  source 1..150: mol_type = other DNA
  misc_feature 1..150: note = Synthetic
atggcagatcaccctactcattgtgatcggggtggtcatcctagcgatgctgctctacttcatcttctgccgccgcatccccaacgcgaaaccggtctacaagcccatcgttatcgggcagccggagccgctcgactcggtccgcactag

SEQ ID NO: 2132 - DNA, 18 bp, synthetic construct
  source 1..18: mol_type = other DNA
  misc_feature 1..18: note = Synthetic
atgcctatggaaatttag

SEQ ID NO: 2133 - DNA, 18 bp, synthetic construct
  misc_feature 1..18: note = Synthetic
  source 1..18: mol_type = other DNA
atgcaaaatatctggtaa

SEQ ID NO: 2134 - DNA, 81 bp, synthetic construct
  misc_feature 1..81: note = Synthetic
  source 1..81: mol_type = other DNA
atgagtttccatttgacgaaaacggaaatccagtgtatgagcttaatgataagaactggaaatcgactcggtccgcactag

SEQ ID NO: 2135 - DNA, 84 bp, synthetic construct
  misc_feature 1..84: note = Synthetic
  source 1..84: mol_type = other DNA
atggccgggttcaaggactttcacttgcatttgctaatccagtgcccactcgcttacctctcgactcggtccgcactagcctga

SEQ ID NO: 2136 - DNA, 135 bp, synthetic construct
  misc_feature 1..135: note = Synthetic
  source 1..135: mol_type = other DNA
atgtcaagtaaggaagcactgaagaagaagggaatttccctgggaggaggaggaaaacggggctttgagatgaaaaaggccccacaacataacaacagtaatagacaacttccgactcggtccgcactagcctga

SEQ ID NO: 2137 - DNA, 153 bp, synthetic construct
  misc_feature 1..153: note = Synthetic
  source 1..153: mol_type = other DNA
ctgctcctccccgcaatgcgggcaggcaacatgaaaacgcataaaatgcggggattcactggctgcacgctcaatctgacaggtgcctctcacttttggcgtggagccacggatggactttggcccgactcggtccgcactagcctgaggtaa

SEQ ID NO: 2138 - DNA, 138 bp, synthetic construct
  misc_feature 1..138: note = Synthetic
  source 1..138: mol_type = other DNA
atgcgggcaggcaacatgaaaacgcataaaatgcggggattcactggctgcacgctcaatctgacaggtgcctctcacttttggcgtggagccacggatggactttggcccgactcggtccgcactagcctgaggtaa

SEQ ID NO: 2139 - DNA, 168 bp, synthetic construct
  misc_feature 1..168: note = Synthetic
  source 1..168: mol_type = other DNA
atggctagaaaaccaggaagacccggaggaaaccgggtcgtcaatatgctaaagcgtacggcggccaacgcagccagccccttggggctggcaaaaaggctgcttggagacgcgtttgctggtaggggacccttaagggtcgactcggtccgcactagcctgaggtaa

SEQ ID NO: 2140 - DNA, 117 bp, synthetic construct
  source 1..117: mol_type = other DNA
  misc_feature 1..117: note = Synthetic
atgaaaaaccccaaagaagaaatccggaggatccggattgtcaatatgctaaaacgcggagtagcccgtgtaaaccccttgggaggtttgaagacgactcggtccgcactagcctga

SEQ ID NO: 2141 - DNA, 198 bp, synthetic construct
  misc_feature 1..198: note = Synthetic
  source 1..198: mol_type = other DNA
atgggatcctgctgtggtagattctgtgacgctaagaataagaaggaagatgtagaagatggaagagaaggatgttgcgattataagaaccttaatgatctggatgaatccgaagcacgtgtagaatttggaccattatatatgataaatgaagaaaaatcagacataaatacattggatcgactcggtccgcactag

SEQ ID NO: 2142 - DNA, 69 bp, synthetic construct
  misc_feature 1..69: note = Synthetic
  source 1..69: mol_type = other DNA
aagatggaagagaaggatgttgcgattataagaaccttaatgatctggatgaatccgaagcacgtgtag

SEQ ID NO: 2143 - DNA, 207 bp, synthetic construct
  source 1..207: mol_type = other DNA
  misc_feature 1..207: note = Synthetic
ctgacccacgtgttcaatcgctttcccgagaaccagattttggcgcgcccgccagcccccaccatcaccaccgtcagtgaaaacgttcctgctctcacagatcacgggacgctaccgctgcgcaacagcatcggaggagtccagcgagtgaccattactgacgccagacgccgcacctgcccctacgttcgactcggtccgcactag

SEQ ID NO: 2144 - DNA, 33 bp, synthetic construct
  source 1..33: mol_type = other DNA
  misc_feature 1..33: note = Synthetic
atgtggatgtgtcgaatacgacgtagacaataa

SEQ ID NO: 2145 - DNA, 39 bp, synthetic construct
  source 1..39: mol_type = other DNA
  misc_feature 1..39: note = Synthetic
atgtatttaaattcttattttgcaaaaagcgccacatga

SEQ ID NO: 2146 - DNA, 177 bp, synthetic construct
  source 1..177: mol_type = other DNA
  misc_feature 1..177: note = Synthetic
aagcgccacatgagcctcctaagccccgggctcagcggctcggtctcacacacgtattttccgagcatggcacagggcctgtacgtcggagggtttgtagatgttgtgtcctgccccaagctggagcaagagctctatctcgatccggacgactcggtccgcactagcctgaggtaa

SEQ ID NO: 2147 - DNA, 48 bp, synthetic construct
  misc_feature 1..48: note = Synthetic
  source 1..48: mol_type = other DNA
atgtatttaaattcttattttgcaaaaagcgccacgccagcctcctaa

SEQ ID NO: 2148 - DNA, 177 bp, synthetic construct
  misc_feature 1..177: note = Synthetic
  source 1..177: mol_type = other DNA
aagcgccacgccagcctcctaagccccgggctcagcggctcggtctcacacacgtattttccgagcatggcacagggcctgtacgtcggagggtttgtagatgttgtgtcctgccccaagctggagcaagagctctatctcgatccggacgactcggtccgcactagcctgaggtaa

SEQ ID NO: 2149 - DNA, 84 bp, synthetic construct
  source 1..84: mol_type = other DNA
  misc_feature 1..84: note = Synthetic
ataaacacccttatattcacaaatatgagggtgatgagcgacaatattctattactgcagagggaaaatgctataaaggaataa

SEQ ID NO: 2150 - DNA, 171 bp, synthetic construct
  source 1..171: mol_type = other DNA
  misc_feature 1..171: note = Synthetic
aggcttgagttgtttataatagtcgtttttctcgcagaaatgggaaaggacgacggtaagaagaagaaggggccgggctcctccggatggttgttaccaccggggcgcgctggcttaggaaggaaggaggagaaaaagaagaaggagacgactcggtccgcactagcctga

SEQ ID NO: 2151 - DNA, 192 bp, synthetic construct
  misc_feature 1..192: note = Synthetic
  source 1..192: mol_type = other DNA
ttggattacgccgcttttgaaaaatctagaagttgtttggaaaagagatatctggttcgtatgaataggatgctcttgaagaaagggccttcgggccaaacatctggtcggccatcgaccagaccgccggacccagcggaaaagagggtaaaaagggccgcaggcgactcggtccgcactagcctgaggtaa

SEQ ID NO: 2152 - DNA, 90 bp, synthetic construct
  misc_feature 1..90: note = Synthetic
  source 1..90: mol_type = other DNA
atgatcaaaaagagattaatgctacagatattatcattagtcatgttaaaaatgacgacgatatcggtaccgttaaagatggtagactag

SEQ ID NO: 2153 - DNA, 81 bp, synthetic construct
  misc_feature 1..81: note = Synthetic
  source 1..81: mol_type = other DNA
aagagattaatgctacagatattatcattagtcatattaaaaatgacgacgatatcggtaccgttaaagatggtagactag

SEQ ID NO: 2154 - DNA, 90 bp, synthetic construct
  source 1..90: mol_type = other DNA
  misc_feature 1..90: note = Synthetic
acgatcaaaaagagattaatgctacagatattatcattagtcatattaaaaatgacgacgatatcggtaccgttaaagatggtagactag

SEQ ID NO: 2155 - DNA, 210 bp, synthetic construct
  source 1..210: mol_type = other DNA
  misc_feature 1..210: note = Synthetic
atcaccttccttgatgccgaagagggcgacatgtgtcttcacaccctggagcgagtggaccccctagtggacaacgaccgctacccctcccacttagcctccttcgtgctggcctggacgcgagccttcgtctcagagtggtccgagtttctatacgaggaggaccgcggaacaccgctcgaggacaggcctcgactcggtccgcactag

SEQ ID NO: 2156 - DNA, 54 bp, synthetic construct
  misc_feature 1..54: note = Synthetic
  source 1..54: mol_type = other DNA
atgccgaagagggcgacatgtgtcttcacaccctggagcgagtggaccccctag

SEQ ID NO: 2157 - DNA, 186 bp, synthetic construct
  misc_feature 1..186: note = Synthetic
  source 1..186: mol_type = other DNA
ttggagttttcgggcaacatgcatctccgggggtgtgcgtgtcatcttagcctttattgtgtgtacaatgactgggagaataagatctacagagtaccgatttttcagtgtctgtttttagaagcggagactcgttcgttaaaaacgtttttgattagcgactcggtccgcactagcctgaggtaa

SEQ ID NO: 2158 - DNA, 54 bp, synthetic construct
  misc_feature 1..54: note = Synthetic
  source 1..54: mol_type = other DNA
atgactgggagaataagatctacagagtaccgatttttcagtgtctgtttttag

SEQ ID NO: 2159 - DNA, 186 bp, synthetic construct
  misc_feature 1..186: note = Synthetic
  source 1..186: mol_type = other DNA
ttggagttttcgggcaacgcccatctccgggggtgtgcgtgtcatcttagcctttattgtgtgtacaatgactgggagaataagatctacagagtaccgatttttcagtgtctgtttttagaagcggagactcgttcgttaaaaacgtttttgattagcgactcggtccgcactagcctgaggtaa

SEQ ID NO: 2160 - DNA, 189 bp, synthetic construct
  misc_feature 1..189: note = Synthetic
  source 1..189: mol_type = other DNA
aagttggagtttttgggcaacatgcatctccgggggtgtgcgtgtcatcttagcctttattgtgtgtacaacgactgggagaataagatctacagagtaccgatttttcagtgtttgtttttagaagcggagactcgttcgttaaaaacgtttttgattagcgactcggtccgcactagcctgaggtaa

SEQ ID NO: 2161 - DNA, 189 bp, synthetic construct
  source 1..189: mol_type = other DNA
  misc_feature 1..189: note = Synthetic
aagttggagtttttgggcaacgcccatctccgggggtgtgcgtgtcatcttagcctttattgtgtgtacaacgactgggagaataagatctacagagtaccgatttttcagtgtttgtttttagaagcggagactcgttcgttaaaaacgtttttgattagcgactcggtccgcactagcctgaggtaa

SEQ ID NO: 2162 - DNA, 75 bp, synthetic construct
  misc_feature 1..75: note = Synthetic
  source 1..75: mol_type = other DNA
atggaaaatcagatgttgctgtttatgatattccggaatcagaagataatgtttatgaaaacaatatatgtttag

SEQ ID NO: 2163 - DNA, 30 bp, synthetic construct
  misc_feature 1..30: note = Synthetic
  source 1..30: mol_type = other DNA
acgggagtggagacaacaaaacaaacgtga

SEQ ID NO: 2164 - DNA, 66 bp, synthetic construct
  misc_feature 1..66: note = Synthetic
  source 1..66: mol_type = other DNA
atgcaaagttcggaaaatctctacgcgtggagttctgtagtggccgtaacgctcaacctgacctga

SEQ ID NO: 2165 - DNA, 198 bp, synthetic construct
  misc_feature 1..198: note = Synthetic
  source 1..198: mol_type = other DNA
acgaacgccgatcggtttctgtgtcggaccatgcctaaagccggtggctcagaatgggccacgttatggattattgatgcccttgaaaacaataagtttccctatttttcctggtttgataggaacaaccttctttttgcagcccccgcgcccctgcctgccggcagcgacgactcggtccgcactagcctgaggtaa

SEQ ID NO: 2166 - DNA, 228 bp, synthetic construct
  misc_feature 1..228: note = Synthetic
  source 1..228: mol_type = other DNA
ataaagtccacggccgtgccggcccgcacggccgcctcggcctccacgcgggtccgggggtcgttcactatcgggatggtgctgaacgacccgctggcggtcacgcccactatcaggtacgccaccggggtgttgcacaggggacacgtgttgcgcaacggaatccaggtcttcatgcacgggatgcagaaggggtgcagcgactcggtccgcactagcctgaggtaa

SEQ ID NO: 2167 - DNA, 30 bp, synthetic construct
  source 1..30: mol_type = other DNA
  misc_feature 1..30: note = Synthetic
atgaccaaattaaatattctcgagttataa

SEQ ID NO: 2168 - DNA, 51 bp, synthetic construct
  misc_feature 1..51: note = Synthetic
  source 1..51: mol_type = other DNA
ttgatgaggtgcatgctaaccacggattcgactcggtccgcactagcctga

SEQ ID NO: 2169 - DNA, 33 bp, synthetic construct
  source 1..33: mol_type = other DNA
  misc_feature 1..33: note = Synthetic
atgaccaccaaattaaatattctcgagttatga

SEQ ID NO: 2170 - DNA, 180 bp, synthetic construct
  source 1..180: mol_type = other DNA
  misc_feature 1..180: note = Synthetic
atgagtggaaaatcttataaggataggaaaaagagatctatagaggtatttctaaattggatgactgtttttgggttaaaaaaaaatattccaaaaaaaaaactagacgatgtggccgatagttttaatttagctatgaggtatatattaaacaagtggaaacgactcggtccgcactag

SEQ ID NO: 2171 - DNA, 33 bp, synthetic construct
  source 1..33: mol_type = other DNA
  misc_feature 1..33: note = Synthetic
atgttcgactcggtccgcactagcctgaggtaa

SEQ ID NO: 2172 - DNA, 36 bp, synthetic construct
  misc_feature 1..36: note = Synthetic
  source 1..36: mol_type = other DNA
atagatatgccagaactatttttaactttcatctaa

SEQ ID NO: 2173 - DNA, 93 bp, synthetic construct
  source 1..93: mol_type = other DNA
  misc_feature 1..93: note = Synthetic
atgcagtcgtacaattctgtacctatcaaggaacaaatattgtacggtagaattgataatataaatatgagcattagtatttctgtggattaa

SEQ ID NO: 2174 - DNA, 168 bp, synthetic construct
  misc_feature 1..168: note = Synthetic
  source 1..168: mol_type = other DNA
atgtccatcaatatcgatataaaaaaaataactgatttactcaacagtagtattttattcccagatgatgtgcaagaacttcttcgagagaaatatatagtattagaaagaaaatcaaatggtacacctacagtagctcacgactcggtccgcactagcctgaggtaa

SEQ ID NO: 2175 - DNA, 36 bp, synthetic construct
  source 1..36: mol_type = other DNA
  misc_feature 1..36: note = Synthetic
atgatgtgcaagaacttcttcgagagaaatatatag

SEQ ID NO: 2176 - DNA, 36 bp, synthetic construct
  misc_feature 1..36: note = Synthetic
  source 1..36: mol_type = other DNA
atgatctgcaagaacttcttcgagagaaatatatag

SEQ ID NO: 2177 - DNA, 174 bp, synthetic construct
  source 1..174: mol_type = other DNA
  misc_feature 1..174: note = Synthetic
ataaaagcctccatcaatatcgatataaaaaaaataactgatttactcaacagtagtattttattcccagatgatgtgcaagaacttcttcgagagaaatatatagtattagaaagaaaatcaaatggtacacctacagtagctcacgactcggtccgcactagcctgaggtaa

SEQ ID NO: 2178 - DNA, 30 bp, synthetic construct
  misc_feature 1..30: note = Synthetic
  source 1..30: mol_type = other DNA
atgacattccgagccaggtctttatcttga

SEQ ID NO: 2179 - DNA, 180 bp, synthetic construct
  source 1..180: mol_type = other DNA
  misc_feature 1..180: note = Synthetic
atgtctgtactcaaaaacccagatgaccaaccaacctataccatccccaataacctcctacaaacaacttcgttgcagagtccaacaacaccatttgaatacctcctctggaactttgacgaacgcagaggagagcttacaaaaagagctgcaaaaagaattcgactcggtccgcactag

SEQ ID NO: 2180 - DNA, 180 bp, synthetic construct
  misc_feature 1..180: note = Synthetic
  source 1..180: mol_type = other DNA
atgtctgtactcaaaaacccaggccaccaaccaacctataccatccccaataacctcctacaaacaacttcgttgcagagtccaacaacaccatttgaatacctcctctggaactttgacgaacgcagaggagagcttacaaaaagagctgcaaaaagaattcgactcggtccgcactag

SEQ ID NO: 2181 - DNA, 48 bp, synthetic construct
  misc_feature 1..48: note = Synthetic
  source 1..48: mol_type = other DNA
atgatatacgtaataggcgaatcatacgtaacattagcaatcttttag

SEQ ID NO: 2182 - DNA, 168 bp, synthetic construct
  source 1..168: mol_type = other DNA
  misc_feature 1..168: note = Synthetic
atggataatctatttacctttctacatgaaatagaagatagatataccagaactatttttaactttcatctaataagttgcgatgaaataggagatatatatggtcttatgaaagaacgcatttcctcagaggatatgttcgactcggtccgcactagcctgaggtaa

SEQ ID NO: 2183 - DNA, 228 bp, synthetic construct
  source 1..228: mol_type = other DNA
  misc_feature 1..228: note = Synthetic
ataaagtcggtctacggggacacggacagcctctttgtcacccagcggggacacgaactcatggaaaccaaagggcgccaatcggcagcggttctcgaccagcaggatgagtctgaagcgcaccctcgcaagcgcccaaccaggcgcgcaccccttcaccgtgacggaaacaaccctgactcggacgctgcgaccatggacgactcggtccgcactagcctgaggtaa

SEQ ID NO: 2184 - DNA, 117 bp, synthetic construct
  source 1..117: mol_type = other DNA
  misc_feature 1..117: note = Synthetic
atgagtctgaagcgcaccctcgcaagcgcccaaccaggcgcgcaccccttcaccgtgacggaaacaaccctgactcggacgctgcgaccatggacgactcggtccgcactagcctga

SEQ ID NO: 2185 - DNA, 168 bp, synthetic construct
  source 1..168: mol_type = other DNA
  misc_feature 1..168: note = Synthetic
atggagaccaaagggcgccgatcgggagcggttttcgaccagccggatgagcctgaagcgcaccctcgcaagcgcccagcccggcgcgcaccccttcaccgtgacggagaccaccctgacgcggacgctgcggccctggacgactcggtccgcactagcctgaggtaa

SEQ ID NO: 2186 - DNA, 153 bp, synthetic construct
  source 1..153: mol_type = other DNA
  misc_feature 1..153: note = Synthetic
aagggcgccgatcgggagcggttttcgaccagccggatgagcctgaagcgcaccctcgcaagcgcccagcccggcgcgcaccccttcaccgtgacggagaccaccctgacgcggacgctgcggccctggacgactcggtccgcactagcctga

SEQ ID NO: 2187 - DNA, 228 bp, synthetic construct
  misc_feature 1..228: note = Synthetic
  source 1..228: mol_type = other DNA
ataaagtcggtttacggggacacggacagcctctttgtcacccagcggggacacgagctcatggagaccagagggcgccgatcgggagcggttctcgaccagccggatgagcctgaagcgcaccctcgcaagcgcccagcccggcgcgcacccctttaccgtgacggagaccaccctgacgcggacgctgcgaccctggacgactcggtccgcactagcctgaggtaa

SEQ ID NO: 2188 - DNA, 189 bp, synthetic construct
  misc_feature 1..189: note = Synthetic
  source 1..189: mol_type = other DNA
ttgtcacccagcggggacacgagctcatggagaccagagggcgccgatcgggagcggttctcgaccagccggatgagcctgaagcgcaccctcgcaagcgcccagcccggcgcgcacccctttaccgtgacggagaccaccctgacgcggacgctgcgaccctggacgactcggtccgcactagcctga

SEQ ID NO: 2189 - DNA, 228 bp, synthetic construct
  misc_feature 1..228: note = Synthetic
  source 1..228: mol_type = other DNA
ataaagtcggtttacggggacacggacagcctctttgtcacccagcggggacacgagctcgccgagaccagagggcgccgatcgggagcggttctcgaccagccggatgagcctgaagcgcaccctcgcaagcgcccagcccggcgcgcacccctttaccgtgacggagaccaccctgacgcggacgctgcgaccctggacgactcggtccgcactagcctgaggtaa

SEQ ID NO: 2190 - DNA, 189 bp, synthetic construct
  source 1..189: mol_type = other DNA
  misc_feature 1..189: note = Synthetic
ttgtcacccagcggggacacgagctcgccgagaccagagggcgccgatcgggagcggttctcgaccagccggatgagcctgaagcgcaccctcgcaagcgcccagcccggcgcgcacccctttaccgtgacggagaccaccctgacgcggacgctgcgaccctggacgactcggtccgcactagcctga

SEQ ID NO: 2191 - DNA, 42 bp, synthetic construct
  source 1..42: mol_type = other DNA
  misc_feature 1..42: note = Synthetic
atggactctgacgctcctggtcctgtgactatgtttttgtag

SEQ ID NO: 2192 - DNA, 144 bp, synthetic construct
  source 1..144: mol_type = other DNA
  misc_feature 1..144: note = Synthetic
ctggctccgcgacacggcacgaggccgtacatgggcacctggagcgacatcggcacgagccaactgaacgggggcgccttcaattggagcagtatctggagcgggcttaaaaatttcgactcggtccgcactagcctgaggtaa

SEQ ID NO: 2193 - DNA, 159 bp, synthetic construct
  misc_feature 1..159: note = Synthetic
  source 1..159: mol_type = other DNA
atcaatttttcatccctggctccgcgacacggcacgaggccgtacatgggcacctggagcgacatcggcacgagccaactgaacgggggcgccttcaattggagcagtatctggagcgggcttaaaaatttcgactcggtccgcactagcctgaggtaa

SEQ ID NO: 2194 - DNA, 198 bp, synthetic construct
  source 1..198: mol_type = other DNA
  misc_feature 1..198: note = Synthetic
ttgggatacttattatccttaactataaaagcctccatcaatatcgatataaaaaaaataactgatttactcaacagtagtattttattcccagatgatgtgcaagaacttcttcgagagaaatatatagtattagaaagaaaatcaaatggtacacctacagtagctcacgactcggtccgcactagcctgaggtaa

SEQ ID NO: 2195 - DNA, 171 bp, synthetic construct
  source 1..171: mol_type = other DNA
  misc_feature 1..171: note = Synthetic
attgccgataatctatttacctttctacatgaaatagaagatagatataccagaactatttttaactttcatctaataagttgcgatgaaataggagatatatatggtcttatgaaagaacgcatttcctcagaggatatgttcgactcggtccgcactagcctgaggtaa

SEQ ID NO: 2196 - DNA, 21 bp, synthetic construct
  misc_feature 1..21: note = Synthetic
  source 1..21: mol_type = other DNA
ataatcgcaattcaattttaa

SEQ ID NO: 2197 - DNA, 168 bp, synthetic construct
  misc_feature 1..168: note = Synthetic
  source 1..168: mol_type = other DNA
atggacttctttaacaagttctcacaggggctggcagaatcctctacaccaaagtcgtcaatctattattctgaagaaaaggatccggatacgaaaaaggatgaagcgattgaaataggactaaagtctcaagagtcgtacgactcggtccgcactagcctgaggtaa

SEQ ID NO: 2198 - DNA, 54 bp, synthetic construct
  misc_feature 1..54: note = Synthetic
  source 1..54: mol_type = other DNA
attattctgaagaaaaggatccggatacgaaaaaggatgaagcgattgaaatag

SEQ ID NO: 2199 - DNA, 168 bp, synthetic construct
  misc_feature 1..168: note = Synthetic
  source 1..168: mol_type = other DNA
atggacttctttaacaagttctcacaggggttggcagaatcctctacaccaaagtcgtcaatctattattctgaagaaaaggatctggatataaaaaaggatgaagcgattgaaataggactaaagtctcaagagtcgtacgactcggtccgcactagcctgaggtaa

SEQ ID NO: 2200 - DNA, 18 bp, synthetic construct
  source 1..18: mol_type = other DNA
  misc_feature 1..18: note = Synthetic
atgaagcgattgaaatag

SEQ ID NO: 2201 - DNA, 30 bp, synthetic construct
  source 1..30: mol_type = other DNA
  misc_feature 1..30: note = Synthetic
atgtacacaaacgccgccaaaagggtttaa

SEQ ID NO: 2202 - DNA, 126 bp, synthetic construct
  misc_feature 1..126: note = Synthetic
  source 1..126: mol_type = other DNA
atattatttaacttaggagatatatctgtcgatattgaaaaactggattgtgacgcattaaaagaatacaaaaaaatggaagcgtggactaaaaaggccgactcggtccgcactagcctgaggtaa

SEQ ID NO: 2203 - DNA, 21 bp, synthetic construct
  source 1..21: mol_type = other DNA
  misc_feature 1..21: note = Synthetic
atgaaattatcgattgtatag

SEQ ID NO: 2204 - DNA, 225 bp, synthetic construct
  source 1..225: mol_type = other DNA
  misc_feature 1..225: note = Synthetic
atgctgagaaagagaaacagccataacaccatttttttcacacacctttttcagaccatggcctctgttacagccattatttattttttgggtcttctgggatttatcaacagttttgaccataaaaacgtaactgcttatgttggttctaactgtgtactaactgggtaccagtcacaccaacgggtttcatggtacgactcggtccgcactagcctgaggtaa

SEQ ID NO: 2205 - DNA, 33 bp, synthetic construct
  misc_feature 1..33: note = Synthetic
  source 1..33: mol_type = other DNA
acgccggtagcaacgacaatattgctttgctag

SEQ ID NO: 2206 - DNA, 114 bp, synthetic construct
  misc_feature 1..114: note = Synthetic
  source 1..114: mol_type = other DNA
atgaggactttcaggattgctatttggaatcttgacgttataataagttcaatagtgagacaattatttaagcctctaactaagaacgactcggtccgcactagcctgaggtaa

SEQ ID NO: 2207 - DNA, 42 bp, synthetic construct
  misc_feature 1..42: note = Synthetic
  source 1..42: mol_type = other DNA
atggccatatttgcagttattccagataagttaaaagtataa

SEQ ID NO: 2208 - DNA, 21 bp, synthetic construct
  misc_feature 1..21: note = Synthetic
  source 1..21: mol_type = other DNA
atgatctataagtttaagtga

SEQ ID NO: 2209 - DNA, 159 bp, synthetic construct
  source 1..159: mol_type = other DNA
  misc_feature 1..159: note = Synthetic
atggtcatcggtttagtcatattcgtatctgtggcagccgccatcgtcggcatgttgtcaaacgtattggacatgcttatgtacgtagaagaaaataatgaagaggatactagaatcaaggaggagcaagaactgctgttgcgactcggtccgcactag

SEQ ID NO: 2210 - DNA, 15 bp, synthetic construct
  source 1..15: mol_type = other DNA
  misc_feature 1..15: note = Synthetic
atacagtttaagtga

SEQ ID NO: 2211 - DNA, 162 bp, synthetic construct
  source 1..162: mol_type = other DNA
  misc_feature 1..162: note = Synthetic
atcggtctagtcatattcgtgtctgtggcggccgccatcgtcggtgtgttgtctaacgtattggacatgcttatgtacgtagaagaaaataatgaagaggatgctagaatcaaggaggagcaagaactactgttcgactcggtccgcactagcctgaggtaa

SEQ ID NO: 2212 - DNA, 66 bp, synthetic construct
  misc_feature 1..66: note = Synthetic
  source 1..66: mol_type = other DNA
atgaagaggatgctagaatcaaggaggagcaagaactactgttcgactcggtccgcactagcctga

SEQ ID NO: 2213 - DNA, 150 bp, synthetic construct
  source 1..150: mol_type = other DNA
  misc_feature 1..150: note = Synthetic
atattcgtgtctgtggcggccgccatcgtcggtgtgttgtctaacgtattggacatgcttatgtacgtagaagaaaataatgaagaggatgctagaatcaaggaggagcaagaactactgttcgactcggtccgcactagcctgaggtaa

SEQ ID NO: 2214 - DNA, 225 bp, synthetic construct
  source 1..225: mol_type = other DNA
  misc_feature 1..225: note = Synthetic
atgctgagaaagagaaacagccataacaccatttttttcacacacctttttcagaccgccgcctctgttacagccattatttattttttgggtcttctgggatttatcaacagttttgaccataaaaacgtaactgcttatgttggttctaactgtgtactaactgggtaccagtcacaccaacgggtttcatggtacgactcggtccgcactagcctgaggtaa

SEQ ID NO: 2215 - DNA, 39 bp, synthetic construct
  misc_feature 1..39: note = Synthetic
  source 1..39: mol_type = other DNA
atgtataactataatcctttatttaaaaatagggtgtga

SEQ ID NO: 2216 - DNA, 162 bp, synthetic construct
  misc_feature 1..162: note = Synthetic
  source 1..162: mol_type = other DNA
attcggttgtatataaacagaagcaggatgcacacaagggcagggatgtctgaggagaatccatgccctaggaacatctttttgctttgcaaagagtatggtttggagctagaggatttgcgattgctctgtgtatggtcgactcggtccgcactagcctga

SEQ ID NO: 2217 - DNA, 168 bp, synthetic construct
  misc_feature 1..168: note = Synthetic
  source 1..168: mol_type = other DNA
atgggaactgctgcaacaattcagactcccaccaaattaatgaataaagaaaatgcagaaatgattttggaaaaaattgttgatcatatagttatgtatattagtgacgaatcaagtgattcagaaaataatcctgaatacgactcggtccgcactagcctgaggtaa

SEQ ID NO: 2218 - DNA, 33 bp, synthetic construct
  source 1..33: mol_type = other DNA
  misc_feature 1..33: note = Synthetic
atcctgaatacgactcggtccgcactagcctga

SEQ ID NO: 2219 - DNA, 126 bp, synthetic construct
  source 1..126: mol_type = other DNA
  misc_feature 1..126: note = Synthetic
aggtatatagtaaaacttttaattagcgcagatgatgttcaagaaataagagtcatagatattgtagaagatccacaaccaataacctcgaaagttaacgactcggtccgcactagcctgaggtaa

SEQ ID NO: 2220 - DNA, 18 bp, synthetic construct
  misc_feature 1..18: note = Synthetic
  source 1..18: mol_type = other DNA
gtggtgccggatttctag

SEQ ID NO: 2221 - DNA, 90 bp, synthetic construct
  misc_feature 1..90: note = Synthetic
  source 1..90: mol_type = other DNA
atgatgttcaggaaatcagagttatcgatgttgcagaagatccacaaccactcacatcaaaggttaacgactcggtccgcactagcctga

SEQ ID NO: 2222 - DNA, 228 bp, synthetic construct
  misc_feature 1..228: note = Synthetic
  source 1..228: mol_type = other DNA
atacaaacggctaccaacattaccattataaaaaacgtagggtccaagctgtatttcaccatggactccctctctgttaaccaaattttgtacccggaggtgcaccttgatagcccgatagtgactaacaagctggttgccatattagagtatgcccggatcccacataagtacgtcctcgaggatccaactctctgcaacgactcggtccgcactagcctgaggtaa

SEQ ID NO: 2223 - DNA, 72 bp, synthetic construct
  source 1..72: mol_type = other DNA
  misc_feature 1..72: note = Synthetic
atgcccggatcccacataagtacgtcctcgaggatccaactctctgcaacgactcggtccgcactagcctga

SEQ ID NO: 2224 - DNA, 228 bp, synthetic construct
  source 1..228: mol_type = other DNA
  misc_feature 1..228: note = Synthetic
atacaaacggctaccaacattaccattataaaaaacgtagggtccaagctgtatttcaccgccgactccctctctgttaaccaaattttgtacccggaggtgcaccttgatagcccgatagtgactaacaagctggttgccatattagagtatgcccggatcccacataagtacgtcctcgaggatccaactctctgcaacgactcggtccgcactagcctgaggtaa

SEQ ID NO: 2225 - DNA, 39 bp, synthetic construct
  source 1..39: mol_type = other DNA
  misc_feature 1..39: note = Synthetic
atgtcaacaaacgactcggtccgcactagcctgaggtaa

SEQ ID NO: 2226 - DNA, 78 bp, synthetic construct
  source 1..78: mol_type = other DNA
  misc_feature 1..78: note = Synthetic
atgggtctagagatcgcgaaccaggaatcctacagtaatcagaaggatagtcaacacatgtccaggaagtcaccgtaa

SEQ ID NO: 2227 - DNA, 126 bp, synthetic construct
  misc_feature 1..126: note = Synthetic
  source 1..126: mol_type = other DNA
gtgtgtggcgcacgctacttgccgggaacccccggagcccgctcgatcgacggctacggttcaggaatgtaccgttcttaccgccccgaattgcggcatcgtcaacaacgacggcgcggtctctga

SEQ ID NO: 2228 - DNA, 168 bp, synthetic construct
  source 1..168: mol_type = other DNA
  misc_feature 1..168: note = Synthetic
atggaaagcgatgctaaaaactatcaaatcatggattcttgggaagaggaatcaagagataaatcaactaatatctcctcggccctcaacatcattgaattcatactcagcaccgacccccaagaagacctatcggaaaacgactcggtccgcactagcctgaggtaa

SEQ ID NO: 2229 - DNA, 171 bp, synthetic construct
  misc_feature 1..171: note = Synthetic
  source 1..171: mol_type = other DNA
ttggccgaaagcgatgctaaaaactatcaaatcatggattcttgggaagaggaatcaagagataaatcaactaatatctcctcggccctcaacatcattgaattcatactcagcaccgacccccaagaagacctatcggaaaacgactcggtccgcactagcctgaggtaa

SEQ ID NO: 2230 - DNA, 153 bp, synthetic construct
  misc_feature 1..153: note = Synthetic
  source 1..153: mol_type = other DNA
atgctaaaaactatcaaatcatggattcttgggaagaggaatcaagagataaatcaactaatatctcctcggccctcaacatcattgaattcatactcagcaccgacccccaagaagacctatcggaaaacgactcggtccgcactagcctga

SEQ ID NO: 2231 - DNA, 168 bp, synthetic construct
  misc_feature 1..168: note = Synthetic
  source 1..168: mol_type = other DNA
atggaaagcgatgctaaaaactatcaaatcatggattcttgggaagaggaatcaagagataaatcaactaatatctcctcggccctcaatatcattgaattcatacttagcaccgacccccaagaagacctatcggaaaacgactcggtccgcactagcctgaggtaa

SEQ ID NO: 2232 - DNA, 171 bp, synthetic construct
  source 1..171: mol_type = other DNA
  misc_feature 1..171: note = Synthetic
ttggccgaaagcgatgctaaaaactatcaaatcatggattcttgggaagaggaatcaagagataaatcaactaatatctcctcggccctcaatatcattgaattcatacttagcaccgacccccaagaagacctatcggaaaacgactcggtccgcactagcctgaggtaa

SEQ ID NO: 2233 - DNA, 153 bp, synthetic construct
  misc_feature 1..153: note = Synthetic
  source 1..153: mol_type = other DNA
atgctaaaaactatcaaatcatggattcttgggaagaggaatcaagagataaatcaactaatatctcctcggccctcaatatcattgaattcatacttagcaccgacccccaagaagacctatcggaaaacgactcggtccgcactagcctga

SEQ ID NO: 2234 - DNA, 168 bp, synthetic construct
  source 1..168: mol_type = other DNA
  misc_feature 1..168: note = Synthetic
atggacaaacttagagttctatacgatgagttcgtcaccattagtaaagataatcttgaacgcgagactggtcttagcgcatcagatgttgatatggattttgatttaaacatttttatgacgttggttccagtcttggacgactcggtccgcactagcctgaggtaa

SEQ ID NO: 2235 - DNA, 87 bp, synthetic construct
  misc_feature 1..87: note = Synthetic
  source 1..87: mol_type = other DNA
acgatgagttcgtcaccattagtaaagataatcttgaacgcgagactggtcttagcgcatcagatgttgatatggattttgatttaa

SEQ ID NO: 2236 - DNA, 168 bp, synthetic construct
  misc_feature 1..168: note = Synthetic
  source 1..168: mol_type = other DNA
atggacaaacttagagttctatatgatgagttcgtcaccattagtaaagataatcttgaacgcgagactggtcttagcgcatcagatgttgatatggattttgatttaaacatttttatgacgttggttccagtcttggacgactcggtccgcactagcctgaggtaa

SEQ ID NO: 2237 - DNA, 63 bp, synthetic construct
  misc_feature 1..63: note = Synthetic
  source 1..63: mol_type = other DNA
aagataatcttgaacgcgagactggtcttagcgcatcagatgttgatatggattttgatttaa

SEQ ID NO: 2238 - DNA, 81 bp, synthetic construct
  misc_feature 1..81: note = Synthetic
  source 1..81: mol_type = other DNA
ttgcacgatcgtgttatagggcatattctgacttattttttactacctaagccgatagcaccaatgtgcgttccggaatga

SEQ ID NO: 2239 - DNA, 153 bp, synthetic construct
  misc_feature 1..153: note = Synthetic
  source 1..153: mol_type = other DNA
gtgcgttccggaatgaagagccgcaaaaagaagcccaagactacagttatcgatgacgatgatgattgcatgacgtgttctgcctgtcagtctaaattggttaagatttccgacatcacaaaagtcgactcggtccgcactagcctgaggtaa

SEQ ID NO: 2240 - DNA, 72 bp, synthetic construct
  misc_feature 1..72: note = Synthetic
  source 1..72: mol_type = other DNA
ctgccgctgattgacctttccactttgtacaatctggaaaacagcgcacaggcgcgactcggtccgcactag

SEQ ID NO: 2241 - DNA, 66 bp, synthetic construct
  source 1..66: mol_type = other DNA
  misc_feature 1..66: note = Synthetic
ctgattgcgagtttgaagaaatttcttacaccgtttatcagtcttaccttgaccaagccccggtag

SEQ ID NO: 2242 - DNA, 153 bp, synthetic construct
  source 1..153: mol_type = other DNA
  misc_feature 1..153: note = Synthetic
atgcgttccggaatgaagagtcgcaaaaagaagcccaagactacagttatcgatgacggtgatgattgcatgacgtgttctgcctgtcagtctaaattggttaagatttccgacatcacaaaagtcgactcggtccgcactagcctgaggtaa

SEQ ID NO: 2243 - DNA, 81 bp, synthetic construct
  source 1..81: mol_type = other DNA
  misc_feature 1..81: note = Synthetic
ttgcacgatcgtgttatagggcatattctgacttattttttactacctaaatggatagcaccaatgtgcgttccggaatga

SEQ ID NO: 2244 - DNA, 15 bp, synthetic construct
  source 1..15: mol_type = other DNA
  misc_feature 1..15: note = Synthetic
atgttcactaattaa

SEQ ID NO: 2245 - DNA, 168 bp, synthetic construct
  source 1..168: mol_type = other DNA
  misc_feature 1..168: note = Synthetic
atgctggaagtagaagctcctctggaaatcgttcaggaatcctcaagaaaacttcttgggctgaccaatctgagcgaaattaccaaacctttaatagaggcagaaaaacccaacctaaattcactgtgtctactcaaccacgactcggtccgcactagcctgaggtaa

SEQ ID NO: 2246 - DNA, 63 bp, synthetic construct
  misc_feature 1..63: note = Synthetic
  source 1..63: mol_type = other DNA
atgataaaaacatttaccggcatcataaacacggagtttattttatatgtcaaccattactaa

SEQ ID NO: 2247 - DNA, 150 bp, synthetic construct
  misc_feature 1..150: note = Synthetic
  source 1..150: mol_type = other DNA
attgcgaaccagggtcagccacctaccattactttaaggggtggaatggggtcttccaccgtgttgtcacatccaagggcacactcgacacggctgcaggggcgtcgcgcaccgggctctatcgactcggtccgcactagcctgaggtaa

SEQ ID NO: 2248 - DNA, 30 bp, synthetic construct
  source 1..30: mol_type = other DNA
  misc_feature 1..30: note = Synthetic
atgtgccttctttgttctcctccctactaa

SEQ ID NO: 2249 - DNA, 195 bp, synthetic construct
  misc_feature 1..195: note = Synthetic
  source 1..195: mol_type = other DNA
acgcctcctatgttaccgccagagacgcgtgactgtcgccgcgagcgccgctttcaagatggccaccccatcgatgatgccgcagtggtcttacatgcacatcgccgggcaggacgcctcggagtacctgagccccggtctcgtgcagttcgcccgcgccaccgacacctacttcagcttgggaaacaagtttag

SEQ ID NO: 2250 - DNA, 168 bp, synthetic construct
  misc_feature 1..168: note = Synthetic
  source 1..168: mol_type = other DNA
atggccaccccatcgatgatgccgcagtggtcttacatgcacatcgccgggcaggacgcctcggagtacctgagccccggtctcgtgcagttcgcccgcgccaccgacacctacttcagcttgggaaacaagtttagaaacgactcggtccgcactagcctgaggtaa

SEQ ID NO: 2251 - DNA, 195 bp, synthetic construct
  misc_feature 1..195: note = Synthetic
  source 1..195: mol_type = other DNA
acgcctcctatgttaccgccagagacgcgtgactgtcgccgcgagcgccgctttcaaggccgccaccccatcgatgatgccgcagtggtcttacatgcacatcgccgggcaggacgcctcggagtacctgagccccggtctcgtgcagttcgcccgcgccaccgacacctacttcagcttgggaaacaagtttag

SEQ ID NO: 2252 - DNA, 150 bp, synthetic construct
  misc_feature 1..150: note = Synthetic
  source 1..150: mol_type = other DNA
atgccgcagtggtcttacatgcacatcgccgggcaggacgcctcggagtacctgagccccggtctcgtgcagttcgcccgcgccaccgacacctacttcagcttgggaaacaagtttagaaacgactcggtccgcactagcctgaggtaa

SEQ ID NO: 2253 - DNA, 168 bp, synthetic construct
  source 1..168: mol_type = other DNA
  misc_feature 1..168: note = Synthetic
atggggaacccccggagcccgctcgatcgacggctacggttcaggaatgtaccgttcttaccgccccgaattgcggcatcgtcaacaacgacggcgcggtctctgaaggccaagaccatggagatgcggttcaccatagccgactcggtccgcactagcctgaggtaa

SEQ ID NO: 2254 - DNA, 177 bp, synthetic construct
  source 1..177: mol_type = other DNA
  misc_feature 1..177: note = Synthetic
gtgcctgtcgccaaagttcctcttctctgtcttatcctccttcacaaagtcctggccaactgccacctccaccggcccaccgagttcctgcgctgctactcaacagaaacctcttccttttggctgtactccattatttttattttgatcgactcggtccgcactagcctgaggtaa

SEQ ID NO: 2255 - DNA, 24 bp, synthetic construct
  source 1..24: mol_type = other DNA
  misc_feature 1..24: note = Synthetic
atgaaaacttgctgtacgatgtag

SEQ ID NO: 2256 - DNA, 168 bp, synthetic construct
  source 1..168: mol_type = other DNA
  misc_feature 1..168: note = Synthetic
atggtaccgccgccggaattcaggagagctgatatggtagtggaaagattttctgtatcattatccccaagtttaacttttaccagatttggtatctgtagtaccgcaccctttttgaatcacattctcataatttccttcgactcggtccgcactagcctgaggtaa

SEQ ID NO: 2257 - DNA, 168 bp, synthetic construct
  misc_feature 1..168: note = Synthetic
  source 1..168: mol_type = other DNA
atgaatccggataatacaatcgcagtgattacagagactattcctataggtatgcaatttgataaagtatatttgtctacatttaacatgtggagggaaattctatccaataccacaaaaacactagatatatcatctttcgactcggtccgcactagcctgaggtaa

SEQ ID NO: 2258 - DNA, 81 bp, synthetic construct
  source 1..81: mol_type = other DNA
  misc_feature 1..81: note = Synthetic
atgtggagggaaattctatccaataccacaaaaacactagatatatcatctttcgactcggtccgcactagcctgaggtaa

SEQ ID NO: 2259 - DNA, 78 bp, synthetic construct
  misc_feature 1..78: note = Synthetic
  source 1..78: mol_type = other DNA
atagaaaaaaacaaaatgaaattctactatatttttacatacatatattctaaatgccaaagcggtgattgtgactag

SEQ ID NO: 2260 - DNA, 78 bp, synthetic construct
  misc_feature 1..78: note = Synthetic
  source 1..78: mol_type = other DNA
atagaaaaaaacaaaatgaaattctactatatttttacatacatatattctaaatgccaaagtggtgatcgtgactag

SEQ ID NO: 2261 - DNA, 78 bp, synthetic construct
  misc_feature 1..78: note = Synthetic
  source 1..78: mol_type = other DNA
atagaaaaaaacaaaatgaaattctactatatttttacatacatatattctaaatgccaaagtggtgattgtgactag

SEQ ID NO: 2262 - DNA, 141 bp, synthetic construct
  source 1..141: mol_type = other DNA
  misc_feature 1..141: note = Synthetic
atgactttttattattggacaatgcataggataacatttttacggataaataaatatgaaggtggagagcgtgacgttcctgacattgttgggaataggatgcgtgctatcatgctgtactattccgtcacgtcccattaa

SEQ ID NO: 2263 - DNA, 141 bp, synthetic construct
  source 1..141: mol_type = other DNA
  misc_feature 1..141: note = Synthetic
atgactttttattattggacaatgcataggataacatttttacggataaataaatgccaaggtggagagcgtgacgttcctgacattgttgggaataggatgcgtgctatcatgctgtactattccgtcacgtcccattaa

SEQ ID NO: 2264 - DNA, 204 bp, synthetic construct
  source 1..204: mol_type = other DNA
  misc_feature 1..204: note = Synthetic
gtgccagggcagcgttttgctatacaaaatacgagaatgtcaggaagcaactccattatgacaaggttgcgcgcacgctccacatcatgcgccagacatcacccttacaccagagcccaattaccacgatgtgaggaaaatgaaacccgagcttctatgactgaagaccacccgctcgactcggtccgcactagcctgaggtaa

SEQ ID NO: 2265 - DNA, 174 bp, synthetic construct
  source 1..174: mol_type = other DNA
  misc_feature 1..174: note = Synthetic
acgagagcctcaggaagcaactccattatgacaaggttgcgcgcacgctccacatcatgcgccagacatcacccttacaccagagcccaattaccacgatgtgaggaaaatgaaacccgagcttctatgactgaagaccacccgctcgactcggtccgcactagcctgaggtaa

SEQ ID NO: 2266 - DNA, 183 bp, synthetic construct
  source 1..183: mol_type = other DNA
  misc_feature 1..183: note = Synthetic
atacaaaatacgagaatgtcaggaagcaactccattatgacaaggttgcgcgcacgctcgacatcatgcgccagacatcacccttacaccagagcccagttaccacgttgtgaggaaaatgaaacccgagcttctatgactgaagaccacccgctcgactcggtccgcactagcctgaggtaa

SEQ ID NO: 2267 - DNA, 174 bp, synthetic construct
  source 1..174: mol_type = other DNA
  misc_feature 1..174: note = Synthetic
acgagagcctcaggaagcaactccattatgacaaggttgcgcgcacgctcgacatcatgcgccagacatcacccttacaccagagcccagttaccacgttgtgaggaaaatgaaacccgagcttctatgactgaagaccacccgctcgactcggtccgcactagcctgaggtaa

SEQ ID NO: 2268 - DNA, 78 bp, synthetic construct
  source 1..78: mol_type = other DNA
  misc_feature 1..78: note = Synthetic
atagaaaaaaacaaaatgaaattctactatatttttacatacatatattctaaatatgaaagcggtgattgtgactag

SEQ ID NO: 2269 - DNA, 168 bp, synthetic construct
  misc_feature 1..168: note = Synthetic
  source 1..168: mol_type = other DNA
atgaaagtggtgatcgtgactagcgtagcatcgcttttagatgcatctattcagtttcaaaaaacggcatgtagacatcactgtaattacctatctatgcaaatagttaaagagatagaagaatttggtactatcaatgacgactcggtccgcactagcctgaggtaa

SEQ ID NO: 2270 - DNA, 201 bp, synthetic construct
  source 1..201: mol_type = other DNA
  misc_feature 1..201: note = Synthetic
atccaggctttccgtacgcgtctcggcgaacgcatgcaggccgacggcgcggccatctacgtcagtctcagctcgctcttcgacgcgtcgttcgacttccaactcacagtatgccacgactactgcgagaggcacgcgctgagagtcctgcacgaggagcgcgcgtacgggaccgactcggtccgcactagcctgaggtaa

SEQ ID NO: 2271 - DNA, 228 bp, synthetic construct
  source 1..228: mol_type = other DNA
  misc_feature 1..228: note = Synthetic
atagtgtttttcaacttggtgccgttaatatacttgggaacgcggaataaatttcggctcatggcgttaaccagaggaggagaccccgcaccgtccgtctgccttgtggtttggtttgcctgcgtgtactcactgctgattctggtcgttttgctgctcatctaccgttgttgcatcggcttccaagacgacctagtctccgactcggtccgcactagcctgaggtaa

SEQ ID NO: 2272 - DNA, 24 bp, synthetic construct
  misc_feature 1..24: note = Synthetic
  source 1..24: mol_type = other DNA
ctgctaaaatcaatgaaatggtag

SEQ ID NO: 2273 - DNA, 24 bp, synthetic construct
  misc_feature 1..24: note = Synthetic
  source 1..24: mol_type = other DNA
acgaagattataggggaaacatag

SEQ ID NO: 2274 - DNA, 24 bp, synthetic construct
  source 1..24: mol_type = other DNA
  misc_feature 1..24: note = Synthetic
atggaaaatgtacgtttaatgtaa

SEQ ID NO: 2275 - DNA, 204 bp, synthetic construct
  source 1..204: mol_type = other DNA
  misc_feature 1..204: note = Synthetic
acgcagcttacgggtttcatactgctctactctgcattgcaagagattaaagtacccatcatggattcagtgtatgtagacatagatgctgacagcgcgtttctgaaggcgttgcagcaagcataccccatgtttgaggtggaaccaaagcaggtcacgccaaatgaccatgcaaacgctacgactcggtccgcactagcctga

SEQ ID NO: 2276 - DNA, 177 bp, synthetic construct
  misc_feature 1..177: note = Synthetic
  source 1..177: mol_type = other DNA
atggagaaagttcatgttgacttagacgcagacagcccattcgtcaagtcactgcaaagatgctttccacattttgagatagaagcaacgcaggtcactgacaatgaccatgctaatgctagggcgttttcgcacctagctactaagctcattgcgactcggtccgcactagcctga

SEQ ID NO: 2277 - DNA, 18 bp, synthetic construct
  source 1..18: mol_type = other DNA
  misc_feature 1..18: note = Synthetic
atgctttccacattttga

SEQ ID NO: 2278 - DNA, 168 bp, synthetic construct
  misc_feature 1..168: note = Synthetic
  source 1..168: mol_type = other DNA
atggaaagcgatgctaaaaactatcaaatcatggattcttgggaagaggaatcaagagataaatcaactaatatctcctcggccctcaacatcattgaattcatactcagcaccgacccccaagaagacctatcggaaaacgacacaatccgactcggtccgcactag

SEQ ID NO: 2279 - DNA, 168 bp, synthetic construct
  source 1..168: mol_type = other DNA
  misc_feature 1..168: note = Synthetic
atggaaagcggccctaaaaactatcaaatcatggattcttgggaagaggaatcaagagataaatcaactaatatctcctcggccctcaacatcattgaattcatactcagcaccgacccccaagaagacctatcggaaaacgacacaatccgactcggtccgcactag

SEQ ID NO: 2280 - DNA, 168 bp, synthetic construct
  source 1..168: mol_type = other DNA
  misc_feature 1..168: note = Synthetic
atggaaagcgatgctaaaaactatcaaatcatggattcttgggaagaggaatcaagagataaatcaactaatatctcctcggccctcaatatcattgaattcatacttagcaccgacccccaagaagacctatcggaaaacgacacaatccgactcggtccgcactag

SEQ ID NO: 2281 - DNA, 171 bp, synthetic construct
  source 1..171: mol_type = other DNA
  misc_feature 1..171: note = Synthetic
ttgatggaaagcggccctaaaaactatcaaatcatggattcttgggaagaggaatcaagagataaatcaactaatatctcctcggccctcaatatcattgaattcatacttagcaccgacccccaagaagacctatcggaaaacgacacaatccgactcggtccgcactag

SEQ ID NO: 2282 - DNA, 144 bp, synthetic construct
  misc_feature 1..144: note = Synthetic
  source 1..144: mol_type = other DNA
attcttgggaagaggaatcaagagataaatcaactaatatctcctcggccctcaatatcattgaattcatacttagcaccgacccccaagaagacctatcggaaaacgacacaatccgactcggtccgcactagcctgaggtaa

SEQ ID NO: 2283 - DNA, 207 bp, synthetic construct
  source 1..207: mol_type = other DNA
  misc_feature 1..207: note = Synthetic
acgaatactataataccgcctttcaaaattgtaacaacaatgttgcctcatacatcggatacgacatcaaccttccgactaaagacggtattcgacttggtgtttgaaaacagaaacatcatatacaaggcggatgttgtgaatgacatcatccaccacagactgaaagtatctctacccgactcggtccgcactagcctgaggtaa

SEQ ID NO: 2284 - DNA, 210 bp, synthetic construct
  misc_feature 1..210: note = Synthetic
  source 1..210: mol_type = other DNA
aagacgaatactataataccgcctttcaaaattgtaacaacagccttgcctcatacatcggatacgacatcaaccttccgactaaagacggtattcgacttggtgtttgaaaacagaaacatcatatacaaggcggatgttgtgaatgacatcatccaccacagactgaaagtatctctacccgactcggtccgcactagcctgaggtaa

SEQ ID NO: 2285 - DNA, 30 bp, synthetic construct
  misc_feature 1..30: note = Synthetic
  source 1..30: mol_type = other DNA
atgtccgcaaaagaaaaaatcacaagctaa

SEQ ID NO: 2286 - DNA, 63 bp, synthetic construct
  source 1..63: mol_type = other DNA
  misc_feature 1..63: note = Synthetic
atgattcatcccctgaatatcaatggatgtctccccatagattatcagatactgttatattag

SEQ ID NO: 2287 - DNA, 69 bp, synthetic construct
  misc_feature 1..69: note = Synthetic
  source 1..69: mol_type = other DNA
ttgccaatgattcatcccctgaatatcaatggatgtctccccatagattatcagatactgttatattag

SEQ ID NO: 2288 - DNA, 18 bp, synthetic construct
  source 1..18: mol_type = other DNA
  misc_feature 1..18: note = Synthetic
ctggacttttatttgtaa

SEQ ID NO: 2289 - DNA, 66 bp, synthetic construct
  misc_feature 1..66: note = Synthetic
  source 1..66: mol_type = other DNA
atgtcacaattagatttacaccaaaattgggctccgtccgactcggtccgcactagcctgaggtaa

SEQ ID NO: 2290 - DNA, 69 bp, synthetic construct
  misc_feature 1..69: note = Synthetic
  source 1..69: mol_type = other DNA
atgtcactctttctggaggaaatattgcagtcaaaattcgcgatgccgactcggtccgcactagcctga

SEQ ID NO: 2291 - DNA, 183 bp, synthetic construct
  source 1..183: mol_type = other DNA
  misc_feature 1..183: note = Synthetic
atcccgtcgttcatcatgcagcatccacgggaagagaattcaatcgtcgttgaactcgaacccgcattggctacatttatcaaacaaggatttaataatctcgtaaaatggcccttgttaaacattggagtagttttgtctaatacatctacagccgactcggtccgcactagcctgaggtaa

SEQ ID NO: 2292 - DNA, 204 bp, synthetic construct
  misc_feature 1..204: note = Synthetic
  source 1..204: mol_type = other DNA
attccaaatcaatcgaacaacatccagtcgttcatcatgcggcatccgcgggaagagaattcaatcgtcgttgaactcgaaccctcattagctacatttatcaaacaaggatttaataatcttgtaaaatggcccttgttaaacattggaatagttttgtctaatacatctaccgccgactcggtccgcactagcctgaggtaa

SEQ ID NO: 2293 - DNA, 204 bp, synthetic construct
  misc_feature 1..204: note = Synthetic
  source 1..204: mol_type = other DNA
attccaaatcaatcgaacaacatccagtcgttcatcgcccggcatccgcgggaagagaattcaatcgtcgttgaactcgaaccctcattagctacatttatcaaacaaggatttaataatcttgtaaaatggcccttgttaaacattggaatagttttgtctaatacatctaccgccgactcggtccgcactagcctgaggtaa

SEQ ID NO: 2294 - DNA, 183 bp, synthetic construct
  source 1..183: mol_type = other DNA
  misc_feature 1..183: note = Synthetic
atcccgtcgttcatcatgcagcatccgcgggaagagaattcaatcgtcgttgaactcgaaccctcattggctacatttatcaaacaaggatttaataatctcgtaaaatggcccttgttaaacattggaatagttttgtctaatacatctaccgccgactcggtccgcactagcctgaggtaa

SEQ ID NO: 2295 - DNA, 204 bp, synthetic construct
  source 1..204: mol_type = other DNA
  misc_feature 1..204: note = Synthetic
attccaaatcaatcgaacaacatcccgtcgttcatcgcccagcatccgcgggaagagaattcaatcgtcgttgaactcgaaccctcattggctacatttatcaaacaaggatttaataatctcgtaaaatggcccttgttaaacattggaatagttttgtctaatacatctaccgccgactcggtccgcactagcctgaggtaa

SEQ ID NO: 2296 - DNA, 30 bp, synthetic construct
  source 1..30: mol_type = other DNA
  misc_feature 1..30: note = Synthetic
atgaaggagacagatctgagacagccttga

SEQ ID NO: 2297 - DNA, 21 bp, synthetic construct
  source 1..21: mol_type = other DNA
  misc_feature 1..21: note = Synthetic
atgtttttggaaagcgattaa

SEQ ID NO: 2298 - DNA, 99 bp, synthetic construct
  misc_feature 1..99: note = Synthetic
  source 1..99: mol_type = other DNA
atgacaaagtttaaagacgtgtattcgctgttatattgtgatttgcaagctcagttgtcgagagagactgtagacgcgactcggtccgcactagcctga

SEQ ID NO: 2299 - DNA, 27 bp, synthetic construct
  misc_feature 1..27: note = Synthetic
  source 1..27: mol_type = other DNA
aaggagacaaaatggggacagcattga

SEQ ID NO: 2300 - DNA, 48 bp, synthetic construct
  misc_feature 1..48: note = Synthetic
  source 1..48: mol_type = other DNA
atgacacttagactccagaacaccacgactcggtccgcactagcctga

SEQ ID NO: 2301 - DNA, 66 bp, synthetic construct
  source 1..66: mol_type = other DNA
  misc_feature 1..66: note = Synthetic
atgaccctcagactgcaaaataaaaacttgtatctgaccgactcggtccgcactagcctgaggtaa

SEQ ID NO: 2302 - DNA, 30 bp, synthetic construct
  source 1..30: mol_type = other DNA
  misc_feature 1..30: note = Synthetic
atgaaggagacaagatggagacagccttga

SEQ ID NO: 2303 - DNA, 186 bp, synthetic construct
  source 1..186: mol_type = other DNA
  misc_feature 1..186: note = Synthetic
atgttgttattgttgttcttatactctattggctttttaagtggaatatctatggatgaaaaaaatccaataggaactaaaaatttaaacgacgaatttaaaacaacttctgtaaagtcaccattttcgttaaataggaacagagaattgcctgcaattttctcgactcggtccgcactagcctga

SEQ ID NO: 2304 - DNA, 192 bp, synthetic construct
  misc_feature 1..192: note = Synthetic
  source 1..192: mol_type = other DNA
ttggagcctcggcggttgttcataatgacagcgtccacggtggccctggctttatttgtggcctcgatactaggtcactgctgggttacggccaactcgacaggtgtcgcatcatctacagagcgttctagtcccagtacggctgggctcagcgccaggccttccgactcggtccgcactagcctgaggtaa

SEQ ID NO: 2305 - DNA, 129 bp, synthetic construct
  misc_feature 1..129: note = Synthetic
  source 1..129: mol_type = other DNA
atgaattcttctggtacgtcaccttcagatttgttgtaccattccaccgtggcgttgagagtatactgtctagggagcagcatgcaccgtgtttcatttcccagcgattcgactctgacagtgttataa

SEQ ID NO: 2306 - DNA, 18 bp, synthetic construct
  source 1..18: mol_type = other DNA
  misc_feature 1..18: note = Synthetic
attccaccgtggcgttga

SEQ ID NO: 2307 - DNA, 96 bp, synthetic construct
  misc_feature 1..96: note = Synthetic
  source 1..96: mol_type = other DNA
ttgtaccattccaccgtggcgttgagagtatactgtctagggagcagcatgcaccgtgtttcatttcccagcgattcgactctgacagtgttataa

SEQ ID NO: 2308 - DNA, 129 bp, synthetic construct
  misc_feature 1..129: note = Synthetic
  source 1..129: mol_type = other DNA
atgagttcttctggtacgtcaccttcagatttgttgtaccattccaccgtggcgttgagagtatactgtctagggagcagcatgcaccgtgtttcatttcccagcgattcgactctgacagtgttataa

SEQ ID NO: 2309 - DNA, 129 bp, synthetic construct
  misc_feature 1..129: note = Synthetic
  source 1..129: mol_type = other DNA
atgtattcttctggtacgtcaccttcagatttgttgtaccattccaccgtggcgttgagagtatactgtctagggagcagcatgcaccgtgtttcatttcccagcgattcgactctgacagtgttataa

SEQ ID NO: 2310 - DNA, 21 bp, synthetic construct
  misc_feature 1..21: note = Synthetic
  source 1..21: mol_type = other DNA
attatcatcatacacacatag

SEQ ID NO: 2311 - DNA, 36 bp, synthetic construct
  misc_feature 1..36: note = Synthetic
  source 1..36: mol_type = other DNA
atgtctcttaactatttccggctgttgtatatttaa

SEQ ID NO: 2312 - DNA, 141 bp, synthetic construct
  source 1..141: mol_type = other DNA
  misc_feature 1..141: note = Synthetic
ataacatactccatgaattcttctggtacgtcaccttcagatttgttgtaccattccaccgtggcgttgagagtatactgtctagggagcagcatgcaccgtgtttcatttcccagcgattcgactctgacagtgttataa

SEQ ID NO: 2313 - DNA, 129 bp, synthetic construct
  misc_feature 1..129: note = Synthetic
  source 1..129: mol_type = other DNA
atgaaatcttctggtacgtcaccttcagatttgttgtaccattccaccgtggcgttgagagtatactgtctagggagcagcatgcaccgtgtttcatttcccagcgattcgactctgacagtgttataa

SEQ ID NO: 2314 - DNA, 33 bp, synthetic construct
  misc_feature 1..33: note = Synthetic
  source 1..33: mol_type = other DNA
acgataaccgtgtccgctcaactttctaattga

SEQ ID NO: 2315 - DNA, 15 bp, synthetic construct
  source 1..15: mol_type = other DNA
  misc_feature 1..15: note = Synthetic
attgacatacggtaa

SEQ ID NO: 2316 - DNA, 168 bp, synthetic construct
  source 1..168: mol_type = other DNA
  misc_feature 1..168: note = Synthetic
atgcggatccagctgcttctggtatctaccttggtggcgtctatcgtcgccacacgtgtggaagacatggcgactttccgcacggaaaagcagtggcagcaggacctgcaatacagaagggaatttgtaaaaaggcaattcgactcggtccgcactagcctgaggtaa

SEQ ID NO: 2317 - DNA, 162 bp, synthetic construct
  source 1..162: mol_type = other DNA
  misc_feature 1..162: note = Synthetic
atccagctgcttctggtatctaccttggtggcgtctatcgtcgccacacgtgtggaagacatggcgactttccgcacggaaaagcagtggcagcaggacctgcaatacagaagggaatttgtaaaaaggcaattcgactcggtccgcactagcctgaggtaa

SEQ ID NO: 2318 - DNA, 60 bp, synthetic construct
  misc_feature 1..60: note = Synthetic
  source 1..60: mol_type = other DNA
atgccgtccaccatcggatcgctggcagcctgttgcagacgggcgataatgccgttgtaa

SEQ ID NO: 2319 - DNA, 84 bp, synthetic construct
  misc_feature 1..84: note = Synthetic
  source 1..84: mol_type = other DNA
atccccgagtacggctgcagcgcccgcgtccggctgaccagcgtgccggacaccggcagcacggcgatgccgttcatgacctga

SEQ ID NO: 2320 - DNA, 84 bp, synthetic construct
  misc_feature 1..84: note = Synthetic
  source 1..84: mol_type = other DNA
atggtgttggacgctcgattgagacgcgataaatggggggtagcataccgatacatacacttgttcttcaacccggatttctga

SEQ ID NO: 2321 - DNA, 96 bp, synthetic construct
  source 1..96: mol_type = other DNA
  misc_feature 1..96: note = Synthetic
atggggggtagcataccgatacatacacttgttcttcaacccggatttctgagattagggaaggttatcgactcggtccgcactagcctgaggtaa

SEQ ID NO: 2322 - DNA, 150 bp, synthetic construct
  source 1..150: mol_type = other DNA
  misc_feature 1..150: note = Synthetic
atgattggagaagtaggaaacaggaacacggtgattactacattattaaatcatgaagtccgtattatacttgtatatattgtttctctcatgtataataataaacggaagagatgcagcaccgtatacaccacccaatggaaagtgtaa

SEQ ID NO: 2323 - DNA, 150 bp, synthetic construct
  source 1..150: mol_type = other DNA
  misc_feature 1..150: note = Synthetic
atgattggagaagtaggaaacaggaacacggtgattactacattattaaatcgccaagtccgtattatacttgtatatattgtttctctcatgtataataataaacggaagagatgcagcaccgtatacaccacccaatggaaagtgtaa

SEQ ID NO: 2324 - DNA, 129 bp, synthetic construct
  misc_feature 1..129: note = Synthetic
  source 1..129: mol_type = other DNA
atgaatgcttctggtacgtcaccttcagatttgttgtaccattccaccgtggcgttgagagtatactgtctagggagcagcatgcaccgtgtttcatttcccagcgattcgactctgacagtgttataa

SEQ ID NO: 2325 - DNA, 129 bp, synthetic construct
  source 1..129: mol_type = other DNA
  misc_feature 1..129: note = Synthetic
atgaattcctctggtacgtcaccttcagatttgttgtaccattccaccgtggcgttgagagtatactgtctagggagcagcatgcaccgtgtttcatttcccagcgattcgactctgacagtgttataa

SEQ ID NO: 2326 - DNA, 189 bp, synthetic construct
  misc_feature 1..189: note = Synthetic
  source 1..189: mol_type = other DNA
atgaacagacattgtattatgatgaatttacccgatgtaggcgaatttggatctagtatattggggaaatatgaacctgacatgattaagattgctctttcggtcgcaggtagtttaataagaaatcgagactacattcctggaagacgaggctatagctattacgtttacggtatagcctctagataa

SEQ ID NO: 2327 - DNA, 189 bp, synthetic construct
  source 1..189: mol_type = other DNA
  misc_feature 1..189: note = Synthetic
atgaacagacattgtattatgatgaatttacctgatgtaggcaaatttggatctagtatgttggggaaatatgaacctgacatgattaagattgctctttcggtggctggtaatttaataagaaatcgagactacattcccgggagacgaggatatagctactacgtttacggtatagcctctagataa

SEQ ID NO: 2328 - DNA, 204 bp, synthetic construct
  source 1..204: mol_type = other DNA
  misc_feature 1..204: note = Synthetic
atgggatcctgctgtggtagattctgtgacgctaagaataagaataagaaggaagatgtagaagagggaagagaaggatgttacaattataagaaccttaatgatctggatgaatccgaagcacgtgtagaatttggaccattatatatgataaatgaagaaaaatcagacataaatacattggatcgactcggtccgcactag

SEQ ID NO: 2329 - DNA, 21 bp, synthetic construct
  misc_feature 1..21: note = Synthetic
  source 1..21: mol_type = other DNA
atgaatccgaagcacgtgtag

SEQ ID NO: 2330 - DNA, 30 bp, synthetic construct
  misc_feature 1..30: note = Synthetic
  source 1..30: mol_type = other DNA
atgagtaacttaactcttttgttcaattaa

SEQ ID NO: 2331 - DNA, 78 bp, synthetic construct
  misc_feature 1..78: note = Synthetic
  source 1..78: mol_type = other DNA
attcaaaaaatgagttatataaatggcgaacattataaatttatggaacggaattgtaccaacggttcaagatgttaa

SEQ ID NO: 2332 - DNA, 69 bp, synthetic construct
  misc_feature 1..69: note = Synthetic
  source 1..69: mol_type = other DNA
atgagttatataagccgcgaacattataaatttatggaacggaattgtaccaacggttcaagatgttaa

SEQ ID NO: 2333 - DNA, 168 bp, synthetic construct
  misc_feature 1..168: note = Synthetic
  source 1..168: mol_type = other DNA
atggccgaggaatttgtacaacaaaggttggccaataacaaagtgacaatttttgtcaagtatacatgtcctttttgtagaaatgcactggatattctaaataagtttagtttcaaaagaggagcgtatgaaattgtcgacgactcggtccgcactagcctgaggtaa

SEQ ID NO: 2334 - DNA, 168 bp, synthetic construct
  misc_feature 1..168: note = Synthetic
  source 1..168: mol_type = other DNA
atggccgaggaatttgtacaacaaaggttggccaataacaaagtgacaatttttgtcaagtttacatgtcctttttgtagaaacgcactggatattctaaataagtttagtttcaaaagaggagcgtatgaaattgtcgacgactcggtccgcactagcctgaggtaa

SEQ ID NO: 2335 - DNA, 195 bp, synthetic construct
  source 1..195: mol_type = other DNA
  misc_feature 1..195: note = Synthetic
atagttttatatcacttaaatattaaagccgccgaggaatttgtacaacaaaggttggccaataacaaagtgacaatttttgtcaagtttacatgtcctttttgtagaaacgcactggatattctaaataagtttagtttcaaaagaggagcgtatgaaattgtcgacgactcggtccgcactagcctgaggtaa

SEQ ID NO: 2336 - DNA, 48 bp, synthetic construct
  source 1..48: mol_type = other DNA
  misc_feature 1..48: note = Synthetic
atatcgttagaaactatgttcgactcggtccgcactagcctgaggtaa

SEQ ID NO: 2337 - DNA, 30 bp, synthetic construct
  misc_feature 1..30: note = Synthetic
  source 1..30: mol_type = other DNA
atgaaaacatcgcaattagagcgtccttga

SEQ ID NO: 2338 - DNA, 45 bp, synthetic construct
  misc_feature 1..45: note = Synthetic
  source 1..45: mol_type = other DNA
attaaagcagagcaaatagcaaatatatacacagggagtgagtga

SEQ ID NO: 2339 - DNA, 27 bp, synthetic construct
  misc_feature 1..27: note = Synthetic
  source 1..27: mol_type = other DNA
aaggagacagatctgagacagccttga

SEQ ID NO: 2340 - DNA, 48 bp, synthetic construct
  source 1..48: mol_type = other DNA
  misc_feature 1..48: note = Synthetic
atgtttttttgcataaaacttaaaaacaaaacaaaacaatatagatag

SEQ ID NO: 2341 - DNA, 12 bp, synthetic construct
  source 1..12: mol_type = other DNA
  misc_feature 1..12: note = Synthetic
atgatggattag

SEQ ID NO: 2342 - DNA, 135 bp, synthetic construct
  misc_feature 1..135: note = Synthetic
  source 1..135: mol_type = other DNA
atgaaaccttttaagaatatgaataaaataacaattaatcaaaaggataattgtatattagcaaatcgatgctttgttaaaatagatactcctagatacataccatccgactcggtccgcactagcctgaggtaa

SEQ ID NO: 2343 - DNA, 21 bp, synthetic construct
  source 1..21: mol_type = other DNA
  misc_feature 1..21: note = Synthetic
atgaatcaattaataaagtag

SEQ ID NO: 2344 - DNA, 180 bp, synthetic construct
  source 1..180: mol_type = other DNA
  misc_feature 1..180: note = Synthetic
ttggacatacattcaccgtccgcgtttatgaaactaaacggtgtttatggatttactcataagaatgaattaagaaagttaagttcaaataaggaaatagaagaatacagcaacaaacctcttcaagaaccagttagattaaatgattttataaatctgtttcgactcggtccgcactag

SEQ ID NO: 2345 - DNA, 42 bp, synthetic construct
  source 1..42: mol_type = other DNA
  misc_feature 1..42: note = Synthetic
atacattcgatggtctatctaccagattattatgtgttataa

SEQ ID NO: 2346 - DNA, 39 bp, synthetic construct
  misc_feature 1..39: note = Synthetic
  source 1..39: mol_type = other DNA
attatgtgttataaggtactttttctcataataaactag

SEQ ID NO: 2347 - DNA, 84 bp, synthetic construct
  misc_feature 1..84: note = Synthetic
  source 1..84: mol_type = other DNA
ataatcaaccccaaaatgtggattcggtatgctccggaactctccagaagacagaagacgtcgactcggtccgcactagcctga

SEQ ID NO: 2348 - DNA, 168 bp, synthetic construct
  source 1..168: mol_type = other DNA
  misc_feature 1..168: note = Synthetic
atggatgttgtgtcgttggataaaccgtttatgtattttgaggaaattgataatgagttagattacgaaccagaaagtgcaaatgaggtcgcgaaaaaactgccgtatcaaggacagttaaaactattactaggagaattcgactcggtccgcactagcctgaggtaa

SEQ ID NO: 2349 - DNA, 216 bp, synthetic construct
  misc_feature 1..216: note = Synthetic
  source 1..216: mol_type = other DNA
attccattaatgacagacctctccaaaaagggatatatattgtacgataatgtggttactcttccgttgactactttccaacagaaaatatccaagtattttaattctagactatttggacacgatatagagagcttcatcaatagacataagaaatttgccaatgttagtgatgaatatctgcaatatatattcatacgactcggtccgcactag

SEQ ID NO: 2350 - DNA, 180 bp, synthetic construct
  misc_feature 1..180: note = Synthetic
  source 1..180: mol_type = other DNA
atattgtggattcttgatcgtctttttttcaaatgcatttaccgtcgctttaaatacggactgaaaggagggccttctacggaaggagtgccaaagtctatgagggaagaatatcgaaaggaacagcagagtgctgtggatgctgacgatggtcattttgtcagcatagagctggagtaa

SEQ ID NO: 2351 - DNA, 93 bp, synthetic construct
  misc_feature 1..93: note = Synthetic
  source 1..93: mol_type = other DNA
gtgccaaagtctatgagggaagaatatcgaaaggaacagcagagtgctgtggatgctgacgatggtcattttgtcagcatagagctggagtaa

SEQ ID NO: 2352 - DNA, 168 bp, synthetic construct
  source 1..168: mol_type = other DNA
  misc_feature 1..168: note = Synthetic
atgttttgtggctctccgtttctcggcatatcttcttggagtctggcatctgcggctctgtgtcctccttcgtgctctttctctgcgggacgtgacctgcggtgcgatgcggaggtcccggaggttaaatggacggcgttcgactcggtccgcactagcctgaggtaa

SEQ ID NO: 2353 - DNA, 168 bp, synthetic construct
  source 1..168: mol_type = other DNA
  misc_feature 1..168: note = Synthetic
atggagtcagcaaaagatacaacctctacttctatgttcattctcggaaaaccctctggaaacaacatggaatccaatgaggaacgtatgcaaaactaccatcccgatccagtggtggaagaatccatcaaagaaatattcgactcggtccgcactagcctgaggtaa

SEQ ID NO: 2354 - DNA, 135 bp, synthetic construct
  source 1..135: mol_type = other DNA
  misc_feature 1..135: note = Synthetic
atgttcattctcggaaaaccctctggaaacaacatggaatccaatgaggaacgtatgcaaaactaccatcccgatccagtggtggaagaatccatcaaagaaatattcgactcggtccgcactagcctgaggtaa

SEQ ID NO: 2355 - DNA, 168 bp, synthetic construct
  misc_feature 1..168: note = Synthetic
  source 1..168: mol_type = other DNA
atggagccagcaaaaccctctggaaacaacatgggatccaatgatgaacgtatgcaagactaccgtcccgatccaatgatggaagaatctatcaaagaaatattggaagagagtctcatgtgtgatacatccttcgatgacgactcggtccgcactagcctgaggtaa

SEQ ID NO: 2356 - DNA, 138 bp, synthetic construct
  misc_feature 1..138: note = Synthetic
  source 1..138: mol_type = other DNA
atgggatccaatgatgaacgtatgcaagactaccgtcccgatccaatgatggaagaatctatcaaagaaatattggaagagagtctcatgtgtgatacatccttcgatgacgactcggtccgcactagcctgaggtaa

SEQ ID NO: 2357 - DNA, 168 bp, synthetic construct
  source 1..168: mol_type = other DNA
  misc_feature 1..168: note = Synthetic
atggacggccccaaattcagatttgtactactcatacttctaaccgccccggcaagaggacaagtcgactacgacaagttactcaaagtcgggatattcgagaaagggacggcgaatctcaaaatatctgtcagctctcacgactcggtccgcactagcctgaggtaa

SEQ ID NO: 2358 - DNA, 78 bp, synthetic construct
  misc_feature 1..78: note = Synthetic
  source 1..78: mol_type = other DNA
ctgccacaaaacccgatggcagcttcaccactccccccgactccagccgatcccagagacacattccctcagcaataa

SEQ ID NO: 2359 - DNA, 168 bp, synthetic construct
  misc_feature 1..168: note = Synthetic
  source 1..168: mol_type = other DNA
atggatcccaaggatatcctttaccctgaatgtcatcttgattcaccaattgtgcttggaaaggtcataagactgcattatctccttgaccttacagttgagtatgatattaaagactcatcaatcttgagaaacctagacgactcggtccgcactagcctgaggtaa

SEQ ID NO: 2360 - DNA, 42 bp, synthetic construct
  misc_feature 1..42: note = Synthetic
  source 1..42: mol_type = other DNA
atatatcagaaaccgctatttggcatagaaactgctatttga

SEQ ID NO: 2361 - DNA, 168 bp, synthetic construct
  source 1..168: mol_type = other DNA
  misc_feature 1..168: note = Synthetic
atgtatctgagccgccctattttttttgctgtgcatattcccgcacagttgcttcagtacttgcacgaactgaatatagaagtactggactttttaaaggagcagcttagtgatttttggctgaacattttacactgtgtcgactcggtccgcactagcctgaggtaa

SEQ ID NO: 2362 - DNA, 162 bp, synthetic construct
  source 1..162: mol_type = other DNA
  misc_feature 1..162: note = Synthetic
ctgagccgccctattttttttgctgtgcatattcccgcacagttgcttcagtacttgcacgaactgaatatagaagtactggactttttaaaggagcagcttagtgatttttggctgaacattttacactgtgtcgactcggtccgcactagcctgaggtaa

SEQ ID NO: 2363 - DNA, 192 bp, synthetic construct
  source 1..192: mol_type = other DNA
  misc_feature 1..192: note = Synthetic
ttgatagctatggagaatctcaaagcgatgctatacattattcgacgaagcggatgcagaatagatgatgcacaaattactactgacgatctagtcaaatcttactcattgatccgtcctaaaattctaagtatgataaactattataatgaaatgagtagaggatactttgaacgactcggtccgcactag

SEQ ID NO: 2364 - DNA, 210 bp, synthetic construct
  source 1..210: mol_type = other DNA
  misc_feature 1..210: note = Synthetic
atgtcattgtataaagacttgatagctatggagaatctcaaagcaatgctatacattattcgacgaagcggatgtagaatagacgatgcgcaaattactactgacgatttagtcaagtcttactcattgatccgtcctaaaattctaagtatgataaactattataatgaaatgagtagaggatactttgaacgactcggtccgcactag

SEQ ID NO: 2365 - DNA, 210 bp, synthetic construct
  source 1..210: mol_type = other DNA
  misc_feature 1..210: note = Synthetic
atgtcattgtataaagacttgatagctatggagaatctcaaagcgatgctatacattattcgacgaagcggatgcagaatagacgatgcacaaattactactgacgatctagtcaagtcttactcattgatccgtcctaaaattctaagtatgataaactattataatgaaatgagtagaggatactttgaacgactcggtccgcactag

SEQ ID NO: 2366 - DNA, 210 bp, synthetic construct
  misc_feature 1..210: note = Synthetic
  source 1..210: mol_type = other DNA
atgtcattgtataaagacttgatagctatggagaatctcaaagcgatgctatacattattcgacgaagtggatgcagaatagacgatgcacaaattactaccgacgatctagtcaagtcttactcattgatccgtcctaaaattctaagtatgataaactattataatgaaatgagtagaggatactttgaacgactcggtccgcactag

SEQ ID NO: 2367 - DNA, 24 bp, synthetic construct
  misc_feature 1..24: note = Synthetic
  source 1..24: mol_type = other DNA
atgccgttcaatcatgagacataa

SEQ ID NO: 2368 - DNA, 198 bp, synthetic construct
  source 1..198: mol_type = other DNA
  misc_feature 1..198: note = Synthetic
ctgtttgtcaccgagcgcggacacagactcatggagacgcgagggcgaagaccgtgcccgtttcagcaccagcaggatgagtctcaagcgcacccttgcaagcgcccagccaggggcccaccccttcaccgtgacggagaccaccctcactcggaccctgagaccctggacgactcggtccgcactagcctgaggtaa

SEQ ID NO: 2369 - DNA, 210 bp, synthetic construct
  misc_feature 1..210: note = Synthetic
  source 1..210: mol_type = other DNA
acggggacaccgacagcctgtttgtcaccgagcgcggacacagactcgccgagacgcgagggcgaagaccgtgcccgtttcagcaccagcaggatgagtctcaagcgcacccttgcaagcgcccagccaggggcccaccccttcaccgtgacggagaccaccctcactcggaccctgagaccctggacgactcggtccgcactagcctga

SEQ ID NO: 2370 - DNA, 42 bp, synthetic construct
  source 1..42: mol_type = other DNA
  misc_feature 1..42: note = Synthetic
atggctgagtttatgccgccagcggtagacagaactgtctag

SEQ ID NO: 2371 - DNA, 45 bp, synthetic construct
  misc_feature 1..45: note = Synthetic
  source 1..45: mol_type = other DNA
atgaattactttctgaaccagtatcaggagtttgtatcgaattag

SEQ ID NO: 2372 - DNA, 45 bp, synthetic construct
  source 1..45: mol_type = other DNA
  misc_feature 1..45: note = Synthetic
atgaattactttctgaaccagtatcaggagtttgtatcgaattaa

SEQ ID NO: 2373 - DNA, 168 bp, synthetic construct
  source 1..168: mol_type = other DNA
  misc_feature 1..168: note = Synthetic
atggccgacatctatagattccccaagttctcatatgaggataacggtactgtagagcctctgcctctgagaactggtccggataagaaggccatccctcatatcaggattgtcaaggtaggagaccctccaaagcatggcgactcggtccgcactagcctgaggtaa

SEQ ID NO: 2374 - DNA, 105 bp, synthetic construct
  source 1..105: mol_type = other DNA
  misc_feature 1..105: note = Synthetic
atgacacttaatgggttgtggttggatgataaagtttattgcccaagacatgttatctgttcttcagctgacatgacagaccctgatcgactcggtccgcactag

SEQ ID NO: 2375 - DNA, 117 bp, synthetic construct
  misc_feature 1..117: note = Synthetic
  source 1..117: mol_type = other DNA
atgagtctgaagcgcacacttgcaagcgcccagcccggggcccacccattcaccgtaacggagaccaccctcacgcggaccctgagaccctggacgactcggtccgcactagcctga

SEQ ID NO: 2376 - DNA, 228 bp, synthetic construct
  misc_feature 1..228: note = Synthetic
  source 1..228: mol_type = other DNA
atcaagtccgtctacggggacaccgacagcctgtttgtcaccgagcgcggacacagacttgccgagacgcgagggcgaagaccgtgcccgtttcagcaccagcaggatgagtctgaagcgcacacttgcaagcgcccagcccggggcccacccattcaccgtaacggagaccaccctcacgcggaccctgagaccctggacgactcggtccgcactagcctgaggtaa

SEQ ID NO: 2377 - DNA, 78 bp, synthetic construct
  misc_feature 1..78: note = Synthetic
  source 1..78: mol_type = other DNA
atgaaaagcaaacaagtaacgttcaagctcaagatttcaaaactgcgattcaacctgatactgctactgcacaactga

SEQ ID NO: 2378 - DNA, 120 bp, synthetic construct
  misc_feature 1..120: note = Synthetic
  source 1..120: mol_type = other DNA
atcaagcccctaggaaaaaggagcaggccagcaagagtgaaaatgaaaagcaaacaagtaacgttcaagctcaagatttcaaaactgcgattcaacctgatactgctactgcacaactga

SEQ ID NO: 2379 - DNA, 87 bp, synthetic construct
  source 1..87: mol_type = other DNA
  misc_feature 1..87: note = Synthetic
atgagagccatggccaagctattggaaaaccaaggcccgcgtgatgtcactgcgcacgtttataatgataaagatctacttggctga

SEQ ID NO: 2380 - DNA, 60 bp, synthetic construct
  source 1..60: mol_type = other DNA
  misc_feature 1..60: note = Synthetic
gtgatttggaaccactaccacttaaagtcaatgaaaataagaaagcaattcctcatataa

SEQ ID NO: 2381 - DNA, 135 bp, synthetic construct
  misc_feature 1..135: note = Synthetic
  source 1..135: mol_type = other DNA
ttgatccacaactccaagccagcatcagcagctctggaatctacacttttcctaagtcatcattcactgagaatggtgatttggaaccactaccacttaaagtcaatgaaaataagaaagcaattcctcatataa

SEQ ID NO: 2382 - DNA, 120 bp, synthetic construct
  source 1..120: mol_type = other DNA
  misc_feature 1..120: note = Synthetic
ttggcactcgtccgactagtttcatccaatagtttacaagccgaacttctgtgtatagttagattaaagcatctgttcttcctagcgatgtgtaaagcgactcggtccgcactagcctga

SEQ ID NO: 2383 - DNA, 48 bp, synthetic construct
  misc_feature 1..48: note = Synthetic
  source 1..48: mol_type = other DNA
ctgtaccgctgtgtccaagctagcagaagaacagctaatggcgtatag

SEQ ID NO: 2384 - DNA, 45 bp, synthetic construct
  misc_feature 1..45: note = Synthetic
  source 1..45: mol_type = other DNA
atcacccgccttccttcttcgtccaattacacatacaccccgtaa

SEQ ID NO: 2385 - DNA, 168 bp, synthetic construct
  source 1..168: mol_type = other DNA
  misc_feature 1..168: note = Synthetic
atgaggctggttcccgagatgtacggtgttttctgcagcgagacggcccggaactcagatgagctgcttaatacagatctgctggatgttcccaactcgcctgtggcttcgcctccgtcgcttcatgatcttttcgatgtcgactcggtccgcactagcctgaggtaa

SEQ ID NO: 2386 - DNA, 162 bp, synthetic construct
  misc_feature 1..162: note = Synthetic
  source 1..162: mol_type = other DNA
ctggttcccgagatgtacggtgttttctgcagcgagacggcccggaactcagatgagctgcttaatacagatctgctggatgttcccaactcgcctgtggcttcgcctccgtcgcttcatgatcttttcgatgtcgactcggtccgcactagcctgaggtaa

SEQ ID NO: 2387 - DNA, 66 bp, synthetic construct
  source 1..66: mol_type = other DNA
  misc_feature 1..66: note = Synthetic
atgctcctccaacgtgtcagtcgcccacgacggcgctggaaagagggtctactaccttacccgtga

SEQ ID NO: 2388 - DNA, 75 bp, synthetic construct
  source 1..75: mol_type = other DNA
  misc_feature 1..75: note = Synthetic
atgtttgcccccacactgtgggcgaggatgatactgatgacccatttctttacgactcggtccgcactagcctga

SEQ ID NO: 2389 - DNA, 75 bp, synthetic construct
  misc_feature 1..75: note = Synthetic
  source 1..75: mol_type = other DNA
atgtttgcccccacactgtgggcgagggccatactgatgacccatttctttacgactcggtccgcactagcctga

SEQ ID NO: 2390 - DNA, 57 bp, synthetic construct
  source 1..57: mol_type = other DNA
  misc_feature 1..57: note = Synthetic
ataatgtttgcggtgcctattattaccattcatttatcacaaaaaaaacttctctaa

SEQ ID NO: 2391 - DNA, 78 bp, synthetic construct
  source 1..78: mol_type = other DNA
  misc_feature 1..78: note = Synthetic
atgttgtttccagagggttttccgagaatgaacatagaagtagaggttgtatcttttgctgactccattgtatattaa

SEQ ID NO: 2392 - DNA, 18 bp, synthetic construct
  misc_feature 1..18: note = Synthetic
  source 1..18: mol_type = other DNA
atgaatgttaatacgtga

SEQ ID NO: 2393 - DNA, 42 bp, synthetic construct
  misc_feature 1..42: note = Synthetic
  source 1..42: mol_type = other DNA
atgcacatagaccctttccctaaacgagttattgatttctaa

SEQ ID NO: 2394 - DNA, 57 bp, synthetic construct
  misc_feature 1..57: note = Synthetic
  source 1..57: mol_type = other DNA
ctggcacacaccgtctgcatgattgactggctttccaacgtattgaactatggataa

SEQ ID NO: 2395 - DNA, 168 bp, synthetic construct
  source 1..168: mol_type = other DNA
  misc_feature 1..168: note = Synthetic
atggataaatcctccaaaccgacgattcggttattatttgccacaaagggatgtgcaatctcccactcgctgttgttgcttaccgggcagataagcacagaacctctgtatgtggtgagttatacttggactcccgacttcgactcggtccgcactagcctgaggtaa

SEQ ID NO: 2396 - DNA, 57 bp, synthetic construct
  misc_feature 1..57: note = Synthetic
  source 1..57: mol_type = other DNA
ctggcacacaccgtctgcatgattgactggctttccaacgtattgaactgccgataa

SEQ ID NO: 2397 - DNA, 111 bp, synthetic construct
  source 1..111: mol_type = other DNA
  misc_feature 1..111: note = Synthetic
atctcccactcgctgttgttgcttaccgggcagataagcacagaacctctgtatgtggtgagttatacttggactcccgacttcgactcggtccgcactagcctgaggtaa

SEQ ID NO: 2398 - DNA, 27 bp, synthetic construct
  misc_feature 1..27: note = Synthetic
  source 1..27: mol_type = other DNA
atgatagttcttacaattagagattga

SEQ ID NO: 2399 - DNA, 132 bp, synthetic construct
  source 1..132: mol_type = other DNA
  misc_feature 1..132: note = Synthetic
attcgttctaatctacagacattggttaataaatcatcttattttgccgatatattaaaatgtggaaactctactaataatattacattgtgcgactttcaagacgactcggtccgcactagcctgaggtaa

SEQ ID NO: 2400 - DNA, 45 bp, synthetic construct
  misc_feature 1..45: note = Synthetic
  source 1..45: mol_type = other DNA
atgagtaagttattgtcagtttctctgttccctgtgtttcactga

SEQ ID NO: 2401 - DNA, 216 bp, synthetic construct
  misc_feature 1..216: note = Synthetic
  source 1..216: mol_type = other DNA
atcacagcccattccctgatcacggataaactgagaaagatcacaagaatgcaagactcacatggtaatacacaaatactcaaccaggcaaattcaatggtgaaaagaacatggagattactatttggaattgcaaccttaatattacttgtttcaatatttgtgttatcgctcataattgtattacacgactcggtccgcactagcctgaggtaa

SEQ ID NO: 2402 - DNA, 171 bp, synthetic construct
  source 1..171: mol_type = other DNA
  misc_feature 1..171: note = Synthetic
aagatctgcatcttcgacaagctgctaaccaagcagtacagcggctactgcatgctgtgcttcgtggagcagcggctggacgacgtgcagcatgccacgctgtacaacttcgaggtgtgcaggctctgctcgctgttggagaacgactcggtccgcactagcctgaggtaa

SEQ ID NO: 2403 - DNA, 84 bp, synthetic construct
  source 1..84: mol_type = other DNA
  misc_feature 1..84: note = Synthetic
acgtgcagcatgccacgctgtacaacttcgaggtgtgcaggctctgctcgctgttggagaacgactcggtccgcactagcctga

SEQ ID NO: 2404 - DNA, 168 bp, synthetic construct
  misc_feature 1..168: note = Synthetic
  source 1..168: mol_type = other DNA
atgagttccacacagattcgcacagaaatccctgtggcgctcctaatcctatgcctttgtctggtggcgtgccatgccaattgtcccacgtatcgttcgcatttgggattctggcaagagggttggagtggacaggtttacgactcggtccgcactagcctgaggtaa

SEQ ID NO: 2405 - DNA, 153 bp, synthetic construct
  source 1..153: mol_type = other DNA
  misc_feature 1..153: note = Synthetic
attcgcacagaaatccctgtggcgctcctaatcctatgcctttgtctggtggcgtgccatgccaattgtcccacgtatcgttcgcatttgggattctggcaagagggttggagtggacaggtttacgactcggtccgcactagcctgaggtaa

SEQ ID NO: 2406 - DNA, 15 bp, synthetic construct
  source 1..15: mol_type = other DNA
  misc_feature 1..15: note = Synthetic
ctggaggcgaactaa

SEQ ID NO: 2407 - DNA, 102 bp, synthetic construct
  misc_feature 1..102: note = Synthetic
  source 1..102: mol_type = other DNA
atgatcagaactcgccatcagaatcgtcagtggatgaaaacgaacccccttaaacacgttttccaacttaataacgactcggtccgcactagcctgaggtaa

SEQ ID NO: 2408 - DNA, 36 bp, synthetic construct
  source 1..36: mol_type = other DNA
  misc_feature 1..36: note = Synthetic
ctggagggaaaagacgagccggcgccgggtaaataa

SEQ ID NO: 2409 - DNA, 168 bp, synthetic construct
  misc_feature 1..168: note = Synthetic
  source 1..168: mol_type = other DNA
atggagatgaacaaggttctccatcaggatctggtgcaggccacgcggcgtatcctcaagttgggtcctagcgagctgcgcgtcaccgacgccggccttatctgtaaaaatcccaattactcggtgtgcgacgccatgctcgactcggtccgcactagcctgaggtaa

SEQ ID NO: 2410 - DNA, 162 bp, synthetic construct
  source 1..162: mol_type = other DNA
  misc_feature 1..162: note = Synthetic
atgaacaaggttctccatcaggatctggtgcaggccacgcggcgtatcctcaagttgggtcctagcgagctgcgcgtcaccgacgccggccttatctgtaaaaatcccaattactcggtgtgcgacgccatgctcgactcggtccgcactagcctgaggtaa

SEQ ID NO: 2411 - DNA, 27 bp, synthetic construct
  source 1..27: mol_type = other DNA
  misc_feature 1..27: note = Synthetic
ctgaatgcacacatgtctaggggctaa

SEQ ID NO: 2412 - DNA, 168 bp, synthetic construct
  source 1..168: mol_type = other DNA
  misc_feature 1..168: note = Synthetic
atggctctgtggacacaccagaatggtaaactgtatctgccacccccaagaccaatcgccagagttctcagcacggacgaatacgtgacaaatactagtctgtttttctatgctggtacagaacgcttactacaagtaggcgactcggtccgcactagcctgaggtaa

SEQ ID NO: 2413 - DNA, 189 bp, synthetic construct
  source 1..189: mol_type = other DNA
  misc_feature 1..189: note = Synthetic
atatttatgattttctttcaggccgctctgtggacacaccagaatggtaaactgtatctgccacccccaagaccaatcgccagagttctcagcacggacgaatacgtgacaaatactagtctgtttttctatgctggtacagaacgcttactacaagtaggcgactcggtccgcactagcctgaggtaa

SEQ ID NO: 2414 - DNA, 33 bp, synthetic construct
  misc_feature 1..33: note = Synthetic
  source 1..33: mol_type = other DNA
atcacaactcataacaggctcccgtcactttag

SEQ ID NO: 2415 - DNA, 54 bp, synthetic construct
  misc_feature 1..54: note = Synthetic
  source 1..54: mol_type = other DNA
ataatagtaacggcaggggtattaatatcagggtatcaaataataaaatgttaa

SEQ ID NO: 2416 - DNA, 87 bp, synthetic construct
  misc_feature 1..87: note = Synthetic
  source 1..87: mol_type = other DNA
atgtacaaaactactaaatgcgcttctcaattggataatctatgtaccgagatgaacaaaatggcgactcggtccgcactagcctga

SEQ ID NO: 2417 - DNA, 192 bp, synthetic construct
  source 1..192: mol_type = other DNA
  misc_feature 1..192: note = Synthetic
gtggcggcacagcgacgcgcgtggatgtccacggccttgggcgagaatggcaaggacggcgaggccagctccccgtgctcgagcacgcccgcgagcacgcctgcgagtacgcctgcgggaacgccgacgatgactgcccccgcgttctactatagcatcgacggcgactcggtccgcactagcctgaggtaa

SEQ ID NO: 2418 - DNA, 192 bp, synthetic construct
  misc_feature 1..192: note = Synthetic
  source 1..192: mol_type = other DNA
gtggcggcacagcgacgcgcgtgggcctccacggccttgggcgagaatggcaaggacggcgaggccagctccccgtgctcgagcacgcccgcgagcacgcctgcgagtacgcctgcgggaacgccgacgatgactgcccccgcgttctactatagcatcgacggcgactcggtccgcactagcctgaggtaa

SEQ ID NO: 2419 - DNA, 27 bp, synthetic construct
  misc_feature 1..27: note = Synthetic
  source 1..27: mol_type = other DNA
atgcttaccacatcatcaaactattaa

SEQ ID NO: 2420 - DNA, 36 bp, synthetic construct
  misc_feature 1..36: note = Synthetic
  source 1..36: mol_type = other DNA
atgattataccaacgactcggtccgcactagcctga

SEQ ID NO: 2421 - DNA, 162 bp, synthetic construct
  source 1..162: mol_type = other DNA
  misc_feature 1..162: note = Synthetic
atgcgggatgaccttcctctggtggatcgagatctggtcgacgaggccgccttcgggggggaggagggagaactgccgctggaggaacagttttcattgtcctcgtacggcacctctgatttttttgtcagttccgactcggtccgcactagcctgaggtaa

SEQ ID NO: 2422 - DNA, 150 bp, synthetic construct
  source 1..150: mol_type = other DNA
  misc_feature 1..150: note = Synthetic
atgaccttcctctggtggatcgagatctggtcgacgaggccgccttcgggggggaggagggagaactgccgctggaggaacagttttcattgtcctcgtacggcacctctgatttttttgtcagttccgactcggtccgcactagcctga

SEQ ID NO: 2423 - DNA, 168 bp, synthetic construct
  source 1..168: mol_type = other DNA
  misc_feature 1..168: note = Synthetic
atgaccatgcgggatgaccttcctctggtggatcgagatctggtcgacgaggccgccttcgggggggaggagggagaactgccgctggaggaacagttttcattgtcctcgtacggcacctctgatttttttgtcagttccgactcggtccgcactagcctgaggtaa

SEQ ID NO: 2424 - DNA, 168 bp, synthetic construct
  misc_feature 1..168: note = Synthetic
  source 1..168: mol_type = other DNA
atgaccaagcgggatgaccttcctctggtggatcgagatctggtcgacgaggccgccttcgggggggaggagggagaactgccgctggaggaacagttttcattgtcctcgtacggcacctctgatttttttgtcagttccgactcggtccgcactagcctgaggtaa

SEQ ID NO: 2425 - DNA, 159 bp, synthetic construct
  misc_feature 1..159: note = Synthetic
  source 1..159: mol_type = other DNA
agggatgaccttcctctggtggatcgagatctggtcgacgaggccgccttcgggggggaggagggagaactgccgctggaggaacagttttcattgtcctcgtacggcacctctgatttttttgtcagttccgactcggtccgcactagcctgaggtaa

SEQ ID NO: 2426 - DNA, 159 bp, synthetic construct
  misc_feature 1..159: note = Synthetic
  source 1..159: mol_type = other DNA
atcgccgcaacgtgtcctacaacggccgtgtcgtcgtggttgatgttgagcgggagcgcgaccgacaacgaaggctgtccctggccctgcgcgtgcaaccagtgctccactacgtcccgcggcaacagcaattcggcctcgtccggagactggtcgtag

SEQ ID NO: 2427 - DNA, 30 bp, synthetic construct
  misc_feature 1..30: note = Synthetic
  source 1..30: mol_type = other DNA
atgaccactacctttgcaggcactgtttaa

SEQ ID NO: 2428 - DNA, 93 bp, synthetic construct
  source 1..93: mol_type = other DNA
  misc_feature 1..93: note = Synthetic
atatccattaccaaccagattgaagatatcaacagccccaagctctccacctccctacgaagagtaacaccgactcggtccgcactagcctga

SEQ ID NO: 2429 - DNA, 36 bp, synthetic construct
  misc_feature 1..36: note = Synthetic
  source 1..36: mol_type = other DNA
atggccatacatccccctttcagcggcgacggttaa

SEQ ID NO: 2430 - DNA, 51 bp, synthetic construct
  misc_feature 1..51: note = Synthetic
  source 1..51: mol_type = other DNA
atagaacctcaacgtaacttaacagtgcaacctctattggatataaactag

SEQ ID NO: 2431 - DNA, 114 bp, synthetic construct
  source 1..114: mol_type = other DNA
  misc_feature 1..114: note = Synthetic
atggccattgcggcggcaccaggcaccgccgttttgctgatacggctgaggttttcaacggcctgctcaagaccttttatggccatacatccccctttcagcggcgacggttaa

SEQ ID NO: 2432 - DNA, 168 bp, synthetic construct
  source 1..168: mol_type = other DNA
  misc_feature 1..168: note = Synthetic
atgactgaggtgtacgacttcgatcagtcctcttggtacaccaaaggctcattggcccctattttgcctaccacttatcccgatggtaggctcataccccaagtcagagtaatagatccaggactcggcgatcggaaagacgactcggtccgcactagcctgaggtaa

SEQ ID NO: 2433 - DNA, 30 bp, synthetic construct
  misc_feature 1..30: note = Synthetic
  source 1..30: mol_type = other DNA
atggtaggctcataccccaagtcagagtaa

SEQ ID NO: 2434 - DNA, 93 bp, synthetic construct
  source 1..93: mol_type = other DNA
  misc_feature 1..93: note = Synthetic
atgcgttgcattgggtcgttgactagtgaagtaggagaagtggacctgatcctgatgctacattggcaggtacttgtccggtcgattcggtag

SEQ ID NO: 2435 - DNA, 144 bp, synthetic construct
  source 1..144: mol_type = other DNA
  misc_feature 1..144: note = Synthetic
atgtcaacgaagaacagaacccgcagaacaacaacccgcaacatccgctttcctaaccaaatgattgaacaaattaacatcgctcttgagcaaaaagggtccgggaatttctcagccgactcggtccgcactagcctgaggtaa

SEQ ID NO: 2436 - DNA, 15 bp, synthetic construct
  misc_feature 1..15: note = Synthetic
  source 1..15: mol_type = other DNA
ataagactcatttag

SEQ ID NO: 2437 - DNA, 87 bp, synthetic construct
  source 1..87: mol_type = other DNA
  misc_feature 1..87: note = Synthetic
atggggatgctctcgcaaatctacattatccagtctttccaaattgctgagaaaatctgtaagacgctcaactttgtctcgatctag

SEQ ID NO: 2438 - DNA, 174 bp, synthetic construct
  source 1..174: mol_type = other DNA
  misc_feature 1..174: note = Synthetic
atggaagaaacgaaaacgggcctatttataattttttgcagatgtcctattggcttccagcaaatggtaaggtatacttacccccttcaacaccggttgcaagggtacaaagtacggatgaatttgttcaaaggaccaacatcttttatcatgcaaatagtgatcgcctgctga

SEQ ID NO: 2439 - DNA, 174 bp, synthetic construct
  source 1..174: mol_type = other DNA
  misc_feature 1..174: note = Synthetic
atggaagaaacgaaaacgggcctatttataattttttgcaggcctcctattggcttccagcaaatggtaaggtatacttacccccttcaacaccggttgcaagggtacaaagtacggatgaatttgttcaaaggaccaacatcttttatcatgcaaatagtgatcgcctgctga

SEQ ID NO: 2440 - DNA, 75 bp, synthetic construct
  misc_feature 1..75: note = Synthetic
  source 1..75: mol_type = other DNA
atgttcatatcacttcggcaaatttcgacggaacccattaccaaaatcacggattcgtcagttttaatagtatag

SEQ ID NO: 2441 - DNA, 81 bp, synthetic construct
  source 1..81: mol_type = other DNA
  misc_feature 1..81: note = Synthetic
atggccgcgttcgcggtaagaaagttggtcaatccacctttggcgacttcatcaagtttgaaggtgaatttgaaggcgtga

SEQ ID NO: 2442 - DNA, 72 bp, synthetic construct
  source 1..72: mol_type = other DNA
  misc_feature 1..72: note = Synthetic
ttgccggtgccgtggatggtgaaaacacggttgattttgcggttgaaatcgactcggtccgcactagcctga

SEQ ID NO: 2443 - DNA, 81 bp, synthetic construct
  misc_feature 1..81: note = Synthetic
  source 1..81: mol_type = other DNA
atggccgcgttcgcggtaagagccttggtcaatccacctttggcgacttcatcaagtttgaaggtgaatttgaaggcgtga

SEQ ID NO: 2444 - DNA, 42 bp, synthetic construct
  misc_feature 1..42: note = Synthetic
  source 1..42: mol_type = other DNA
acgaaccaccagaggatgatgaataaaaaaatgataaaataa

SEQ ID NO: 2445 - DNA, 51 bp, synthetic construct
  misc_feature 1..51: note = Synthetic
  source 1..51: mol_type = other DNA
ttgacgagcgttctgacacagagattgtcgactcggtccgcactagcctga

SEQ ID NO: 2446 - DNA, 168 bp, synthetic construct
  source 1..168: mol_type = other DNA
  misc_feature 1..168: note = Synthetic
atgccgctgacggcgcgtgccggccacaccctgcatcgtcttccgctctcccactattggtggcttctgttgggtcgacactcccttcgtcatgtccattcctaccttcgcctgcgcaaaggtctacgccttcctttacccgactcggtccgcactagcctgaggtaa

SEQ ID NO: 2447 - DNA, 72 bp, synthetic construct
  misc_feature 1..72: note = Synthetic
  source 1..72: mol_type = other DNA
atgtccattcctaccttcgcctgcgcaaaggtctacgccttcctttacccgactcggtccgcactagcctga

SEQ ID NO: 2448 - DNA, 207 bp, synthetic construct
  misc_feature 1..207: note = Synthetic
  source 1..207: mol_type = other DNA
atgtgtgcagaaagggcgccatttattgaccaaagtcaatcaatgactttatttattgaggaacgcccagacgggacaattcccgcctccaaaataatgaatttgcttatacgtgcctataaagccggccttaaaacgggtatgtactactgtaaaattcgtaaagctacgaacagcggactgtttgcgcgactcggtccgcactag

SEQ ID NO: 2449 - DNA, 168 bp, synthetic construct
  source 1..168: mol_type = other DNA
  misc_feature 1..168: note = Synthetic
atggacatcgacccttataaagaatttggagctactgtggagttactctcgtttttgccttctgacttctttccttcagtacgagatcttctagataccgcctcagctctgtatcgggaagccttagagtctcctgagcacgactcggtccgcactagcctgaggtaa

SEQ ID NO: 2450 - DNA, 48 bp, synthetic construct
  misc_feature 1..48: note = Synthetic
  source 1..48: mol_type = other DNA
gtgtttatgacagggaggagtatttgccgagggccgagtagactttga

SEQ ID NO: 2451 - DNA, 42 bp, synthetic construct
  source 1..42: mol_type = other DNA
  misc_feature 1..42: note = Synthetic
atgacagggaggagtatttgccgagggccgagtagactttga

SEQ ID NO: 2452 - DNA, 33 bp, synthetic construct
  source 1..33: mol_type = other DNA
  misc_feature 1..33: note = Synthetic
atgtatcaaagtgtatacattcaatctgtataa

SEQ ID NO: 2453 - DNA, 36 bp, synthetic construct
  misc_feature 1..36: note = Synthetic
  source 1..36: mol_type = other DNA
atcgacaagtcaattctgctcacagaggtcatctga

SEQ ID NO: 2454 - DNA, 192 bp, synthetic construct
  source 1..192: mol_type = other DNA
  misc_feature 1..192: note = Synthetic
aggtcatctgaaagggttgttgtgatggatccacaagtccaaatacaccacatcatcaagccagagtgccatctcaactcacctgtggtggagaagaaactgacgctattatggaagctcacaggtttaccgttgccacctgaccttaatagttgcgttacacacgactcggtccgcactagcctgaggtaa

SEQ ID NO: 2455 - DNA, 168 bp, synthetic construct
  misc_feature 1..168: note = Synthetic
  source 1..168: mol_type = other DNA
atgaccatgccggatgaccttcctctggtggatcgagatctggtcgacgaggccgccttcgggggggaggagggagaactgccgctggaggaacagttttcattgtcctcgtacggcacctctgatttttttgtcagttccgactcggtccgcactagcctgaggtaa

SEQ ID NO: 2456 - DNA, 168 bp, synthetic construct
  source 1..168: mol_type = other DNA
  misc_feature 1..168: note = Synthetic
atgaccatgcgagatgaccttcctctggtggatcgagatctggtcgacgaggccgccttcgggggggaggagggagaactgccgctggaggaacagttttcattgtcctcgtacggcacctctgatttttttgtcagttccgactcggtccgcactagcctgaggtaa

SEQ ID NO: 2457 - DNA, 168 bp, synthetic construct
  source 1..168: mol_type = other DNA
  misc_feature 1..168: note = Synthetic
atgaccattcgggatgaccttcctctggtggatcgagatctggtcgacgaggccgccttcgggggggaggagggagaactgccgctggaggaacagttttcattgtcctcgtacggcacctctgatttttttgtcagttccgactcggtccgcactagcctgaggtaa

SEQ ID NO: 2458 - DNA, 42 bp, synthetic construct
  source 1..42: mol_type = other DNA
  misc_feature 1..42: note = Synthetic
atggtttcatcgttaaccggagtgatgtcgcgttccggctga

SEQ ID NO: 2459 - DNA, 27 bp, synthetic construct
  misc_feature 1..27: note = Synthetic
  source 1..27: mol_type = other DNA
atgcgctcggcttcatccttgtcatag

SEQ ID NO: 2460 - DNA, 57 bp, synthetic construct
  misc_feature 1..57: note = Synthetic
  source 1..57: mol_type = other DNA
atgaaatatcccaagccggaggggtggatcgcttgtaaagaaacttccgccctgtaa

SEQ ID NO: 2461 - DNA, 228 bp, synthetic construct
  source 1..228: mol_type = other DNA
  misc_feature 1..228: note = Synthetic
atgaacactcaaatcctggtattcgctctgattgcgatcattccaacaaatgcagacaaaatctgcctcggacatcatgccgtgtcaaacggaaccaaagtaaacacattaactgaaagaggagtggaagtcgtcaatgcaactgaaacagtggaacgaacaaacatccccaggatctgctcaaaagggaaaaggacagtcgactcggtccgcactagcctgaggtaa

SEQ ID NO: 2462 - DNA, 54 bp, synthetic construct
  misc_feature 1..54: note = Synthetic
  source 1..54: mol_type = other DNA
atgcagacaaaatctgcctcggacatcatgccgtgtcaaacggaaccaaagtaa

SEQ ID NO: 2463 - DNA, 30 bp, synthetic construct
  misc_feature 1..30: note = Synthetic
  source 1..30: mol_type = other DNA
atttttacgactcggtccgcactagcctga

SEQ ID NO: 2464 - DNA, 105 bp, synthetic construct
  misc_feature 1..105: note = Synthetic
  source 1..105: mol_type = other DNA
atgaagcagaatccacattatttaacgtataaatggataaattgtatactgccatatttggagtttttttatcttctgaaaatgaggattttaataattttatag

SEQ ID NO: 2465 - DNA, 198 bp, synthetic construct
  source 1..198: mol_type = other DNA
  misc_feature 1..198: note = Synthetic
agggtaaatccagcggaaaaggtaatgattcaacatcaaggtcagacgatggatccagccaactgcgagacaagcagagtaataaggctaatcctgccactgcggaaccgggtacatccaattgtgaacactataaggctcgaccgggtattgcgtctgtacagaaagccactgacgactcggtccgcactagcctga

SEQ ID NO: 2466 - DNA, 228 bp, synthetic construct
  source 1..228: mol_type = other DNA
  misc_feature 1..228: note = Synthetic
atgaataagaataagaaacaaaaaccaaacactaaaatgaggagtaatcctcagaaaaacaaaattaaattggttaataaaaaattgcaaactttctttatggccttcttccaaattctgctggcggtgttcaagaattttaaggtttcactccaactgaggttcctggaaaaagtttaccggactgtctttaagaacttcgactcggtccgcactagcctgaggtaa

SEQ ID NO: 2467 - DNA, 228 bp, synthetic construct
  source 1..228: mol_type = other DNA
  misc_feature 1..228: note = Synthetic
atgaatccaaaccaaaagataataaccattggttcggtctgtatgacaattggaatggctaacttaatattacaaattggaaacataatctcaatatggattagccactcaattcaacttgggaatcaaaatcagattgaaacatgcaatcaaagcgtcattacttatgaaaacaacacttgggtaaatcagacatatgtcgactcggtccgcactagcctgaggtaa

SEQ ID NO: 2468 - DNA, 42 bp, synthetic construct
  source 1..42: mol_type = other DNA
  misc_feature 1..42: note = Synthetic
atgccatcttccagcagagtcgggggcaggagcaggaactga

SEQ ID NO: 2469 - DNA, 39 bp, synthetic construct
  misc_feature 1..39: note = Synthetic
  source 1..39: mol_type = other DNA
atgagagagttaatgtatcgagagtggttgaatgtttga

SEQ ID NO: 2470 - DNA, 39 bp, synthetic construct
  misc_feature 1..39: note = Synthetic
  source 1..39: mol_type = other DNA
atgagagagttgatgtatcgagagtggttgaatgtttga

SEQ ID NO: 2471 - DNA, 228 bp, synthetic construct
  misc_feature 1..228: note = Synthetic
  source 1..228: mol_type = other DNA
atgaaaaacccaaaaagagccggtagcagccggcttgtcaatatgctaagacgcggtgcagcccgtgtcatccctccaggaggagggctcaagaggctgcctgtaggattgctgttgggtcggggtccgatcaaaatgatcctggccatactggcattcctacgatttacagcaataaaaccgtccactggcctcatcaacgactcggtccgcactagcctgaggtaa

SEQ ID NO: 2472 - DNA, 33 bp, synthetic construct
  misc_feature 1..33: note = Synthetic
  source 1..33: mol_type = other DNA
atgaaacggaaaccgaaacagatgagccgatga

SEQ ID NO: 2473 - DNA, 168 bp, synthetic construct
  misc_feature 1..168: note = Synthetic
  source 1..168: mol_type = other DNA
atgaattcgttacaatctctgtgtgtgttgtgcgctaggcttaatgaatgtgctttggaccttgaatgtttaaagttttgtgatcctgtaatagtattgtctgatatggcaaattttaaaaagaatgggattgtgattctcgactcggtccgcactagcctgaggtaa

SEQ ID NO: 2474 - DNA, 24 bp, synthetic construct
  source 1..24: mol_type = other DNA
  misc_feature 1..24: note = Synthetic
atgactaagaaaaaccgattataa

SEQ ID NO: 2475 - DNA, 150 bp, synthetic construct
  source 1..150: mol_type = other DNA
  misc_feature 1..150: note = Synthetic
ctgtgtgtgttgtgcgctaggcttaatgaatgtgctttggaccttgaatgtttaaagttttgtgatcctgtaatagtattgtctgatatggcaaattttaaaaagaatgggattgtgattctcgactcggtccgcactagcctgaggtaa

SEQ ID NO: 2476 - DNA, 33 bp, synthetic construct
  misc_feature 1..33: note = Synthetic
  source 1..33: mol_type = other DNA
atgaaacggaaaccgaaacggatgagccgatga

SEQ ID NO: 2477 - DNA, 168 bp, synthetic construct
  misc_feature 1..168: note = Synthetic
  source 1..168: mol_type = other DNA
atgaattcgttacaatctctgtgtgtgttgtgcgctaggcttaatgaatgtgctttggaccttgaatgtttaaagttttgtgatcctgtaatagtattgtctgatatggcaaatttcaaaaagaatgggattgtcattctcgactcggtccgcactagcctgaggtaa

SEQ ID NO: 2478 - DNA, 144 bp, synthetic construct
  source 1..144: mol_type = other DNA
  misc_feature 1..144: note = Synthetic
gtgttgtgcgctaggcttaatgaatgtgctttggaccttgaatgtttaaagttttgtgatcctgtaatagtattgtctgatatggcaaatttcaaaaagaatgggattgtcattctcgactcggtccgcactagcctgaggtaa

SEQ ID NO: 2479 - DNA, 39 bp, synthetic construct
  misc_feature 1..39: note = Synthetic
  source 1..39: mol_type = other DNA
atgtggatttggatgactgcatctttgaacaataaatga

SEQ ID NO: 2480 - DNA, 168 bp, synthetic construct
  misc_feature 1..168: note = Synthetic
  source 1..168: mol_type = other DNA
atggctgccgatggttatcttccagattggctcgaggacactctctctgaaggaataagacagtggtggaagctcaaacctggcccaccaccaccaaagcccgcagagcggcataaggacgacagcaggggtcttgtgctcgactcggtccgcactagcctgaggtaa

SEQ ID NO: 2481 - DNA, 168 bp, synthetic construct
  source 1..168: mol_type = other DNA
  misc_feature 1..168: note = Synthetic
atgaccttgcgggatgaccttcctctggtggatcgagatctggtcgacgaggccgccttcgggggggaggagggagaactgccgctggaggaacagttttcattgtcctcgtacggcacctctgatttttttgtcagttccgactcggtccgcactagcctgaggtaa

SEQ ID NO: 2482 - DNA, 126 bp, synthetic construct
  source 1..126: mol_type = other DNA
  misc_feature 1..126: note = Synthetic
atctggtcgacgaggccgccttcgggggggaggagggagaactgccgctggaggaacagttttcattgtcctcgtacggcacctctgatttttttgtcagttccgactcggtccgcactagcctga

SEQ ID NO: 2483 - DNA, 168 bp, synthetic construct
  source 1..168: mol_type = other DNA
  misc_feature 1..168: note = Synthetic
atgatcatgcgggatgaccttcctctggtggatcgagatctggtcgacgaggccgccttcgggggggaggagggagaactgccgctggaggaacagttttcattgtcctcgtacggcacctctgatttttttgtcagttccgactcggtccgcactagcctgaggtaa

SEQ ID NO: 2484 - DNA, 168 bp, synthetic construct
  source 1..168: mol_type = other DNA
  misc_feature 1..168: note = Synthetic
ttgaccatgcgggatgaccttcctctggtggatcgagatctggtcgacgaggccgccttcgggggggaggagggagaactgccgctggaggaacagttttcattgtcctcgtacggcacctctgatttttttgtcagttccgactcggtccgcactagcctgaggtaa

SEQ ID NO: 2485 - DNA, 24 bp, synthetic construct
  misc_feature 1..24: note = Synthetic
  source 1..24: mol_type = other DNA
atggcacaaagcgtccaacactag

SEQ ID NO: 2486 - DNA, 27 bp, synthetic construct
  source 1..27: mol_type = other DNA
  misc_feature 1..27: note = Synthetic
atgtcctactgccagaagttcatctga

SEQ ID NO: 2487 - DNA, 93 bp, synthetic construct
  source 1..93: mol_type = other DNA
  misc_feature 1..93: note = Synthetic
atgtggtcctcagtctctacatccatgtcatcatctctatttactcacaaaagactgtctacggggccctcgactcggtccgcactagcctga

SEQ ID NO: 2488 - DNA, 30 bp, synthetic construct
  misc_feature 1..30: note = Synthetic
  source 1..30: mol_type = other DNA
atgaggttttctagcagtagactcatttag

SEQ ID NO: 2489 - DNA, 21 bp, synthetic construct
  misc_feature 1..21: note = Synthetic
  source 1..21: mol_type = other DNA
atgttacaaacgataatatag

SEQ ID NO: 2490 - DNA, 105 bp, synthetic construct
  misc_feature 1..105: note = Synthetic
  source 1..105: mol_type = other DNA
gtgataaaaatataccaggaagaaatgaaagatttaatgaccaaaatagattcaacaacgatataccaaagcctaaaccaagcgactcggtccgcactagcctga

SEQ ID NO: 2491 - DNA, 81 bp, synthetic construct
  misc_feature 1..81: note = Synthetic
  source 1..81: mol_type = other DNA
atgaaagatttaatgaccaaaatagattcaacaacgatagaccacagcctaatcagcccgactcggtccgcactagcctga

SEQ ID NO: 2492 - DNA, 120 bp, synthetic construct
  source 1..120: mol_type = other DNA
  misc_feature 1..120: note = Synthetic
atccaaccaagcgaggtaataaaaatataccaggaagaaatgaaagatttaatgacagaaatagattcaacaacgatggtaataatagaccaagactcgactcggtccgcactagcctga

SEQ ID NO: 2493 - DNA, 147 bp, synthetic construct
  source 1..147: mol_type = other DNA
  misc_feature 1..147: note = Synthetic
atgttacaaacgataatatatacaaaaatccaaccaaacgaggtgatagaaatataccaggaagaaatgaaagatttaatgatcaaaatagattcaacaacgatagaccaaggcctaaaccaagcgactcggtccgcactagcctga

SEQ ID NO: 2494 - DNA, 27 bp, synthetic construct
  misc_feature 1..27: note = Synthetic
  source 1..27: mol_type = other DNA
atgatgaaaacacctcacttttattag

SEQ ID NO: 2495 - DNA, 228 bp, synthetic construct
  misc_feature 1..228: note = Synthetic
  source 1..228: mol_type = other DNA
atgaatccaaatcaaaagataatagcacttggctctgtttctataactattgcgacaatatgtttactcatgcagattgccatcttagcaacgactatgacactacatttcaatgaatgtaccaacccatcgaacaatcaagcagtgccatgtgaaccaatcataatagaaaggaacataacagagatagtgcatttgaacgactcggtccgcactagcctgaggtaa

SEQ ID NO: 2496 - DNA, 228 bp, synthetic construct
  misc_feature 1..228: note = Synthetic
  source 1..228: mol_type = other DNA
atgaatccaaatcagaagattctatgcacttcagccactgctatcataataggcgcaatcgcagtactcattggaatggcaaacctaggattgaacataggactgcatctaaaaccgggctgcaattgctcacactcacaacctgaaacaaccaacacaagccaaacaataataaacaactattataatgaaacaaacatcgactcggtccgcactagcctgaggtaa

SEQ ID NO: 2497 - DNA, 36 bp, synthetic construct
  misc_feature 1..36: note = Synthetic
  source 1..36: mol_type = other DNA
atgaaacaaacatcgactcggtccgcactagcctga

SEQ ID NO: 2498 - DNA, 45 bp, synthetic construct
  source 1..45: mol_type = other DNA
  misc_feature 1..45: note = Synthetic
atgcgtactcagggaaatacaggcatatgcaaaggcaaggcttga

SEQ ID NO: 2499 - DNA, 66 bp, synthetic construct
  source 1..66: mol_type = other DNA
  misc_feature 1..66: note = Synthetic
atgtatgagtgctgctttgaaaaatctgcccttctactcagaagaatccgactcggtccgcactag

SEQ ID NO: 2500 - DNA, 66 bp, synthetic construct
  source 1..66: mol_type = other DNA
  misc_feature 1..66: note = Synthetic
atgtatgagtgctgctttgaaaaatctgtgcttctactcagaagaatccgactcggtccgcactag

SEQ ID NO: 2501 - DNA, 42 bp, synthetic construct
  misc_feature 1..42: note = Synthetic
  source 1..42: mol_type = other DNA
attccaggcacagaacgccagaaaatggaatggtgctgttga

SEQ ID NO: 2502 - DNA, 168 bp, synthetic construct
  source 1..168: mol_type = other DNA
  misc_feature 1..168: note = Synthetic
atgacagaaaacatgcacctatggagtccggggaggaggaatttctgttgtaattcgatcctctctcacgcgtccgccgcacatctatttttgctaattgcacgtttcttcgtggtcacgtcggctcgaagaggttggtgtgaaaacgtcatctcgccgacgtggtga

SEQ ID NO: 2503 - DNA, 228 bp, synthetic construct
  source 1..228: mol_type = other DNA
  misc_feature 1..228: note = Synthetic
atgacgttggctaaaattgaactactaaagcagctgttaagggacaatgaagccaaaacggtgttgagacagacaacggtagaccaatacaacataataagaaaattcaatacatcaagaattgaaaagaacccttcattaagaatgaagtgggccatgtgttccaattttcccttagctctgaccaagggtgatatggccgactcggtccgcactagcctgaggtaa

SEQ ID NO: 2504 - DNA, 60 bp, synthetic construct
  misc_feature 1..60: note = Synthetic
  source 1..60: mol_type = other DNA
atgactttgcctgtgacgtgtttctctcgcatgatagcttggctgcgtatgcccgcgtga

SEQ ID NO: 2505 - DNA, 63 bp, synthetic construct
  source 1..63: mol_type = other DNA
  misc_feature 1..63: note = Synthetic
ctggcgagcaagagagggtttttcaagaacgtggtatcttttacatgtttgagacctacataa

SEQ ID NO: 2506 - DNA, 60 bp, synthetic construct
  misc_feature 1..60: note = Synthetic
  source 1..60: mol_type = other DNA
atgactttgcgtgtgacgtgtttctctcgcatgatagcttggctgcgtatgcccgcgtga

SEQ ID NO: 2507 - DNA, 57 bp, synthetic construct
  source 1..57: mol_type = other DNA
  misc_feature 1..57: note = Synthetic
atgcgtttctactcgtctgcgggaaccaccgactcggtccgcactagcctgaggtaa

SEQ ID NO: 2508 - DNA, 81 bp, synthetic construct
  misc_feature 1..81: note = Synthetic
  source 1..81: mol_type = other DNA
atgcaccgccacaaggcagagatgtggtcgaatggctcggatggtttgaagatcaaaacagaaaaccgactcctgatatga

SEQ ID NO: 2509 - DNA, 93 bp, synthetic construct
  misc_feature 1..93: note = Synthetic
  source 1..93: mol_type = other DNA
atgatgcagtatgcgaaaagagcagtcatgtcactgcaaggcctaagagagaagacaattggcaagtatgctaagtcagaatttgacaaatga

SEQ ID NO: 2510 - DNA, 18 bp, synthetic construct
  source 1..18: mol_type = other DNA
  misc_feature 1..18: note = Synthetic
atgtatgcctgttcgtag

SEQ ID NO: 2511 - DNA, 60 bp, synthetic construct
  misc_feature 1..60: note = Synthetic
  source 1..60: mol_type = other DNA
atgttaccatacatcatatcgctacttggtagcgtattattcagtatgaagatctattaa

SEQ ID NO: 2512 - DNA, 102 bp, synthetic construct
  source 1..102: mol_type = other DNA
  misc_feature 1..102: note = Synthetic
gtgtgctgctctaaaagaagaatgttgcttctatgcggaccacacaggactagtgagagacagcatggccaaagccagacgactcggtccgcactagcctga

SEQ ID NO: 2513 - DNA, 81 bp, synthetic construct
  misc_feature 1..81: note = Synthetic
  source 1..81: mol_type = other DNA
atgttgcttctatgcggaccacacaggactagtgagagacagcatggccaaattgagacgactcggtccgcactagcctga

SEQ ID NO: 2514 - DNA, 168 bp, synthetic construct
  source 1..168: mol_type = other DNA
  misc_feature 1..168: note = Synthetic
atgagtaaggtaatcaaaaagagagttgaaacttcaccaagacctacagcatctagcgattctctacagacttgtgcgggtgttatagagtatgcaaaatcgattagtaaatctaatgcaaaatgtatcgaatacgtcaccgactcggtccgcactagcctgaggtaa

SEQ ID NO: 2515 - DNA, 21 bp, synthetic construct
  source 1..21: mol_type = other DNA
  misc_feature 1..21: note = Synthetic
atgattttgtttcgtcgctaa

SEQ ID NO: 2516 - DNA, 21 bp, synthetic construct
  source 1..21: mol_type = other DNA
  misc_feature 1..21: note = Synthetic
atgcacaatttagcctattaa

SEQ ID NO: 2517 - DNA, 18 bp, synthetic construct
  source 1..18: mol_type = other DNA
  misc_feature 1..18: note = Synthetic
atgcagcgattcaagtga

SEQ ID NO: 2518 - DNA, 228 bp, synthetic construct
  misc_feature 1..228: note = Synthetic
  source 1..228: mol_type = other DNA
atgagtcttctaaccgaggtcgaaacgtacgttctctctatcattccatcaggccccctcaaagccgagatcgcacagagacttgaggatgtttttgcagggaagaacgcagatctcgaggctctcatggagtggataaagacaagaccaatcctgtcacctctgactaaggggattttagggtttgtgttcacgctcaccgactcggtccgcactagcctgaggtaa

SEQ ID NO: 2519 - DNA, 78 bp, synthetic construct
  misc_feature 1..78: note = Synthetic
  source 1..78: mol_type = other DNA
aagccgagatcgcacagagacttgaggatgtttttgcagggaagaacgcagatctcgaggctctcatggagtggataa

SEQ ID NO: 2520 - DNA, 228 bp, synthetic construct
  misc_feature 1..228: note = Synthetic
  source 1..228: mol_type = other DNA
atgagtcttctaaccgaggtcgaaacgtacgttctttctatcatcccgtcaggccccctcaaagccgagatcgcgcagagactggaaagtgtctttgcaggaaagaacacagatcttgaggctctcatggaatggctaaagacaagaccaatcttgtcacctctgactaagggaattttaggatttgtgttcacgctcaccgactcggtccgcactagcctgaggtaa

SEQ ID NO: 2521 - DNA, 24 bp, synthetic construct
  misc_feature 1..24: note = Synthetic
  source 1..24: mol_type = other DNA
ttgaggctctcatggaatggctaa

SEQ ID NO: 2522 - DNA, 228 bp, synthetic construct
  misc_feature 1..228: note = Synthetic
  source 1..228: mol_type = other DNA
atgattccctgtttaataaaaaataagcacgaacacaagtccaatccaaccatagcagcaatggccggatcacagatcaaaattcctcttccaaagccccctgattcagactctcaaagactaaatgcattccctgtaatcatggctcaagaaggtaaaggacgactcctcagacagatcagacttaggaaaatattatccgactcggtccgcactagcctgaggtaa

SEQ ID NO: 2523 - DNA, 135 bp, synthetic construct
  source 1..135: mol_type = other DNA
  misc_feature 1..135: note = Synthetic
atgatttgggcgtcagggcgtgggtgtgaatttcgggggttccgggcccaacggccgaggtttatatcctgctgggacgtgacttcgccaggcactcgcatccgcggatactacccgggtgggggttgtgtgtag

SEQ ID NO: 2524 - DNA, 57 bp, synthetic construct
  misc_feature 1..57: note = Synthetic
  source 1..57: mol_type = other DNA
atgcaagactcacgcatcgagtatagccaaacaattggcgtgtgtggacattattaa

SEQ ID NO: 2525 - DNA, 27 bp, synthetic construct
  source 1..27: mol_type = other DNA
  misc_feature 1..27: note = Synthetic
acgatttataaaaaaataccgcaatag

SEQ ID NO: 2526 - DNA, 57 bp, synthetic construct
  misc_feature 1..57: note = Synthetic
  source 1..57: mol_type = other DNA
atgcaagactcacgcatcgagtatagccgaacaattggcgtgtgtggatattattaa

SEQ ID NO: 2527 - DNA, 48 bp, synthetic construct
  source 1..48: mol_type = other DNA
  misc_feature 1..48: note = Synthetic
atgaggaggaccccatcaggtactacgtttcggtgtacgatgaactga

SEQ ID NO: 2528 - DNA, 42 bp, synthetic construct
  source 1..42: mol_type = other DNA
  misc_feature 1..42: note = Synthetic
atgaggtacatgttaaccatggatttgactgtgtggagatga

SEQ ID NO: 2529 - DNA, 168 bp, synthetic construct
  misc_feature 1..168: note = Synthetic
  source 1..168: mol_type = other DNA
atgagaatatcgaacagtataaaaccgaatcttttttacaataaattgaaatcaaaacatttattaaaccgcatcaagatgtgtacgaacgtcgttagagtttttgtaattttatatttgttggctgtatgcggatgtatcgactcggtccgcactagcctgaggtaa

SEQ ID NO: 2530 - DNA, 39 bp, synthetic construct
  source 1..39: mol_type = other DNA
  misc_feature 1..39: note = Synthetic
atcttgctgcgcccatcgactcggtccgcactagcctga

SEQ ID NO: 2531 - DNA, 39 bp, synthetic construct
  misc_feature 1..39: note = Synthetic
  source 1..39: mol_type = other DNA
atgattcaaacgaagaagatattgaaacgtccgatttaa

SEQ ID NO: 2532 - DNA, 228 bp, synthetic construct
  misc_feature 1..228: note = Synthetic
  source 1..228: mol_type = other DNA
atggactccaacaccatgtcaagctttcaggacatacttatgaggatgtcaaaaatgcagttggggtcctcatcggaggacttgaatggaatggtaacacggttcgagtctctgaaaatatacagagattcgcttggagaaactgtgatgagaatgggagaccttcactacctccagagcagaaatgaaaagtggcgagacgactcggtccgcactagcctgaggtaa

SEQ ID NO: 2533 - DNA, 228 bp, synthetic construct
  misc_feature 1..228: note = Synthetic
  source 1..228: mol_type = other DNA
atggactccaacaccatgtcaagctttcaggtagactgtttcctttggcatatccgcaagcgatttgcagacaatggattgggtgatgccccattccttgatcggctccgccgagatcaaaagtccttaaaaggaagaggcaacacccttggcctcgatatcgaaacagccactcttgttgggaaacaaatcgtggaatgcgactcggtccgcactagcctgaggtaa

SEQ ID NO: 2534 - DNA, 219 bp, synthetic construct
  source 1..219: mol_type = other DNA
  misc_feature 1..219: note = Synthetic
ataaaagaactgagagatctaatgtcgcagtcccgcactcgcgagatactcactaagaccactgtggaccatatggccataatcaaaaagtacacatcaggaaggcaagagaagaaccccgcactcagaatgaagtggatgatggcaatgagatacccaattacagcagacaagagaataatggacatgatcgactcggtccgcactagcctgaggtaa

SEQ ID NO: 2535 - DNA, 204 bp, synthetic construct
  source 1..204: mol_type = other DNA
  misc_feature 1..204: note = Synthetic
aagatcaacaatcaattggtgtctgttaagccggaggtgatagtagatcagtatgaatataagtaccctgcaatcaaagatcagaggaagcctagcattactcttggaaaggccccagatttaaataaagcgtacaagtctatattatctggcatgaacgccgcgaagttggaccccgactcggtccgcactagcctgaggtaa

SEQ ID NO: 2536 - DNA, 72 bp, synthetic construct
  misc_feature 1..72: note = Synthetic
  source 1..72: mol_type = other DNA
atgaatataagtaccctgcaatcaaagatcagaggaagcctagcattactcttggaaaggccccagatttaa

SEQ ID NO: 2537 - DNA, 15 bp, synthetic construct
  source 1..15: mol_type = other DNA
  misc_feature 1..15: note = Synthetic
atgctacccacataa

SEQ ID NO: 2538 - DNA, 108 bp, synthetic construct
  misc_feature 1..108: note = Synthetic
  source 1..108: mol_type = other DNA
ttgtccagcacttttaccatgcgcccgacaagtaagattgcagacgctgaaatcatttcaagagaacatgattatatcgccgactcggtccgcactagcctgaggtaa

SEQ ID NO: 2539 - DNA, 36 bp, synthetic construct
  source 1..36: mol_type = other DNA
  misc_feature 1..36: note = Synthetic
atgattatatcgccgactcggtccgcactagcctga

SEQ ID NO: 2540 - DNA, 90 bp, synthetic construct
  misc_feature 1..90: note = Synthetic
  source 1..90: mol_type = other DNA
atgcgcccgacaagtaagattgcagacgctgaaatcatttcaagagaacatgattatatcgccgactcggtccgcactagcctgaggtaa

SEQ ID NO: 2541 - DNA, 54 bp, synthetic construct
  source 1..54: mol_type = other DNA
  misc_feature 1..54: note = Synthetic
atgctagttttaaggaaagctttgccatccaccttgagtatactggctcaatga

SEQ ID NO: 2542 - DNA, 168 bp, synthetic construct
  misc_feature 1..168: note = Synthetic
  source 1..168: mol_type = other DNA
atgaatcaacaggccaagtatctagtacatgatgtaaccgttatgtactcaggtgcagtgagtccgtgtgtcttgtcagactgttggagactggttttgtcaggacctactttcaagggcaaatcagcatggtatgttgacaccgagatccgactcggtccgcactag

SEQ ID NO: 2543 - DNA, 195 bp, synthetic construct
  source 1..195: mol_type = other DNA
  misc_feature 1..195: note = Synthetic
ataggcataactgtattaatgcttttgatggtgatttctggtgccgccctgatagtcaaggagttaaatcctaatgatatattcacaatgcaatcattaaagtttaatcgagccgtaacgattttcaaatatataggactctttatctatataccaggaacaatcattttgtacgctcgactcggtccgcactag

SEQ ID NO: 2544 - DNA, 39 bp, synthetic construct
  source 1..39: mol_type = other DNA
  misc_feature 1..39: note = Synthetic
atgttgcctggggtatgtgtacacattatacagtcgtag

SEQ ID NO: 2545 - DNA, 24 bp, synthetic construct
  misc_feature 1..24: note = Synthetic
  source 1..24: mol_type = other DNA
atgttaggtaggaggagcctataa

SEQ ID NO: 2546 - DNA, 135 bp, synthetic construct
  source 1..135: mol_type = other DNA
  misc_feature 1..135: note = Synthetic
atgcagtacttaacccagatacctcaccaggtcgagaggtactccgtcactattcgcgccgcaaaatccaatgtcgtctgtcccggtactttgcgcagaaactcaggagtctgtgaattcgactgtattttttag

SEQ ID NO: 2547 - DNA, 153 bp, synthetic construct
  misc_feature 1..153: note = Synthetic
  source 1..153: mol_type = other DNA
atgtcgtctgtcccggtactttgcgcagaaactcaggagtctgtgaattcgactgtattttttagtcgaacggagaccggctgtacgcagcagttaacgcgtcgacggcacacacaatgggagataatatcgactcggtccgcactagcctga

SEQ ID NO: 2548 - DNA, 42 bp, synthetic construct
  source 1..42: mol_type = other DNA
  misc_feature 1..42: note = Synthetic
atgggagataatatcgactcggtccgcactagcctgaggtaa

SEQ ID NO: 2549 - DNA, 228 bp, synthetic construct
  source 1..228: mol_type = other DNA
  misc_feature 1..228: note = Synthetic
atgcatgcgcgcgcgcggacgcgggcgcgtagccgagcggcgcgttttcgcggccttaaaatgggaaacctcacctctgcgcggcccgcgggctgcaagattgtagagacgctgccggcaacgctgccgctggcgctacctaccggcagcatgctcacgtacgactgctttgacacgctcatctcgcagacgcagcgcgacgactcggtccgcactagcctgaggtaa

SEQ ID NO: 2550 - DNA, 228 bp, synthetic construct
  misc_feature 1..228: note = Synthetic
  source 1..228: mol_type = other DNA
atgcatgcgcgcgcgcggacgcgggcgcgtagccgagcggcgcgttttcgcggccttaaagccggaaacctcacctctgcgcggcccgcgggctgcaagattgtagagacgctgccggcaacgctgccgctggcgctacctaccggcagcatgctcacgtacgactgctttgacacgctcatctcgcagacgcagcgcgacgactcggtccgcactagcctgaggtaa

SEQ ID NO: 2551 - DNA, 21 bp, synthetic construct
  misc_feature 1..21: note = Synthetic
  source 1..21: mol_type = other DNA
attacgtggaatttaaagtag

SEQ ID NO: 2552 - DNA, 144 bp, synthetic construct
  source 1..144: mol_type = other DNA
  misc_feature 1..144: note = Synthetic
atgcttgtggcccctggccgactataccttggaagaaggggttctttccctcagtgcttgcaaattcttgagcacgtccgcccgagaaatgcggtgatgttgatcctaacgaggatttcgcctcctgggtatgtagcgcgttaa

SEQ ID NO: 2553 - DNA, 228 bp, synthetic construct
  source 1..228: mol_type = other DNA
  misc_feature 1..228: note = Synthetic
atggaaagaataaaagaactaagagatttgatgtcacagtctcgcactcgcgagatactgacaaaaacaactgtggaccatatggccataatcaagaaatatacatcaggaagacaggagaagaatcctgcccttaggatgaagtggatgatggcaatgaaatatccaattacggcagacaaaaggataatggagatgatcgactcggtccgcactagcctgaggtaa

SEQ ID NO: 2554 - DNA, 228 bp, synthetic construct
  misc_feature 1..228: note = Synthetic
  source 1..228: mol_type = other DNA
atggaagactttgtgcgacagtgcttcaatccaatgatcgtcgagcttgcggaaaaggcaatgaaagaatatggggaagatccgaaaatcgaaacaaacaaattcgcatcaatatgcacacacttagaagtctgcttcatgtactctgatttccacttcatcgacgaacgaggcgaatcaactataatagaatctggcgacgactcggtccgcactagcctgaggtaa

SEQ ID NO: 2555 - DNA, 63 bp, synthetic construct
  source 1..63: mol_type = other DNA
  misc_feature 1..63: note = Synthetic
aagaatatggggaagatccgaaaatcgaaacaaacaaattcgcatcaatatgcacacacttag

SEQ ID NO: 2556 - DNA, 228 bp, synthetic construct
  source 1..228: mol_type = other DNA
  misc_feature 1..228: note = Synthetic
atggatgtcaatccgactctacttttcctaaaaattccagcgcaaaatgccataagcaccacattcccttatactggagatcctccatacagccatggaacaggaacaggatacaccatggacacagtaaacagaacacaccaatactcagaaaagggaaagtggacgacaaacacagagactggtgcaccccagctcaacgactcggtccgcactagcctgaggtaa

SEQ ID NO: 2557 - DNA, 57 bp, synthetic construct
  source 1..57: mol_type = other DNA
  misc_feature 1..57: note = Synthetic
ctggagatcctccatacagccatggaacaggaacaggatacaccatggacacagtaa

SEQ ID NO: 2558 - DNA, 150 bp, synthetic construct
  misc_feature 1..150: note = Synthetic
  source 1..150: mol_type = other DNA
ctggagaccctccatacagccatggaacaggaacaggatacaccatggacacagtcaacagaacacataaatactcagaaaaaggaaagtggacaacgaacacagagactggagcaccccaactcaacgactcggtccgcactagcctga

SEQ ID NO: 2559 - DNA, 228 bp, synthetic construct
  source 1..228: mol_type = other DNA
  misc_feature 1..228: note = Synthetic
atggattccaatactgtgtcaagcttccaggacatactgacaaggatgtcaaaaatgcaattgagatcctcatcggaggatttgaatggaatgataacacagttcgagtctctgaaactctacagagattcgcttggagaagcagcgatgaggatgggagatctccactctctacaaagtagaaacgggaaatggagagacgactcggtccgcactagcctgaggtaa

SEQ ID NO: 2560 - DNA, 228 bp, synthetic construct
  source 1..228: mol_type = other DNA
  misc_feature 1..228: note = Synthetic
atggattccaatactgtgtcaagcttccaggtagactgctttctttggcatgtccgcaaacgatttgcagaccaagaaatgggtgatgccccatttctagaccggcttcgccgagatcagaagtccctgagaggaagaagcagcactcttggtctggacatcagaactgccacgcgtgaaggaaagcatatagtggagcgcgactcggtccgcactagcctgaggtaa

SEQ ID NO: 2561 - DNA, 228 bp, synthetic construct
  source 1..228: mol_type = other DNA
  misc_feature 1..228: note = Synthetic
atggattctaacactgtgtcaagttttcaggacatactattgaggatgtcaaaaatgcaattggggtcctcatcggaggacttgaatggaatgataacacagttcgagtctctaaaactctacagagattcgcttggagaagcagtaatgagaatgggagacctccactcactccaaaacagaaacggaaaatggcgagacgactcggtccgcactagcctgaggtaa

SEQ ID NO: 2562 - DNA, 27 bp, synthetic construct
  misc_feature 1..27: note = Synthetic
  source 1..27: mol_type = other DNA
atgccatctgcgcgatctacaatttga

SEQ ID NO: 2563 - DNA, 51 bp, synthetic construct
  misc_feature 1..51: note = Synthetic
  source 1..51: mol_type = other DNA
atgctaccgtggatgatttccttagaacaattaaatatgatggagttttga

SEQ ID NO: 2564 - DNA, 51 bp, synthetic construct
  source 1..51: mol_type = other DNA
  misc_feature 1..51: note = Synthetic
atgctaccgtggatgatttcctcagaacgattagatgcgatggagttttga

SEQ ID NO: 2565 - DNA, 195 bp, synthetic construct
  source 1..195: mol_type = other DNA
  misc_feature 1..195: note = Synthetic
atcggtataactgtattaatgcttttgatggtaatttctggcaccgccatgatagtcaaggagttaaatcctaatgatatattcacaatgcaatcattaaagtttaatcgagccgtaacgattttcaaatatataggactctttatctatataccaggaacgataattttgtacgctcgactcggtccgcactag

SEQ ID NO: 2566 - DNA, 84 bp, synthetic construct
  misc_feature 1..84: note = Synthetic
  source 1..84: mol_type = other DNA
atgctctgctggccactgagggtccggccgccctctgagctgctctcttttgctcctggttttgctcatgcagcgctaacatga

SEQ ID NO: 2567 - DNA, 66 bp, synthetic construct
  source 1..66: mol_type = other DNA
  misc_feature 1..66: note = Synthetic
atggcttgtaattctgtcttactaatgggattaatgcctggaccctcaccagaggcatgttgctga

SEQ ID NO: 2568 - DNA, 111 bp, synthetic construct
  misc_feature 1..111: note = Synthetic
  source 1..111: mol_type = other DNA
attaatgcctggaccctcaccagaggcatgttgctgagcgagctcgtcgatcccggggtagagcatctgcaccggctgctgcgacatccgactcggtccgcactagcctga

SEQ ID NO: 2569 - DNA, 168 bp, synthetic construct
  misc_feature 1..168: note = Synthetic
  source 1..168: mol_type = other DNA
atgctcgcagatttggaactagtggagaatgggaagtgcgttttaacggggaaactatctttgctcctgttaccagctcctcgccgtcctcatacgaagaggtcagagaacgggctgagccccccgacgtccccgaggtccgactcggtccgcactagcctgaggtaa

SEQ ID NO: 2570 - DNA, 18 bp, synthetic construct
  misc_feature 1..18: note = Synthetic
  source 1..18: mol_type = other DNA
atgggaagtgcgttttaa

SEQ ID NO: 2571 - DNA, 228 bp, synthetic construct
  source 1..228: mol_type = other DNA
  misc_feature 1..228: note = Synthetic
atggataaagttcttaacagggaagaatccatggagctcatggaccttttaggccttgaaagagctgcctggggaaatcttcccttaatgagaaaagcttatttaaggaagtgtaaggaatttcaccctgacaaagggggcgacgaggataaaatgaagagaatgaatactttgtataaaaaaatggagcaggatgtaaacgactcggtccgcactagcctgaggtaa

SEQ ID NO: 2572 - DNA, 228 bp, synthetic construct
  misc_feature 1..228: note = Synthetic
  source 1..228: mol_type = other DNA
atggatacttttattacaaagaatttccagactacaataatacaaaaggccaaaaacacaatggcagaatttagtgaagatcctgaattacagccagcagtactattcaacatctgcgtccatctggaggtctgctatgtaataagtgatatgaactttcttgatgaggaaggaaagacatatacagcattagaaggacacgactcggtccgcactagcctgaggtaa

SEQ ID NO: 2573 - DNA, 228 bp, synthetic construct
  misc_feature 1..228: note = Synthetic
  source 1..228: mol_type = other DNA
atggatcctcgcttacgtgaagaagtagtgcgattaataattgcattgacgggcgataatggaacatcattgtcaaaagggcttgaatcaaggattgcagcgctcgaaaagacgtcccaaatacactctgatactctcctcaggatcacccaaggactcgatgatgcaaataaacgaatcatcgctcttgaacaaagtagcgactcggtccgcactagcctgaggtaa

SEQ ID NO: 2574 - DNA, 165 bp, synthetic construct
  source 1..165: mol_type = other DNA
  misc_feature 1..165: note = Synthetic
atggaacatcattgtcaaaagggcttgaatcaaggattgcagcgctcgaaaagacgtcccaaatacactctgatactctcctcaggatcacccaaggactcgatgatgcaaataaacgaatcatcgctcttgaacaaagtagcgactcggtccgcactagcctga

SEQ ID NO: 2575 - DNA, 228 bp, synthetic construct
  source 1..228: mol_type = other DNA
  misc_feature 1..228: note = Synthetic
atggatcctcgcttacgtgaagaagtagtgcgattaataattgcattgacgggcgatagccgaacatcattgtcaaaagggcttgaatcaaggattgcagcgctcgaaaagacgtcccaaatacactctgatactctcctcaggatcacccaaggactcgatgatgcaaataaacgaatcatcgctcttgaacaaagtagcgactcggtccgcactagcctgaggtaa

SEQ ID NO: 2576 - DNA, 129 bp, synthetic construct
  source 1..129: mol_type = other DNA
  misc_feature 1..129: note = Synthetic
ttgcagcgctcgaaaagacgtcccaaatacactctgatactctcctcaggatcacccaaggactcgatgatgcaaataaacgaatcatcgctcttgaacaaagtagcgactcggtccgcactagcctga

SEQ ID NO: 2577 - DNA, 12 bp, synthetic construct
  misc_feature 1..12: note = Synthetic
  source 1..12: mol_type = other DNA
atgcggaagtaa

SEQ ID NO: 2578 - DNA, 201 bp, synthetic construct
  misc_feature 1..201: note = Synthetic
  source 1..201: mol_type = other DNA
ttgctttgggatattcacgcgatgggcgatattggcgtttatgttgatgaaggttacatgattccaaatcgtgaccctgcatttcaggcgctacttactcaaggccggagtaagaaaatcccgatgattattttaagccagcggcccgtatggcttacccgctttgccatttcggaatcggatcgactcggtccgcactag

SEQ ID NO: 2579 - DNA, 201 bp, synthetic construct
  source 1..201: mol_type = other DNA
  misc_feature 1..201: note = Synthetic
ttgctttgggatattcacgcgatgggcgatattggcgtttatgttgatgaaggttacatgattccaaatcgtgaccctgcatttcaggcgctacttactcaaggccggagtaagaaaatcccgatgattgccttaagccagcggcccgtatggcttacccgctttgccatttcggaatcggatcgactcggtccgcactag

SEQ ID NO: 2580 - DNA, 27 bp, synthetic construct
  source 1..27: mol_type = other DNA
  misc_feature 1..27: note = Synthetic
atgctaatgtcaagtttattccaatag

SEQ ID NO: 2581 - DNA, 42 bp, synthetic construct
  source 1..42: mol_type = other DNA
  misc_feature 1..42: note = Synthetic
atgccgccatcgttgattacaagactacaaagaatgttctag

SEQ ID NO: 2582 - DNA, 72 bp, synthetic construct
  source 1..72: mol_type = other DNA
  misc_feature 1..72: note = Synthetic
atggaattgaacaccctttggagcaaattccagcaaaatatccacgactcggtccgcactagcctgaggtaa

SEQ ID NO: 2583 - DNA, 39 bp, synthetic construct
  misc_feature 1..39: note = Synthetic
  source 1..39: mol_type = other DNA
atgataaaggcaaattcgactcggtccgcactagcctga

SEQ ID NO: 2584 - DNA, 228 bp, synthetic construct
  source 1..228: mol_type = other DNA
  misc_feature 1..228: note = Synthetic
atggcactcggtgagccatactatagttccaaacctgacaaagacttcaattttggaagcacaatggcacgtaggcaaatgacaactactatgatcacaaaacttccaaaatttgttaggaattctccacaagcctatgattggatcgtaagaggtttaatctttcccaccactggaaaaacttatttccaacgagttgtcgactcggtccgcactagcctgaggtaa

SEQ ID NO: 2585 - DNA, 147 bp, synthetic construct
  misc_feature 1..147: note = Synthetic
  source 1..147: mol_type = other DNA
atggcattccacttatcactggcatccttccactctttcgaaaactcctccagtctgctggcgttatcctccgtcagctcgactttttccagcagctccttgccgagatgggattcggttatcttgcctttgaaaaaatccaggtaa

SEQ ID NO: 2586 - DNA, 111 bp, synthetic construct
  source 1..111: mol_type = other DNA
  misc_feature 1..111: note = Synthetic
atgggattcggttatcttgcctttgaaaaaatccaggtaaccttccgcatcatcgctcgcccgaccgacggcctccacgaatgccgatttgcccgactcggtccgcactag

SEQ ID NO: 2587 - DNA, 147 bp, synthetic construct
  misc_feature 1..147: note = Synthetic
  source 1..147: mol_type = other DNA
atggcattccacttatcactggcatccttccactctttcgaaaactcctccagtctgctggcgttatcctccgtcagctcgactttttccagcagctccttgccgaggccggattcggttatcttgcctttgaaaaaatccaggtaa

SEQ ID NO: 2588 - DNA, 228 bp, synthetic construct
  source 1..228: mol_type = other DNA
  misc_feature 1..228: note = Synthetic
atggccaaaggagccgtccttaaaggaaaggggggcggtccccctaggcgagtgccgaaagagaccgcaaaaaagacgcgtcaaggaccaggccgattgccaaacggactggtattgatgcgcatgatgggagtgctgtggcatatggtcgctggaacggccaggaatccgatcctcaagcgattctgggcgactgttcccgactcggtccgcactagcctgaggtaa

SEQ ID NO: 2589 - DNA, 117 bp, synthetic construct
  misc_feature 1..117: note = Synthetic
  source 1..117: mol_type = other DNA
atcaagatcttgcaagtttttctcttaaacatcttagtttggtatttagagattctcagtattatgcttgttgtcgcaattgttgtcgcgtgtccgactcggtccgcactagcctga

SEQ ID NO: 2590 - DNA, 198 bp, synthetic construct
  source 1..198: mol_type = other DNA
  misc_feature 1..198: note = Synthetic
ttgaccgcgaaatttgaacgagcagcagccatgccgggcttctacgagatcgtgatcaaggtgccgagcgacctggacgagcacctgccgggcatttctgactcgtttgtgaactgggtggccgagaaggaatgggagctgcccccggattctgacatggatcggaatctcgactcggtccgcactagcctgaggtaa

SEQ ID NO: 2591 - DNA, 198 bp, synthetic construct
  misc_feature 1..198: note = Synthetic
  source 1..198: mol_type = other DNA
ttgaccgcgaaatttgaacgagcagcagccatgccgggcttctacgagatcgtgatcaaggtgccgagcgacctggacgagcacctgccgggcatttctgactcgtttgtgagctgggtggccgagaaggaatgggagctgcccccggattctgacatggatctgaatctcgactcggtccgcactagcctgaggtaa

SEQ ID NO: 2592 - DNA, 147 bp, synthetic construct
  source 1..147: mol_type = other DNA
  misc_feature 1..147: note = Synthetic
atgtcgaaagtctttgtagacatcgaggccgagagcccgtttttaaaatcactacaaagagcatttccagcatttgaagtggaagcacagcaggtcacgccgaacgaccatgctaatgctagagcgactcggtccgcactagcctga

SEQ ID NO: 2593 - DNA, 228 bp, synthetic construct
  source 1..228: mol_type = other DNA
  misc_feature 1..228: note = Synthetic
atggcgtcccaaggcaccaaacggtcttatgaacagatggaaactgatggggaacgccagaatgcaactgagatcagagcatccgtcgggaagatgattgatggaattggacgattctacatccaaatgtgcaccgaacttaaactcagtgattatgaggggcgactgatccagaacagcttaacaatagagagaatggtcgactcggtccgcactagcctgaggtaa

SEQ ID NO: 2594 - DNA, 228 bp, synthetic construct
  misc_feature 1..228: note = Synthetic
  source 1..228: mol_type = other DNA
atggcgtctcaaggcaccaaacgatcatatgaacaaatggagactggtggggagcgccaggatgccacagaaatcagagcatctgtcggaagaatgattggtggaatcgggagattctacatccaaatgtgcactgaactcaaactcagtgattatgatggacgactaatccagaatagcataacaatagagaggatggtcgactcggtccgcactagcctgaggtaa

SEQ ID NO: 2595 - DNA, 228 bp, synthetic construct
  source 1..228: mol_type = other DNA
  misc_feature 1..228: note = Synthetic
atggcgtctcaaggcaccaaacgatcctatgaacagatggaaactggtggggaacgccagaatgctactgagatcagggcatctgttggaagaatggttagcggcattgggagattctacatacagatgtgtacagaactcaaactcagtgacaatgaagggaggctgattcagaacagtataacaatagagagaatggtcgactcggtccgcactagcctgaggtaa

SEQ ID NO: 2596 - DNA, 141 bp, synthetic construct
  source 1..141: mol_type = other DNA
  misc_feature 1..141: note = Synthetic
atgaacagatggaaactggtggggaacgccagaatgctactgagatcagggcatctgttggaagaatggttagcggcattgggagattctacatacagatgtgtacagaactcaaactcagtgacaatgaagggaggctga

SEQ ID NO: 2597 - DNA, 12 bp, synthetic construct
  source 1..12: mol_type = other DNA
  misc_feature 1..12: note = Synthetic
gtgctttcttga

SEQ ID NO: 2598 - DNA, 198 bp, synthetic construct
  source 1..198: mol_type = other DNA
  misc_feature 1..198: note = Synthetic
ttgaccgcgaaatttgaacgagcagcagccatgccgggtttctacgagatcgtgatcaaggtgccgagcgacctggacgagcacctgccgggcatttctgactcgtttgtgaactgggtggccgagaaggaatgggagctgcccccggattctgacatggatctgaatctcgactcggtccgcactagcctgaggtaa

SEQ ID NO: 2599 - DNA, 198 bp, synthetic construct
  misc_feature 1..198: note = Synthetic
  source 1..198: mol_type = other DNA
ttgaccgcgaaatttgaacgagcagcagccgccccgggcttctacgagatcgtgatcaaggtgccgagcgacctggacgagcacctgccgggcatttctgactcgtttgtgaactgggtggccgagaaggaatgggagctgcccccggattctgacatggatcggaatctcgactcggtccgcactagcctgaggtaa

SEQ ID NO: 2600 - DNA, 198 bp, synthetic construct
  source 1..198: mol_type = other DNA
  misc_feature 1..198: note = Synthetic
ttgaccgcgaaatttgaacgagcagcagccgccccgggcttctacgagatcgtgatcaaggtgccgagcgacctggacgagcacctgccgggcatttctgactcgtttgtgagctgggtggccgagaaggaatgggagctgcccccggattctgacatggatctgaatctcgactcggtccgcactagcctgaggtaa

SEQ ID NO: 2601 - DNA, 198 bp, synthetic construct
  misc_feature 1..198: note = Synthetic
  source 1..198: mol_type = other DNA
ttgaccgcgaaatttgaacgagcagcagccgccccgggtttctacgagatcgtgatcaaggtgccgagcgacctggacgagcacctgccgggcatttctgactcgtttgtgaactgggtggccgagaaggaatgggagctgcccccggattctgacatggatctgaatctcgactcggtccgcactagcctgaggtaa

SEQ ID NO: 2602 - DNA, 72 bp, synthetic construct
  misc_feature 1..72: note = Synthetic
  source 1..72: mol_type = other DNA
atggccgtccgtcgaagctgttgcaacgtagcattcgacgttggcgacacggccttagcaccgaatccttaa

SEQ ID NO: 2603 - DNA, 60 bp, synthetic construct
  source 1..60: mol_type = other DNA
  misc_feature 1..60: note = Synthetic
ctgatgtgcttactttgccttgcattttctgtcgtcgtgatttgtgtgattctgatttag

SEQ ID NO: 2604 - DNA, 66 bp, synthetic construct
  source 1..66: mol_type = other DNA
  misc_feature 1..66: note = Synthetic
atggaaaaaaggtgtttgctatgctgcatgtgtgagatgtgttgcacgcgactcggtccgcactag

SEQ ID NO: 2605 - DNA, 96 bp, synthetic construct
  source 1..96: mol_type = other DNA
  misc_feature 1..96: note = Synthetic
atgcttcagttgggaaagaaccttggagacccctacgtaatcaacggaccaatgagattgtcgctgttcaattattcagaccattgcaaggtctag

SEQ ID NO: 2606 - DNA, 15 bp, synthetic construct
  misc_feature 1..15: note = Synthetic
  source 1..15: mol_type = other DNA
atgaactataactag

SEQ ID NO: 2607 - DNA, 15 bp, synthetic construct
  source 1..15: mol_type = other DNA
  misc_feature 1..15: note = Synthetic
atggcggatgtgtga

SEQ ID NO: 2608 - DNA, 138 bp, synthetic construct
  source 1..138: mol_type = other DNA
  misc_feature 1..138: note = Synthetic
atggccgccaaagtgcatgttgatattgaggctgacagcccattcatcaagtctttgcagaaggcatttccgtcgttcgaggtggagtcattgcaggtcacaccaaatgaccatgcgactcggtccgcactagcctga

SEQ ID NO: 2609 - DNA, 39 bp, synthetic construct
  misc_feature 1..39: note = Synthetic
  source 1..39: mol_type = other DNA
atgcctggagatttgggcgtgcccccgcaagactgctag

SEQ ID NO: 2610 - DNA, 228 bp, synthetic construct
  source 1..228: mol_type = other DNA
  misc_feature 1..228: note = Synthetic
atggctaaaagatatgcatcaagaaagagagtttatcgtcgaaaagcgcggaaacctattaaaaggtttcgtcgatatcgtgttaaagcacgttcgacagctaaacgttattacaggcttaagagggctgctaggaattattcgaaagtcaagaagattagaagggctaaaaggcaatataaaacgatttctggcaaaggcgactcggtccgcactagcctgaggtaa

SEQ ID NO: 2611 - DNA, 114 bp, synthetic construct
  misc_feature 1..114: note = Synthetic
  source 1..114: mol_type = other DNA
attacaggcttaagagggctgctaggaattattcgaaagtcaagaagattagaagggctaaaaggcaatataaaacgatttctggcaaaggcgactcggtccgcactagcctga

SEQ ID NO: 2612 - DNA, 228 bp, synthetic construct
  misc_feature 1..228: note = Synthetic
  source 1..228: mol_type = other DNA
atggctaaaagatgcccatcaagaaagagagtttatcgtcgaaaagcgcggaaacctattaaaaggtttcgtcgatatcgtgttaaagcacgttcgacagctaaacgttattacaggcttaagagggctgctaggaattattcgaaagtcaagaagattagaagggctaaaaggcaatataaaacgatttctggcaaaggcgactcggtccgcactagcctgaggtaa

SEQ ID NO: 2613 - DNA, 138 bp, synthetic construct
  misc_feature 1..138: note = Synthetic
  source 1..138: mol_type = other DNA
aagcacgttcgacagctaaacgttattacaggcttaagagggctgctaggaattattcgaaagtcaagaagattagaagggctaaaaggcaatataaaacgatttctggcaaaggcgactcggtccgcactagcctga

SEQ ID NO: 2614 - DNA, 228 bp, synthetic construct
  source 1..228: mol_type = other DNA
  misc_feature 1..228: note = Synthetic
atggctaagagatatgcatcaagaaagagagtttatcgtcgaaaaacgcggaaaccttttagaagggttcgtcgatatcgtgttaaagcacgttcgacagctaaacgttattacaggcttaagagggctgctaggaattattcgaaagtcaagaagattagaagggctaaaaggcaatataaaacgatttctggcaaaggcgactcggtccgcactagcctgaggtaa

SEQ ID NO: 2615 - DNA, 228 bp, synthetic construct
  source 1..228: mol_type = other DNA
  misc_feature 1..228: note = Synthetic
atggctaagagatatgcatcaagaaagagagtttatcgtcgaaaaacgcggaaaccttttagaagggttcgtcgatatcgtgttaaagcacgttcgacagctaaacgttattacaggcttaagagggctgctaggaattattcgaaagttaagaagattagaagggctaaaaggcaatataaaacgatttctggcaaaggcgactcggtccgcactagcctgaggtaa

SEQ ID NO: 2616 - DNA, 210 bp, synthetic construct
  source 1..210: mol_type = other DNA
  misc_feature 1..210: note = Synthetic
atgcatcaagaaagagagtttatcgtcgaaaaacgcggaaaccttttagaagggttcgtcgatatcgtgttaaagcacgttcgacagctaaacgttattacaggcttaagagggctgctaggaattattcgaaagttaagaagattagaagggctaaaaggcaatataaaacgatttctggcaaaggcgactcggtccgcactagcctga

SEQ ID NO: 2617 - DNA, 228 bp, synthetic construct
  misc_feature 1..228: note = Synthetic
  source 1..228: mol_type = other DNA
atggctaagagatatgcatcaagaaagagagtttatcgtcgaaaaacgcggaaaccttttagaagggttcgtcgatatcgtgttaaggcacgttcgacagctaaacgttattacaggcttaagagggctgctaggaattattcgaaagtcaagaagattagaagggctaagaggcaatataagacaatgtctggcaaaggcgactcggtccgcactagcctgaggtaa

SEQ ID NO: 2618 - DNA, 228 bp, synthetic construct
  source 1..228: mol_type = other DNA
  misc_feature 1..228: note = Synthetic
atggctaagagatatgcatcaagaaagagagtttatcgtcgaaaagcgcggaaacctattaaaaggtttcgtcgatatcgtgttaaagcacgttcgacagctaaacgttattacaggcttaagagggctgctaggaattattcgaaagtcaagaagattagaagggctaaaaggcaatataaaacgatttctggcaaaggcgactcggtccgcactagcctgaggtaa

SEQ ID NO: 2619 - DNA, 228 bp, synthetic construct
  source 1..228: mol_type = other DNA
  misc_feature 1..228: note = Synthetic
atggctaagagatatgcatcaagaaagagagtttatcgtcgaaaagcgcggaaaccttttagaagggttcgtcgatatcgtgttaaagcacgttcgacagctaaacgttattacaggcttaagagggctgctaggaattattcgaaagtcaagaagattagaagggctaaaaggcaatataaaacgatttctggcaaaggcgactcggtccgcactagcctgaggtaa

SEQ ID NO: 2620 - DNA, 228 bp, synthetic construct
  misc_feature 1..228: note = Synthetic
  source 1..228: mol_type = other DNA
atggctaagagatatgcatcaagaaagagagtttatcgtcgaaaagcgcgtaaaccttttagaagggttcgtcgatatcgtgttaaagcacgttcgacagctaaacgttattacaggcttaagagggctgctaggaattattcgaaagtcaagaagattagaagggctaaaaggcaatataaaacgatttctggcaaaggcgactcggtccgcactagcctgaggtaa

SEQ ID NO: 2621 - DNA, 228 bp, synthetic construct
  source 1..228: mol_type = other DNA
  misc_feature 1..228: note = Synthetic
atggctaagagatatgcatcaagaaagagagtttatcgtcgaaaagctcgtaaacctattaaaaggtttcgtcgatatcgtgttaaagcacgttcgacagctaaacgttattacaggcttaagagggctgctaggaattattcgaaagtcaagaagattagaagggctaaaaggcaatataaaacgatttctggcaaaggcgactcggtccgcactagcctgaggtaa

SEQ ID NO: 2622 - DNA, 228 bp, synthetic construct
  misc_feature 1..228: note = Synthetic
  source 1..228: mol_type = other DNA
atggctaagagatatgcatcaagaaagagagtttatcgtcgaaaagctcgtaaacctattaaaaggtttcgtcgatatcgtgttaaggctcgttcaacagctaaacgttattacaggcttaagagggctgctaggaattattcgaaagttaagaagattagaagggctaaaaggcaatataaaacgatttctggcaaaggcgactcggtccgcactagcctgaggtaa

SEQ ID NO: 2623 - DNA, 114 bp, synthetic construct
  misc_feature 1..114: note = Synthetic
  source 1..114: mol_type = other DNA
attacaggcttaagagggctgctaggaattattcgaaagttaagaagattagaagggctaaaaggcaatataaaacgatttctggcaaaggcgactcggtccgcactagcctga

SEQ ID NO: 2624 - DNA, 228 bp, synthetic construct
  source 1..228: mol_type = other DNA
  misc_feature 1..228: note = Synthetic
atggctaagagatgcccatcaagaaagagagtttatcgtcgaaaaacgcggaaaccttttagaagggttcgtcgatatcgtgttaaagcacgttcgacagctaaacgttattacaggcttaagagggctgctaggaattattcgaaagtcaagaagattagaagggctaaaaggcaatataaaacgatttctggcaaaggcgactcggtccgcactagcctgaggtaa

SEQ ID NO: 2625 - DNA, 228 bp, synthetic construct
  misc_feature 1..228: note = Synthetic
  source 1..228: mol_type = other DNA
atggctaagagatgcccatcaagaaagagagtttatcgtcgaaaaacgcggaaaccttttagaagggttcgtcgatatcgtgttaaagcacgttcgacagctaaacgttattacaggcttaagagggctgctaggaattattcgaaagttaagaagattagaagggctaaaaggcaatataaaacgatttctggcaaaggcgactcggtccgcactagcctgaggtaa

SEQ ID NO: 2626 - DNA, 147 bp, synthetic construct
  misc_feature 1..147: note = Synthetic
  source 1..147: mol_type = other DNA
atcgtgttaaagcacgttcgacagctaaacgttattacaggcttaagagggctgctaggaattattcgaaagttaagaagattagaagggctaaaaggcaatataaaacgatttctggcaaaggcgactcggtccgcactagcctga

SEQ ID NO: 2627 - DNA, 228 bp, synthetic construct
  source 1..228: mol_type = other DNA
  misc_feature 1..228: note = Synthetic
atggctaagagatgcccatcaagaaagagagtttatcgtcgaaaaacgcggaaaccttttagaagggttcgtcgatatcgtgttaaggcacgttcgacagctaaacgttattacaggcttaagagggctgctaggaattattcgaaagtcaagaagattagaagggctaagaggcaatataagacaatgtctggcaaaggcgactcggtccgcactagcctgaggtaa

SEQ ID NO: 2628 - DNA, 228 bp, synthetic construct
  source 1..228: mol_type = other DNA
  misc_feature 1..228: note = Synthetic
atgtccgtacaccggcccttcccgacacggagtttgagattccaagcaggagagaagatcgccgtgtggctgtggctcggcgtcgggctcctcggcggtaccggactggcttccctggtcctggccatttccttatttacccagcgccgaggccgcaagcgatccgacgagacttcgtcgcgaggccggctcccgggtgccgactcggtccgcactagcctgaggtaa

SEQ ID NO: 2629 - DNA, 57 bp, synthetic construct
  source 1..57: mol_type = other DNA
  misc_feature 1..57: note = Synthetic
atgtcgacgttgggcatgtcggagacttatcaatcgtgcatgagcctcagtaagtag

SEQ ID NO: 2630 - DNA, 72 bp, synthetic construct
  source 1..72: mol_type = other DNA
  misc_feature 1..72: note = Synthetic
atcgtaccggtctgcaacgatgagttcaccttgtcatcatgtgtcgactcggtccgcactagcctgaggtaa

SEQ ID NO: 2631 - DNA, 24 bp, synthetic construct
  misc_feature 1..24: note = Synthetic
  source 1..24: mol_type = other DNA
atgaaaatgaggaaccctccttaa

SEQ ID NO: 2632 - DNA, 30 bp, synthetic construct
  source 1..30: mol_type = other DNA
  misc_feature 1..30: note = Synthetic
attgtgtgtcttgtgttcaaggttaagtga

SEQ ID NO: 2633 - DNA, 45 bp, synthetic construct
  source 1..45: mol_type = other DNA
  misc_feature 1..45: note = Synthetic
atctcagctgtccgaacaacttcgactcggtccgcactagcctga

SEQ ID NO: 2634 - DNA, 141 bp, synthetic construct
  source 1..141: mol_type = other DNA
  misc_feature 1..141: note = Synthetic
atgtgcagcggggtaccccgataccgtgtattcttcttccttcacatgcatgtggtatggaatcggtacgcactgatacatgatacgaaaattgagtaccctagacttcggaactccgacgaacagcggtgcgctgagtaa

SEQ ID NO: 2635 - DNA, 228 bp, synthetic construct
  misc_feature 1..228: note = Synthetic
  source 1..228: mol_type = other DNA
atgtggaggatccccttctctagcaacttcatgtctatgggctccctcaccgacctggggcagaacatgctgtacgccaactccgctcacgccttggatatgacctttgaggtggatcccatggatgagcccacgcttctctatgttctgtttgaagtcttcgacgtggtgcgcatccaccagccgcaccgcggcgtcatcgactcggtccgcactagcctgaggtaa

SEQ ID NO: 2636 - DNA, 30 bp, synthetic construct
  misc_feature 1..30: note = Synthetic
  source 1..30: mol_type = other DNA
atgtgtatcaatctagacgggtttcactag

SEQ ID NO: 2637 - DNA, 27 bp, synthetic construct
  misc_feature 1..27: note = Synthetic
  source 1..27: mol_type = other DNA
atgaacagtagtccacgattagcgtag

SEQ ID NO: 2638 - DNA, 228 bp, synthetic construct
  source 1..228: mol_type = other DNA
  misc_feature 1..228: note = Synthetic
atgttacataatccgacttccgagactatgtatctaactatgaaagcgatagaaaaagataaactagataaatctattattattccgtttatcgcgtactttgtacttatgcatccggacttttgtaaaaatcgtagatactttacttcatataaacgttttgtaactgattatgttcatgaaggagtatcttacaaagtcgactcggtccgcactagcctgaggtaa

SEQ ID NO: 2639 - DNA, 228 bp, synthetic construct
  misc_feature 1..228: note = Synthetic
  source 1..228: mol_type = other DNA
atgttacataatccgacttctgagaccatgtatctaactatgaaagctatagaaaaagatagactagataaatctattattattccgtttatcgcgtactttgtacttatgcatcctgacttttgtaaaaatcgtagatactttacttcatataaacgttttgtaactgattatgttcatgaaggagtatcttacgaagtcgactcggtccgcactagcctgaggtaa

SEQ ID NO: 2640 - DNA, 228 bp, synthetic construct
  misc_feature 1..228: note = Synthetic
  source 1..228: mol_type = other DNA
atgttacataatcctacttctgagaccatgtatctaactatgaaagctatagaaaaagatagactagataaatctattattattccgtttatcgcgtactttgtacttatgcatccggacttttgtaaaaatcgtagatactttacttcatataaacgttttgtaactgattatgttcatgaaggagtatcttacgaagtcgactcggtccgcactagcctgaggtaa

SEQ ID NO: 2641 - DNA, 138 bp, synthetic construct
  source 1..138: mol_type = other DNA
  misc_feature 1..138: note = Synthetic
atgttgagtttcaggagcgcatggcagaacacatccggtacatggttgaaaccattgctcaccaccaggttgatattgattcagaggtataaaacgaatgagtactgcactcgcaacgctggctgggaagctggctga

SEQ ID NO: 2642 - DNA, 126 bp, synthetic construct
  source 1..126: mol_type = other DNA
  misc_feature 1..126: note = Synthetic
atgagtactgcactcgcaacgctggctgggaagctggctgaacgtgtcggcatggattctgtcgacccacaggaactgatcaccactcttcgccagacggcatcgactcggtccgcactagcctga

SEQ ID NO: 2643 - DNA, 126 bp, synthetic construct
  source 1..126: mol_type = other DNA
  misc_feature 1..126: note = Synthetic
atgagtactgcactcgcaacgctggctgggaagctggctgaacgtgtcggcatggattctgtcgacccacaggaagccatcaccactcttcgccagacggcatcgactcggtccgcactagcctga

SEQ ID NO: 2644 - DNA, 228 bp, synthetic construct
  misc_feature 1..228: note = Synthetic
  source 1..228: mol_type = other DNA
atggctaagagatgcccatcaagaaagagagtttatcgtcgaaaagcgcggaaacctattaaaaggtttcgtcgatatcgtgttaaagcacgttcgacagctaaacgttattacaggcttaagagggctgctaggaattattcgaaagtcaagaagattagaagggctaaaaggcaatataaaacgatttctggcaaaggcgactcggtccgcactagcctgaggtaa

SEQ ID NO: 2645 - DNA, 228 bp, synthetic construct
  source 1..228: mol_type = other DNA
  misc_feature 1..228: note = Synthetic
atggctaagagatgcccatcaagaaagagagtttatcgtcgaaaagcgcggaaaccttttagaagggttcgtcgatatcgtgttaaagcacgttcgacagctaaacgttattacaggcttaagagggctgctaggaattattcgaaagtcaagaagattagaagggctaaaaggcaatataaaacgatttctggcaaaggcgactcggtccgcactagcctgaggtaa

SEQ ID NO: 2646 - DNA, 228 bp, synthetic construct
  source 1..228: mol_type = other DNA
  misc_feature 1..228: note = Synthetic
atggctaagagatgcccatcaagaaagagagtttatcgtcgaaaagcgcgtaaaccttttagaagggttcgtcgatatcgtgttaaagcacgttcgacagctaaacgttattacaggcttaagagggctgctaggaattattcgaaagtcaagaagattagaagggctaaaaggcaatataaaacgatttctggcaaaggcgactcggtccgcactagcctgaggtaa

SEQ ID NO: 2647 - DNA, 228 bp, synthetic construct
  misc_feature 1..228: note = Synthetic
  source 1..228: mol_type = other DNA
atggctaagagatgcccatcaagaaagagagtttatcgtcgaaaagctcgtaaacctattaaaaggtttcgtcgatatcgtgttaaagcacgttcgacagctaaacgttattacaggcttaagagggctgctaggaattattcgaaagtcaagaagattagaagggctaaaaggcaatataaaacgatttctggcaaaggcgactcggtccgcactagcctgaggtaa

SEQ ID NO: 2648 - DNA, 228 bp, synthetic construct
  misc_feature 1..228: note = Synthetic
  source 1..228: mol_type = other DNA
atggctaagagatgcccatcaagaaagagagtttatcgtcgaaaagctcgtaaacctattaaaaggtttcgtcgatatcgtgttaaggctcgttcaacagctaaacgttattacaggcttaagagggctgctaggaattattcgaaagttaagaagattagaagggctaaaaggcaatataaaacgatttctggcaaaggcgactcggtccgcactagcctgaggtaa

SEQ ID NO: 2649 - DNA, 228 bp, synthetic construct
  source 1..228: mol_type = other DNA
  misc_feature 1..228: note = Synthetic
atggctaagcgatatgcatcaagaaagagagtttatcgtcgaaaaacgcggaaaccttttagaagggttcgtcgatatcgtgttaaggcacgttcgacagctaaacgttattacaggcttaagagggctgctaggaattattcaaaggctaagaagattagaagggctaaaaggcaatacaagactatgtctggtaaaggcgactcggtccgcactagcctgaggtaa

SEQ ID NO: 2650 - DNA, 228 bp, synthetic construct
  source 1..228: mol_type = other DNA
  misc_feature 1..228: note = Synthetic
atggctaagcgatgcccatcaagaaagagagtttatcgtcgaaaagctcgtaaacctattaaaaggtttcgtcgatatcgtgttaaagcacgttcgacagctaaacgttattacaggcttaagagggctgctaggaattattcgaaagtcaagaagattagaagggctaaaaggcaatataaaacgatttctggcaaaggcgactcggtccgcactagcctgaggtaa

SEQ ID NO: 2651 - DNA, 228 bp, synthetic construct
  misc_feature 1..228: note = Synthetic
  source 1..228: mol_type = other DNA
atggctaagcgatgcccatcaagaaagagagtttatcgtcgaaaagctcgtaaacctattaaaaggtttcgtcgatatcgtgttaaagcacgttcgacagctaaacgttattacaggcttaagagggctgctaggaattattcgaaagttaagaagattagaagggctaaaaggcaatataaaacgatttctggcaaaggcgactcggtccgcactagcctgaggtaa

SEQ ID NO: 2652 - DNA, 138 bp, synthetic construct
  misc_feature 1..138: note = Synthetic
  source 1..138: mol_type = other DNA
aagcacgttcgacagctaaacgttattacaggcttaagagggctgctaggaattattcgaaagttaagaagattagaagggctaaaaggcaatataaaacgatttctggcaaaggcgactcggtccgcactagcctga

SEQ ID NO: 2653 - DNA, 228 bp, synthetic construct
  source 1..228: mol_type = other DNA
  misc_feature 1..228: note = Synthetic
atggctaagcgatgcccatcaagaaagagagtttatcgtcgaaaagtgcgtaaacctattaaaaggtttcgtcgatatcgtgctaaggctcgttcaactgctaaacgatattttaggcttaagagggctgctaggaattattcaaaagtcaagaagattagaagggctaaaaggcaatataaaacgatttctggcaaaggcgactcggtccgcactagcctgaggtaa

SEQ ID NO: 2654 - DNA, 144 bp, synthetic construct
  source 1..144: mol_type = other DNA
  misc_feature 1..144: note = Synthetic
gtgctaaggctcgttcaactgctaaacgatattttaggcttaagagggctgctaggaattattcaaaagtcaagaagattagaagggctaaaaggcaatataaaacgatttctggcaaaggcgactcggtccgcactagcctga

SEQ ID NO: 2655 - DNA, 228 bp, synthetic construct
  source 1..228: mol_type = other DNA
  misc_feature 1..228: note = Synthetic
atggctaagcgatatgcatcaagaaagagagtttatcgtcgaaaagctcgtaaacctattaaaaggtttcgtcgatatcgtgttaaagcacgttcgacagctaaacgttattacaggcttaagagggctgctaggaattattcgaaagtcaagaagattagaagggctaaaaggcaatataaaacgatttctggcaaaggcgactcggtccgcactagcctgaggtaa

SEQ ID NO: 2656 - DNA, 228 bp, synthetic construct
  source 1..228: mol_type = other DNA
  misc_feature 1..228: note = Synthetic
atggctaagcgatatgcatcaagaaagagagtttatcgtcgaaaagctcgtaaacctattaaaaggtttcgtcgatatcgtgttaaagcacgttcgacagctaaacgttattacaggcttaagagggctgctaggaattattcgaaagttaagaagattagaagggctaaaaggcaatataaaacgatttctggcaaaggcgactcggtccgcactagcctgaggtaa

SEQ ID NO: 2657 - DNA, 210 bp, synthetic construct
  source 1..210: mol_type = other DNA
  misc_feature 1..210: note = Synthetic
atgcatcaagaaagagagtttatcgtcgaaaagctcgtaaacctattaaaaggtttcgtcgatatcgtgttaaagcacgttcgacagctaaacgttattacaggcttaagagggctgctaggaattattcgaaagttaagaagattagaagggctaaaaggcaatataaaacgatttctggcaaaggcgactcggtccgcactagcctga

SEQ ID NO: 2658 - DNA, 228 bp, synthetic construct
  misc_feature 1..228: note = Synthetic
  source 1..228: mol_type = other DNA
atggctaagcgatatgcatcaagaaagagagtttatcgtcgaaaagtgcgtaaacctattaaaaggtttcgtcgatatcgtgctaaggctcgttcaactgctaaacgatattttaggcttaagagggctgctaggaattattcaaaagtcaagaagattagaagggctaaaaggcaatataaaacgatttctggcaaaggcgactcggtccgcactagcctgaggtaa

SEQ ID NO: 2659 - DNA, 210 bp, synthetic construct
  misc_feature 1..210: note = Synthetic
  source 1..210: mol_type = other DNA
atgcatcaagaaagagagtttatcgtcgaaaagtgcgtaaacctattaaaaggtttcgtcgatatcgtgctaaggctcgttcaactgctaaacgatattttaggcttaagagggctgctaggaattattcaaaagtcaagaagattagaagggctaaaaggcaatataaaacgatttctggcaaaggcgactcggtccgcactagcctga

SEQ ID NO: 2660 - DNA, 228 bp, synthetic construct
  misc_feature 1..228: note = Synthetic
  source 1..228: mol_type = other DNA
atggctaagcgatgcccatcaagaaagagagtttatcgtcgaaaaacgcggaaaccttttagaagggttcgtcgatatcgtgttaaggcacgttcgacagctaaacgttattacaggcttaagagggctgctaggaattattcaaaggctaagaagattagaagggctaaaaggcaatataagacaatgtctggcaaaggcgactcggtccgcactagcctgaggtaa

SEQ ID NO: 2661 - DNA, 228 bp, synthetic construct
  misc_feature 1..228: note = Synthetic
  source 1..228: mol_type = other DNA
atggctaagcgatgcccatcaagaaagagagtttatcgtcgaaaaacgcgtaaacctattaaaaggtttcgtcgatatcgtgttaaagcacgttcgacagctaaacgttattacaggcttaagagggctgctaggaattattcgaaagtcaagaagattagaagggctaaaaggcaatataaaacgatttctggcaaaggcgactcggtccgcactagcctgaggtaa

SEQ ID NO: 2662 - DNA, 228 bp, synthetic construct
  source 1..228: mol_type = other DNA
  misc_feature 1..228: note = Synthetic
atggctaagcgatgcccatcaagaaagagagtttatcgtcgaaaagctcgtaaacctattaaaaggtttcgtcgatatcgtgctaaggctcgttcaactgctaaacgatattttaggcttaagagggctgctaggaattattcaaaagtcaagaagattagaagggctaaaaggcaatataaaacgatttctggcaaaggcgactcggtccgcactagcctgaggtaa

SEQ ID NO: 2663 - DNA, 27 bp, synthetic construct
  source 1..27: mol_type = other DNA
  misc_feature 1..27: note = Synthetic
atgtcaatgacactatttctgatgtaa

SEQ ID NO: 2664 - DNA, 228 bp, synthetic construct
  source 1..228: mol_type = other DNA
  misc_feature 1..228: note = Synthetic
atgtcatccatgatactgactcagtttggaccgttcattgagagcatctcaggtattactgaccaatcaaatgatgtgtttgaaaatgcagcgaaagcattctccatgtttactcgtagcgatgtctacaaagcgttggatgaaatacctttctctgaggatgcgatgcttcccatccctccaactatatataccaaacccgactcggtccgcactagcctgaggtaa

SEQ ID NO: 2665 - DNA, 102 bp, synthetic construct
  misc_feature 1..102: note = Synthetic
  source 1..102: mol_type = other DNA
atgtctacaaagcgttggatgaaatacctttctctgaggatgcgatgcttcccatccctccaactatatataccaaacccgactcggtccgcactagcctga

SEQ ID NO: 2666 - DNA, 228 bp, synthetic construct
  source 1..228: mol_type = other DNA
  misc_feature 1..228: note = Synthetic
atgtccgtacaccggcccttcccgacacggagtttgagattccaagcaggagagaagatcatggtgtggctgtggctcggcgtcgggctcctcggcggtaccggactggcttccctggtcctggccatttccttatttacccagcgccgaggccgcaagcgatccgacgagacttcgtcgcgaggccggctcccgggtgccgactcggtccgcactagcctgaggtaa

SEQ ID NO: 2667 - DNA, 228 bp, synthetic construct
  source 1..228: mol_type = other DNA
  misc_feature 1..228: note = Synthetic
atggctgatcctgcagcagcaacgaagtatcctctcctgaaattattaggcagcacttggccaaccaccccgccgcgacccataccaaagccgtcgccttgggcaccgaagaaacacagacgactatccagcgaccaagatcagagccagacaccggaaacccctgccacaccactaagttgttgcacagagactcagtgcgactcggtccgcactagcctgaggtaa

SEQ ID NO: 2668 - DNA, 120 bp, synthetic construct
  misc_feature 1..120: note = Synthetic
  source 1..120: mol_type = other DNA
ttgggcaccgaagaaacacagacgactatccagcgaccaagatcagagccagacaccggaaacccctgccacaccactaagttgttgcacagagactcagtgcgactcggtccgcactag

SEQ ID NO: 2669 - DNA, 39 bp, synthetic construct
  source 1..39: mol_type = other DNA
  misc_feature 1..39: note = Synthetic
atcagagccagacaccggaaacccctgccacaccactaa

SEQ ID NO: 2670 - DNA, 36 bp, synthetic construct
  source 1..36: mol_type = other DNA
  misc_feature 1..36: note = Synthetic
acgaaaatgacagtgatacaggtgaagatttggtag

SEQ ID NO: 2671 - DNA, 147 bp, synthetic construct
  misc_feature 1..147: note = Synthetic
  source 1..147: mol_type = other DNA
atggatcctgtgtacgtggacatagacgctgacagcgcctttttgaaggccctgcaacgtgcgtaccccatgtttgaggtggaacctaggcaggtcacaccgaatgaccatgctaatgctagagcgactcggtccgcactagcctga

SEQ ID NO: 2672 - DNA, 228 bp, synthetic construct
  source 1..228: mol_type = other DNA
  misc_feature 1..228: note = Synthetic
atggctggcaaagccatttcaaaaggtaaggggggtggcccccctgggaagagacccaaagtggccataagaaagacggggcagtcggcgggactcatgccaagagttctgctgctgtcccgcatcatgggtgtgttgtggcacttgttgtcgaacacacccagaccgcccattctaagggctttttggcgcacagttcccgactcggtccgcactagcctgaggtaa

SEQ ID NO: 2673 - DNA, 228 bp, synthetic construct
  source 1..228: mol_type = other DNA
  misc_feature 1..228: note = Synthetic
atggcttacgcacgctaccggcgacgccggccctaccggacgaatcggaagaggacctcatacaggcggaatacgaggcgtacacgaaatgcgccttttcgacgacgatcctatcggaggccggccaatcgattcaaaaagcgggtgcttgcaatctcttctaagaagaagtttgacactatgcggtcgggatcagccaacgactcggtccgcactagcctgaggtaa

SEQ ID NO: 2674 - DNA, 180 bp, synthetic construct
  misc_feature 1..180: note = Synthetic
  source 1..180: mol_type = other DNA
atcggaagaggacctcatacaggcggaatacgaggcgtacacgaaatgcgccttttcgacgacgatcctatcggaggccggccaatcgattcaaaaagcgggtgcttgcaatctcttctaagaagaagtttgacactatgcggtcgggatcagccaacgactcggtccgcactagcctga

SEQ ID NO: 2675 - DNA, 228 bp, synthetic construct
  source 1..228: mol_type = other DNA
  misc_feature 1..228: note = Synthetic
atggctaagcgatatgcatcaagaaagagagtttatcgtcgaaaaacgcggaaaccttttagaagggttcgtcgatatcgtgttaaggcacgttcgacagctaaacgttattacaggcttaagagggctgctaggaattattcaaaggctaagaagattagaagggctaaaaggcaatataagacaatgtctggcaaaggcgactcggtccgcactagcctgaggtaa

SEQ ID NO: 2676 - DNA, 210 bp, synthetic construct
  misc_feature 1..210: note = Synthetic
  source 1..210: mol_type = other DNA
atgcatcaagaaagagagtttatcgtcgaaaaacgcggaaaccttttagaagggttcgtcgatatcgtgttaaggcacgttcgacagctaaacgttattacaggcttaagagggctgctaggaattattcaaaggctaagaagattagaagggctaaaaggcaatataagacaatgtctggcaaaggcgactcggtccgcactagcctga

SEQ ID NO: 2677 - DNA, 228 bp, synthetic construct
  source 1..228: mol_type = other DNA
  misc_feature 1..228: note = Synthetic
atggctaagcgatatgcatcaagaaagagagtttatcgtcgaaaaacgcggaaaccttttagaagggttcgtcgatatcgtgttaaggcacgttcgacagctaaacgttattataggcttaagagggctgctaggaattattcgaaagtcaagaagattagaagggctaaaaggcaatataagacaatgtctggcaaaggcgactcggtccgcactagcctgaggtaa

SEQ ID NO: 2678 - DNA, 228 bp, synthetic construct
  source 1..228: mol_type = other DNA
  misc_feature 1..228: note = Synthetic
atggctaagcgatatgcatcaagaaagagagtttatcgtcgaaaaacgcgtaaacctattaaaaggtttcgtcgatatcgtgttaaagcacgttcgacagctaaacgttattacaggcttaagagggctgctaggaattattcgaaagtcaagaagattagaagggctaaaaggcaatataaaacgatttctggcaaaggcgactcggtccgcactagcctgaggtaa

SEQ ID NO: 2679 - DNA, 228 bp, synthetic construct
  source 1..228: mol_type = other DNA
  misc_feature 1..228: note = Synthetic
atggctaagcgatatgcatcaagaaagagagtttatcgtcgaaaagctcgtaaacctattaaaaggtttcgtcgatatcgtgctaaggctcgttcaactgctaaacgatattttaggcttaagagggctgctaggaattattcaaaagtcaagaagattagaagggctaaaaggcaatataaaacgatttctggcaaaggcgactcggtccgcactagcctgaggtaa

SEQ ID NO: 2680 - DNA, 210 bp, synthetic construct
  misc_feature 1..210: note = Synthetic
  source 1..210: mol_type = other DNA
atgcatcaagaaagagagtttatcgtcgaaaagctcgtaaacctattaaaaggtttcgtcgatatcgtgctaaggctcgttcaactgctaaacgatattttaggcttaagagggctgctaggaattattcaaaagtcaagaagattagaagggctaaaaggcaatataaaacgatttctggcaaaggcgactcggtccgcactagcctga

SEQ ID NO: 2681 - DNA, 24 bp, synthetic construct
  source 1..24: mol_type = other DNA
  misc_feature 1..24: note = Synthetic
atgtttattccgtatcgcgggtag

SEQ ID NO: 2682 - DNA, 36 bp, synthetic construct
  misc_feature 1..36: note = Synthetic
  source 1..36: mol_type = other DNA
atggaaaagacttccaaacgactcggtccgcactag

SEQ ID NO: 2683 - DNA, 168 bp, synthetic construct
  source 1..168: mol_type = other DNA
  misc_feature 1..168: note = Synthetic
atgacgtcccggctctccgatcccaactcctcagcgcgatccgacatgtccgtgccgctttatcccacggcctcgccagtttcggtcgaagcctactactcggaaagcgaagacgaggcggccaacgacttcctcgtacgcgactcggtccgcactagcctgaggtaa

SEQ ID NO: 2684 - DNA, 165 bp, synthetic construct
  source 1..165: mol_type = other DNA
  misc_feature 1..165: note = Synthetic
acgtcccggctctccgatcccaactcctcagcgcgatccgacatgtccgtgccgctttatcccacggcctcgccagtttcggtcgaagcctactactcggaaagcgaagacgaggcggccaacgacttcctcgtacgcgactcggtccgcactagcctgaggtaa

SEQ ID NO: 2685 - DNA, 126 bp, synthetic construct
  source 1..126: mol_type = other DNA
  misc_feature 1..126: note = Synthetic
atgggcggcgcaagagagaagcccaaaccaattacctacccaaaatggagaaagttcacgttgacatcgaggaagacagcccattcctcagagctttacaacggagcttcccgcagtttgaggtag

SEQ ID NO: 2686 - DNA, 126 bp, synthetic construct
  misc_feature 1..126: note = Synthetic
  source 1..126: mol_type = other DNA
atgggcggcgcaagagagaagcccaaaccaattacctacccaaagccgagaaagttcacgttgacatcgaggaagacagcccattcctcagagctttacaacggagcttcccgcagtttgaggtag

SEQ ID NO: 2687 - DNA, 228 bp, synthetic construct
  misc_feature 1..228: note = Synthetic
  source 1..228: mol_type = other DNA
atggggaacgcttcctctatcgttcagacgatcaacgtcaccggagatggcaatgtgttcaaaccatcagctgagacttcatccaccgccgtaccgtcgttaagtctatcacctggaatgctgaatcctggaggtgtgccatggatcgcgattggggatgagacatctgtgacatcgccaggcgcattacgccgaatgaccgactcggtccgcactagcctgaggtaa

SEQ ID NO: 2688 - DNA, 57 bp, synthetic construct
  misc_feature 1..57: note = Synthetic
  source 1..57: mol_type = other DNA
atggcaatgtgttcaaaccatcagctgagacttcatccaccgccgtaccgtcgttaa

SEQ ID NO: 2689 - DNA, 228 bp, synthetic construct
  misc_feature 1..228: note = Synthetic
  source 1..228: mol_type = other DNA
atggtaggtaaattgaaaaacgcaaaaaataaagggagaacccggctacgccggcctcccaaagggaaagccatgggcatgggactgattctcggaatcatgaactacgcctcccacatcgctcttggcatgaaagtcaacagcaggctaacgagtttctggaaaatgactccacctgggaaattagctaaggggataaccgactcggtccgcactagcctgaggtaa

SEQ ID NO: 2690 - DNA, 168 bp, synthetic construct
  source 1..168: mol_type = other DNA
  misc_feature 1..168: note = Synthetic
atgagcaagatctttgtcaaccctagtgcacttagatccggcttggctgacttggagatggctgaggagacagtggatttggtgaataaaaacatggaggatagtcaagcccaccttcaaggaattcctatagacgtggacgactcggtccgcactagcctgaggtaa

SEQ ID NO: 2691 - DNA, 174 bp, synthetic construct
  source 1..174: mol_type = other DNA
  misc_feature 1..174: note = Synthetic
atcatcgccagcaagatctttgtcaaccctagtgcacttagatccggcttggctgacttggagatggctgaggagacagtggatttggtgaataaaaacatggaggatagtcaagcccaccttcaaggaattcctatagacgtggacgactcggtccgcactagcctgaggtaa

SEQ ID NO: 2692 - DNA, 18 bp, synthetic construct
  source 1..18: mol_type = other DNA
  misc_feature 1..18: note = Synthetic
atgggtacaagcaattaa

SEQ ID NO: 2693 - DNA, 135 bp, synthetic construct
  misc_feature 1..135: note = Synthetic
  source 1..135: mol_type = other DNA
ttggcgtacccgggaatacaagtgggagtgacccttaatataaaacaggcgtgtttatgtacattaaagtatttgtggtttttattgactgggcgtttcgtttgtataacgctgttgttgctagtattttcataa

SEQ ID NO: 2694 - DNA, 90 bp, synthetic construct
  misc_feature 1..90: note = Synthetic
  source 1..90: mol_type = other DNA
atgatcaaactactacatctgaaacatatgataaagaaaaagattgttggacattggataatggtcacgtgttaccacgcaattatataa

SEQ ID NO: 2695 - DNA, 15 bp, synthetic construct
  misc_feature 1..15: note = Synthetic
  source 1..15: mol_type = other DNA
atgcaatcgcgatag

SEQ ID NO: 2696 - DNA, 186 bp, synthetic construct
  source 1..186: mol_type = other DNA
  misc_feature 1..186: note = Synthetic
atctacgcaatcgcgataatggagggatctaaacgcaaacacgacagtcggcgactacaacaagaacaggagcagcttcgtccacgtacaccgccatcatatgaagaaattgcaaaatatggacactcatttaacgtgaaaagatttacgaatgaagacgactcggtccgcactagcctgaggtaa

SEQ ID NO: 2697 - DNA, 186 bp, synthetic construct
  source 1..186: mol_type = other DNA
  misc_feature 1..186: note = Synthetic
atctacgcaatcgcgatagccgagggatctaaacgcaaacacgacagtcggcgactacaacaagaacaggagcagcttcgtccacgtacaccgccatcatatgaagaaattgcaaaatatggacactcatttaacgtgaaaagatttacgaatgaagacgactcggtccgcactagcctgaggtaa

SEQ ID NO: 2698 - DNA, 114 bp, synthetic construct
  misc_feature 1..114: note = Synthetic
  source 1..114: mol_type = other DNA
atggcgcgctttgaggatccaacacggcgaccctacaagctacctgatctgtgcacggaactgaacacttcactgcaagacatagaaataacctgtcgactcggtccgcactag

SEQ ID NO: 2699 - DNA, 51 bp, synthetic construct
  source 1..51: mol_type = other DNA
  misc_feature 1..51: note = Synthetic
atgaagatgttacattccaacaaaaggtattacaagaatataaaaaaatga

SEQ ID NO: 2700 - DNA, 177 bp, synthetic construct
  misc_feature 1..177: note = Synthetic
  source 1..177: mol_type = other DNA
aaggtattacaagaatataaaaaaatgattgaagaaggagatattcattggcaaattatttcttctgaattcgaggaagatgtaaagaaggagttgattaagaatatagttatagaggctatacacacggttactggaccagtggggcacgactcggtccgcactagcctgaggtaa

SEQ ID NO: 2701 - DNA, 141 bp, synthetic construct
  misc_feature 1..141: note = Synthetic
  source 1..141: mol_type = other DNA
atacggtttagacaaattaggccgggtcaactcgcaattgcctgcgcaccgctgtttcgaacacaagcgctaataatgacgcagcaatcagggaggggtacgggaaggtgttctagcgacccatcgttcggagcggagtag

SEQ ID NO: 2702 - DNA, 51 bp, synthetic construct
  source 1..51: mol_type = other DNA
  misc_feature 1..51: note = Synthetic
atggccgcttgtatcaaatggttcatacttgaacgagacccacttttctga

SEQ ID NO: 2703 - DNA, 84 bp, synthetic construct
  source 1..84: mol_type = other DNA
  misc_feature 1..84: note = Synthetic
atgatcactgagatgttacagaaggagtatatggagaggcaggggaagacaccattgggtctagttcgactcggtccgcactag

SEQ ID NO: 2704 - DNA, 120 bp, synthetic construct
  source 1..120: mol_type = other DNA
  misc_feature 1..120: note = Synthetic
atggtgcgtcgccgtctgtccccttcagctaccctcttacccaacgcaagaattccacagggttatttcaacaacctcactgtctcgtacgtgccagggtgtggggaatatgccagttaa

SEQ ID NO: 2705 - DNA, 30 bp, synthetic construct
  source 1..30: mol_type = other DNA
  misc_feature 1..30: note = Synthetic
atgttcaaatacctctgtacaaaatggtga

SEQ ID NO: 2706 - DNA, 81 bp, synthetic construct
  misc_feature 1..81: note = Synthetic
  source 1..81: mol_type = other DNA
atggtgactgccccccgttggaacttattaccagtgttatacaggatggggacatggttgatacaggctttggtgctatga

SEQ ID NO: 2707 - DNA, 228 bp, synthetic construct
  misc_feature 1..228: note = Synthetic
  source 1..228: mol_type = other DNA
atggttgatttatttttcaatgatactgcttggtacataggacagattttagttttagttttattttgtcttatttctttaatctttgttgttgcttttttagcaactattaagctttgtatgcaactttgtggtttttgtaatttctttattatttcaccttcggcttacgtttataaaagaggtatgcagttgtataacgactcggtccgcactagcctgaggtaa

SEQ ID NO: 2708 - DNA, 45 bp, synthetic construct
  source 1..45: mol_type = other DNA
  misc_feature 1..45: note = Synthetic
atgttggcggaaatgagcagttctgtttttgagtttgttttctaa

SEQ ID NO: 2709 - DNA, 168 bp, synthetic construct
  misc_feature 1..168: note = Synthetic
  source 1..168: mol_type = other DNA
atggatctgcaaagacatccgattccgtttgcgtggctagatcgagacaaagttgagcgtcttacagattttctcagcaatttggaaagactggataatgtagatttgcgagagcatccccatgtgactaattcttgtgtcgactcggtccgcactagcctgaggtaa

SEQ ID NO: 2710 - DNA, 24 bp, synthetic construct
  misc_feature 1..24: note = Synthetic
  source 1..24: mol_type = other DNA
atccgattccgtttgcgtggctag

SEQ ID NO: 2711 - DNA, 42 bp, synthetic construct
  misc_feature 1..42: note = Synthetic
  source 1..42: mol_type = other DNA
atgccgatctgcaaagacatccgattccgtttgcgtggctag

SEQ ID NO: 2712 - DNA, 168 bp, synthetic construct
  misc_feature 1..168: note = Synthetic
  source 1..168: mol_type = other DNA
atggatttgaaagcgcagtcgatcccgtttgcgtggctagatcgagacaaagttcagcgtcttacaaattttcttagcaatttggaaaatctggagaatgtagatttacgagaacatccctatgtgactaattcttgtgtcgactcggtccgcactagcctgaggtaa

SEQ ID NO: 2713 - DNA, 33 bp, synthetic construct
  source 1..33: mol_type = other DNA
  misc_feature 1..33: note = Synthetic
atgttgttatcgactcggtccgcactagcctga

SEQ ID NO: 2714 - DNA, 24 bp, synthetic construct
  misc_feature 1..24: note = Synthetic
  source 1..24: mol_type = other DNA
atgtcaaacgtcagcaagagttga

SEQ ID NO: 2715 - DNA, 93 bp, synthetic construct
  source 1..93: mol_type = other DNA
  misc_feature 1..93: note = Synthetic
atgaacaaacaccccatgggacagatctaccgtgtcgtgagggaggctctggatgctgaaagtgacagctcctcaagctcagatagtgattag

SEQ ID NO: 2716 - DNA, 27 bp, synthetic construct
  misc_feature 1..27: note = Synthetic
  source 1..27: mol_type = other DNA
atgtcaacgacacaatttctgatgtaa

SEQ ID NO: 2717 - DNA, 27 bp, synthetic construct
  source 1..27: mol_type = other DNA
  misc_feature 1..27: note = Synthetic
atgtcaatgacacaatttctgatgtaa

SEQ ID NO: 2718 - DNA, 114 bp, synthetic construct
  misc_feature 1..114: note = Synthetic
  source 1..114: mol_type = other DNA
ataccagagaacctcctgctgtacaagaaaaacagtttgaattacaagatgcagaaactgatgaaaacgaatcaaaaattccctcagctactgtggcaatcgtggtgggagtga

SEQ ID NO: 2719 - DNA, 180 bp, synthetic construct
  misc_feature 1..180: note = Synthetic
  source 1..180: mol_type = other DNA
aggacacaagcaatggagccggacatcaagagtatttcaagtgagtcaatggaaggagtatctgatttcagccctagttcttgggagcatggtgggtatcttgataaggttgaaccagaaattgatgaaaatggcagtatgattccaaaatacgactcggtccgcactagcctgaggtaa

SEQ ID NO: 2720 - DNA, 180 bp, synthetic construct
  source 1..180: mol_type = other DNA
  misc_feature 1..180: note = Synthetic
aggacacaagcagccgagccggacatcaagagtatttcaagtgagtcaatggaaggagtatctgatttcagccctagttcttgggagcatggtgggtatcttgataaggttgaaccagaaattgatgaaaatggcagtatgattccaaaatacgactcggtccgcactagcctgaggtaa

SEQ ID NO: 2721 - DNA, 15 bp, synthetic construct
  misc_feature 1..15: note = Synthetic
  source 1..15: mol_type = other DNA
atgcaatcgcgataa

SEQ ID NO: 2722 - DNA, 168 bp, synthetic construct
  source 1..168: mol_type = other DNA
  misc_feature 1..168: note = Synthetic
atggagggatctaaacgcaaacacgaaagtcggagaccacaacaagaacaggaacagcaccgtccacgtacaccgccatcctatgaagaaattgcaaaatatggacactcatttaacgtgaaaagatttacgaatgaagacgactcggtccgcactagcctgaggtaa

SEQ ID NO: 2723 - DNA, 33 bp, synthetic construct
  misc_feature 1..33: note = Synthetic
  source 1..33: mol_type = other DNA
atgaaaacaaactatagagttgtaaatggatga

SEQ ID NO: 2724 - DNA, 168 bp, synthetic construct
  misc_feature 1..168: note = Synthetic
  source 1..168: mol_type = other DNA
atggatgaaattgtaaaaaatatccgggaggggacgcatgtccttcttccattttatgaaacattgccagaacttaatctgtctctaggtaaaagcccattacctagtttggaatacggagctaattactttcttcagatcgactcggtccgcactagcctgaggtaa

SEQ ID NO: 2725 - DNA, 48 bp, synthetic construct
  source 1..48: mol_type = other DNA
  misc_feature 1..48: note = Synthetic
acggagctaattactttcttcagatcgactcggtccgcactagcctga

SEQ ID NO: 2726 - DNA, 33 bp, synthetic construct
  misc_feature 1..33: note = Synthetic
  source 1..33: mol_type = other DNA
atgaaaacaaactatagagttgtaagccgatga

SEQ ID NO: 2727 - DNA, 15 bp, synthetic construct
  source 1..15: mol_type = other DNA
  misc_feature 1..15: note = Synthetic
attttgttgttttaa

SEQ ID NO: 2728 - DNA, 42 bp, synthetic construct
  misc_feature 1..42: note = Synthetic
  source 1..42: mol_type = other DNA
acgctgcaggtggtggagcagcaggatctgtttctattatga

SEQ ID NO: 2729 - DNA, 168 bp, synthetic construct
  misc_feature 1..168: note = Synthetic
  source 1..168: mol_type = other DNA
atgaaggtttgcctgattatgaaagtggagggggcgctatgggagcttttccacatgtgcggagtggacttacaccaacaatttgtagaaataatccaaggctggaaaaatgagaattacctggggatggtgcaggaatgcgactcggtccgcactagcctgaggtaa

SEQ ID NO: 2730 - DNA, 54 bp, synthetic construct
  source 1..54: mol_type = other DNA
  misc_feature 1..54: note = Synthetic
acgctgcaggtggtggagcagcaggatctgtttctattgccaaggtttgcctga

SEQ ID NO: 2731 - DNA, 153 bp, synthetic construct
  misc_feature 1..153: note = Synthetic
  source 1..153: mol_type = other DNA
attatgaaagtggagggggcgctatgggagcttttccacatgtgcggagtggacttacaccaacaatttgtagaaataatccaaggctggaaaaatgagaattacctggggatggtgcaggaatgcgactcggtccgcactagcctgaggtaa

SEQ ID NO: 2732 - DNA, 219 bp, synthetic construct
  source 1..219: mol_type = other DNA
  misc_feature 1..219: note = Synthetic
ttggatgctctacatgtcgtgaactacaacggattgttgagcagtattgaaattggaactcaaaatcatacaatcatcataactcgaactaacatgggttttctggtggagctccaagaacccgacaaatcggcaatgaaccgcatgaagcctgggccggcgaaattttccctccttcatgagtccacactcgactcggtccgcactagcctgaggtaa

SEQ ID NO: 2733 - DNA, 219 bp, synthetic construct
  misc_feature 1..219: note = Synthetic
  source 1..219: mol_type = other DNA
ttggatgctctacgcctcgtgaactacaacggattgttgagcagtattgaaattggaactcaaaatcatacaatcatcataactcgaactaacatgggttttctggtggagctccaagaacccgacaaatcggcaatgaaccgcatgaagcctgggccggcgaaattttccctccttcatgagtccacactcgactcggtccgcactagcctgaggtaa

SEQ ID NO: 2734 - DNA, 18 bp, synthetic construct
  misc_feature 1..18: note = Synthetic
  source 1..18: mol_type = other DNA
atgggagataataactaa

SEQ ID NO: 2735 - DNA, 51 bp, synthetic construct
  source 1..51: mol_type = other DNA
  misc_feature 1..51: note = Synthetic
atgtccttcttccattttatgaaacattgccagaacttaacttgtctttag

SEQ ID NO: 2736 - DNA, 51 bp, synthetic construct
  misc_feature 1..51: note = Synthetic
  source 1..51: mol_type = other DNA
ttggccttccccacgccgtgcagcataggctctatattgttccgtccgtaa

SEQ ID NO: 2737 - DNA, 78 bp, synthetic construct
  misc_feature 1..78: note = Synthetic
  source 1..78: mol_type = other DNA
atggtgatcagtcaaccaccagggaataatccttcatattattatcgtgcttcaccaacgctgcctcaattgctctga

SEQ ID NO: 2738 - DNA, 171 bp, synthetic construct
  source 1..171: mol_type = other DNA
  misc_feature 1..171: note = Synthetic
aagacctgcgagtatcgcaaaaggatggtttacgcggggctccgtgcggatatgtgtgtgcacttcctcactcccaggtcaattgtcaattttctttttccattaagtgcagtcacgacagtccatttcactcggatgacgagcgactcggtccgcactagcctgaggtaa

SEQ ID NO: 2739 - DNA, 39 bp, synthetic construct
  misc_feature 1..39: note = Synthetic
  source 1..39: mol_type = other DNA
atgtcgacgctagatagacagtctccgaatgcggcatga

SEQ ID NO: 2740 - DNA, 42 bp, synthetic construct
  source 1..42: mol_type = other DNA
  misc_feature 1..42: note = Synthetic
atgttcaagctcctaattacactcaacatacttcatctatga

SEQ ID NO: 2741 - DNA, 54 bp, synthetic construct
  misc_feature 1..54: note = Synthetic
  source 1..54: mol_type = other DNA
atggataaattactcaaagaaaaaagaatgcaacctcgactcggtccgcactag

SEQ ID NO: 2742 - DNA, 27 bp, synthetic construct
  source 1..27: mol_type = other DNA
  misc_feature 1..27: note = Synthetic
attacgactcggtccgcactagcctga

SEQ ID NO: 2743 - DNA, 168 bp, synthetic construct
  source 1..168: mol_type = other DNA
  misc_feature 1..168: note = Synthetic
atggatgaaattgtaaaaaatatccgggagggaacgcatgtccttcttccattttatgaaacattgccagaacttaatctgtctctaggtaaaagcccattacctagtctggaatacggagctaattactttcttcagatcgactcggtccgcactagcctgaggtaa

SEQ ID NO: 2744 - DNA, 168 bp, synthetic construct
  misc_feature 1..168: note = Synthetic
  source 1..168: mol_type = other DNA
atggatgaaattgtaaaaaatatccgggaggggacgcatgtccttcttccattttatgaaacattgccagaacttaacttgtctttaggtaaaagcccattacctagtctggaatacggagctaattactttcttcagatcgactcggtccgcactagcctgaggtaa

SEQ ID NO: 2745 - DNA, 42 bp, synthetic construct
  misc_feature 1..42: note = Synthetic
  source 1..42: mol_type = other DNA
atttctacaatagcgaacacgactcggtccgcactagcctga

SEQ ID NO: 2746 - DNA, 30 bp, synthetic construct
  misc_feature 1..30: note = Synthetic
  source 1..30: mol_type = other DNA
ctgattccccgcatgccctgcacatcctga

SEQ ID NO: 2747 - DNA, 42 bp, synthetic construct
  misc_feature 1..42: note = Synthetic
  source 1..42: mol_type = other DNA
atgaaccagaagaacaaaaagatcatctctctcggtgtatag

SEQ ID NO: 2748 - DNA, 168 bp, synthetic construct
  source 1..168: mol_type = other DNA
  misc_feature 1..168: note = Synthetic
atgaacagaattaaggttatgataattagttctttattattatcagatattacgattgcacaaataggttgggataatttgacttcgattggagttataagtactaagcaatacgactataaaataactactctgaacaccgactcggtccgcactagcctgaggtaa

SEQ ID NO: 2749 - DNA, 117 bp, synthetic construct
  misc_feature 1..117: note = Synthetic
  source 1..117: mol_type = other DNA
acgattgcacaaataggttgggataatttgacttcgattggagttataagtactaagcaatacgactataaaataactactctgaacaccgactcggtccgcactagcctgaggtaa

SEQ ID NO: 2750 - DNA, 141 bp, synthetic construct
  source 1..141: mol_type = other DNA
  misc_feature 1..141: note = Synthetic
atgcagttattgaccacatggttgcctgaattctttatgctggagactatgcattggagtgctcgtttgtttgtgtttgttgccaatatgcttccagcttttacgttactgcgcgactcggtccgcactagcctgaggtaa

SEQ ID NO: 2751 - DNA, 18 bp, synthetic construct
  source 1..18: mol_type = other DNA
  misc_feature 1..18: note = Synthetic
atggggaaaaagacgtag

SEQ ID NO: 2752 - DNA, 42 bp, synthetic construct
  source 1..42: mol_type = other DNA
  misc_feature 1..42: note = Synthetic
ctgagccggctccgccgtccgactcggtccgcactagcctga

SEQ ID NO: 2753 - DNA, 27 bp, synthetic construct
  source 1..27: mol_type = other DNA
  misc_feature 1..27: note = Synthetic
ctgctcactctgaccctgaattcataa

SEQ ID NO: 2754 - DNA, 54 bp, synthetic construct
  source 1..54: mol_type = other DNA
  misc_feature 1..54: note = Synthetic
attaagttgacaacagagatactaatccaatatttggatcaagaatcaaaatag

SEQ ID NO: 2755 - DNA, 57 bp, synthetic construct
  source 1..57: mol_type = other DNA
  misc_feature 1..57: note = Synthetic
atcaaaatagtgaaacgactgactatccctccttcgactcggtccgcactagcctga

SEQ ID NO: 2756 - DNA, 57 bp, synthetic construct
  source 1..57: mol_type = other DNA
  misc_feature 1..57: note = Synthetic
atgctaacgagtgctagcggactccgccctcaacaccatacgcctagtcaaatttag

SEQ ID NO: 2757 - DNA, 21 bp, synthetic construct
  source 1..21: mol_type = other DNA
  misc_feature 1..21: note = Synthetic
ataggtgtagttttgcagtga

SEQ ID NO: 2758 - DNA, 45 bp, synthetic construct
  source 1..45: mol_type = other DNA
  misc_feature 1..45: note = Synthetic
atgagtcttacgagatgggtgacgactcggtccgcactagcctga

SEQ ID NO: 2759 - DNA, 168 bp, synthetic construct
  source 1..168: mol_type = other DNA
  misc_feature 1..168: note = Synthetic
atgtctaatatgacgcaactcactgaggcgcagattattgccattattaaagactggaactttgcatggtccctgatctttctcttaattactatcgtactacagtatggatacccatcccgtagtatgactgtctatgtcgactcggtccgcactagcctgaggtaa

SEQ ID NO: 2760 - DNA, 171 bp, synthetic construct
  misc_feature 1..171: note = Synthetic
  source 1..171: mol_type = other DNA
atagcctctaatatgacgcaactcactgaggcgcagattattgccattattaaagactggaactttgcatggtccctgatctttctcttaattactatcgtactacagtatggatacccatcccgtagtatgactgtctatgtcgactcggtccgcactagcctgaggtaa

SEQ ID NO: 2761 - DNA, 132 bp, synthetic construct
  misc_feature 1..132: note = Synthetic
  source 1..132: mol_type = other DNA
atgataatcagatcattcgccgatagtggtaacgctatcgaaacgacatcgccagaaattacaaacgctacaacagatattccagctatcagattatgcggtcccgactcggtccgcactagcctgaggtaa

SEQ ID NO: 2762 - DNA, 162 bp, synthetic construct
  source 1..162: mol_type = other DNA
  misc_feature 1..162: note = Synthetic
atgaaatatctgatgttgttgttcgctgctatgataatcagatcattcgccgatagtggtaacgctatcgaaacgacatcgccagaaattacaaacgctacaacagatattccagctatcagattatgcggtcccgactcggtccgcactagcctgaggtaa

SEQ ID NO: 2763 - DNA, 168 bp, synthetic construct
  misc_feature 1..168: note = Synthetic
  source 1..168: mol_type = other DNA
atgagctttgaaataagtgtagaggaaattgaagagctcattgagactggcaatctcaacatagaccatgcactaaaagaattaggtgcaaccagtcaatcatcactaaacaaacctccatcccaaagtagcagaacagacgactcggtccgcactagcctgaggtaa

SEQ ID NO: 2764 - DNA, 57 bp, synthetic construct
  misc_feature 1..57: note = Synthetic
  source 1..57: mol_type = other DNA
atgtacgatacagagaatcaatccgaaagtctgacgattcgagcgaagctccgctaa

SEQ ID NO: 2765 - DNA, 45 bp, synthetic construct
  misc_feature 1..45: note = Synthetic
  source 1..45: mol_type = other DNA
ctgacgatgcgaaaagatatggtacaactggagaatgggaagtaa

SEQ ID NO: 2766 - DNA, 57 bp, synthetic construct
  misc_feature 1..57: note = Synthetic
  source 1..57: mol_type = other DNA
attatgtgcacgatggtgtacgtgttaactatgtggactttggaacagagtccttga

SEQ ID NO: 2767 - DNA, 90 bp, synthetic construct
  misc_feature 1..90: note = Synthetic
  source 1..90: mol_type = other DNA
acgacattgtcagaaattacaaacactacaacagatattccagctatcagattatgcggtcccgactcggtccgcactagcctgaggtaa

SEQ ID NO: 2768 - DNA, 168 bp, synthetic construct
  misc_feature 1..168: note = Synthetic
  source 1..168: mol_type = other DNA
atggggaacccccagacgaccatcgcgtacagcctacatcaccccagggcgtcgctaacgagcgcgctgccggacgcggcacaggtggtgcacgtgtttgagtcagggacgcgcgcggttctgacgcggggtcgagcgcgcgactcggtccgcactagcctgaggtaa

SEQ ID NO: 2769 - DNA, 153 bp, synthetic construct
  source 1..153: mol_type = other DNA
  misc_feature 1..153: note = Synthetic
acgaccatcgcgtacagcctacatcaccccagggcgtcgctaacgagcgcgctgccggacgcggcacaggtggtgcacgtgtttgagtcagggacgcgcgcggttctgacgcggggtcgagcgcgcgactcggtccgcactagcctgaggtaa

SEQ ID NO: 2770 - DNA, 168 bp, synthetic construct
  misc_feature 1..168: note = Synthetic
  source 1..168: mol_type = other DNA
atggcgtcggcggaaatgcgcgagcggttggaggcgcctctgcccgaccgggcggtgcccatctacgtggccgggtttttggccctgtacgacagcggggacccgggcgagctggccctggacccagacacggtgcgtgccgactcggtccgcactagcctgaggtaa

SEQ ID NO: 2771 - DNA, 153 bp, synthetic construct
  source 1..153: mol_type = other DNA
  misc_feature 1..153: note = Synthetic
atgcgcgagcggttggaggcgcctctgcccgaccgggcggtgcccatctacgtggccgggtttttggccctgtacgacagcggggacccgggcgagctggccctggacccagacacggtgcgtgccgactcggtccgcactagcctgaggtaa

SEQ ID NO: 2772 - DNA, 45 bp, synthetic construct
  source 1..45: mol_type = other DNA
  misc_feature 1..45: note = Synthetic
atcccacttatctacccaaagtcgactcggtccgcactagcctga

SEQ ID NO: 2773 - DNA, 72 bp, synthetic construct
  source 1..72: mol_type = other DNA
  misc_feature 1..72: note = Synthetic
atggtaatggaaacggaggaaacggttgtacatccagctgtgaattcgaaagaaaaagaatcgccgtcctag

SEQ ID NO: 2774 - DNA, 78 bp, synthetic construct
  source 1..78: mol_type = other DNA
  misc_feature 1..78: note = Synthetic
aggtcgaaaaggagttggaaagatatttcgacgacggtagactcgaggaatgtaaagcctatggggatgaaatgttga

SEQ ID NO: 2775 - DNA, 60 bp, synthetic construct
  misc_feature 1..60: note = Synthetic
  source 1..60: mol_type = other DNA
ttgagggccacaacaatgaccaatgaagaaaaattgattgctcgactcggtccgcactag

SEQ ID NO: 2776 - DNA, 45 bp, synthetic construct
  source 1..45: mol_type = other DNA
  misc_feature 1..45: note = Synthetic
atgaccaatgaagaaaaattgattgctcgactcggtccgcactag

SEQ ID NO: 2777 - DNA, 219 bp, synthetic construct
  misc_feature 1..219: note = Synthetic
  source 1..219: mol_type = other DNA
atggccacgggtgtcatgaaacccgccacccttgacctgccttcaccacccgtgcccgctccaccaaaggcagctccggtcgtgcaggcccccccggtggcaaccgccgtgcgccgcgtccccgcccgccgccaggcccagaactggcagagcacgctgcacagtatcgtgggcctgggagtgaaaagtctcgactcggtccgcactagcctgaggtaa

SEQ ID NO: 2778 - DNA, 177 bp, synthetic construct
  source 1..177: mol_type = other DNA
  misc_feature 1..177: note = Synthetic
aagtcaaagaggtcacgcagaatgacggtacgacgacgattgccaataaccttaccagcacggttcaggtgtttactgactcggagtaccagctcccgtacgtcctcggctcggcgcatcaaggatgcctcccgccgttcccagcagacgtcttcatggcgactcggtccgcactag

SEQ ID NO: 2779 - DNA, 171 bp, synthetic construct
  source 1..171: mol_type = other DNA
  misc_feature 1..171: note = Synthetic
aagaggtcacgcagaatgacggtacgacgacgattgccaataaccttaccagcacggttcaggtgtttactgactcggagtaccagctcccgtacgtcctcggctcggcgcatcaaggatgcctcccgccgttcccagcagacgtcttcatggcgactcggtccgcactag

SEQ ID NO: 2780 - DNA, 45 bp, synthetic construct
  misc_feature 1..45: note = Synthetic
  source 1..45: mol_type = other DNA
acgatggaacggcgacttgtagtgcccggaattatgtgtagttaa

SEQ ID NO: 2781 - DNA, 45 bp, synthetic construct
  source 1..45: mol_type = other DNA
  misc_feature 1..45: note = Synthetic
ttgcccgtccagataaagtccacggcccgactcggtccgcactag

SEQ ID NO: 2782 - DNA, 27 bp, synthetic construct
  source 1..27: mol_type = other DNA
  misc_feature 1..27: note = Synthetic
atgattatttttaacaaaataacataa

SEQ ID NO: 2783 - DNA, 153 bp, synthetic construct
  source 1..153: mol_type = other DNA
  misc_feature 1..153: note = Synthetic
atggataataatgaacctaaagtactagaaatggtatatgatgctacaattttacccgaaggtagtagcatggatccaaatatcatggattgtataaacagacacatcaatatgtgtatacaacgcgactcggtccgcactagcctgaggtaa

SEQ ID NO: 2784 - DNA, 168 bp, synthetic construct
  source 1..168: mol_type = other DNA
  misc_feature 1..168: note = Synthetic
atgaaggtctgcctgattatgaaagtggagggggcactgtgggagcttttccacatgtgcggagtggacttacaccaacaatttgtagagataattcaaggctggaaaaatgagaattacctggggatggtgcaggaatgcgactcggtccgcactagcctgaggtaa

SEQ ID NO: 2785 - DNA, 150 bp, synthetic construct
  misc_feature 1..150: note = Synthetic
  source 1..150: mol_type = other DNA
atgaaagtggagggggcactgtgggagcttttccacatgtgcggagtggacttacaccaacaatttgtagagataattcaaggctggaaaaatgagaattacctggggatggtgcaggaatgcgactcggtccgcactagcctgaggtaa

SEQ ID NO: 2786 - DNA, 75 bp, synthetic construct
  misc_feature 1..75: note = Synthetic
  source 1..75: mol_type = other DNA
ttgaatcttgttgttttgaacacgctgcaggtggtggagcagcaggatctgtttctattgccaaggtctgcctga

SEQ ID NO: 2787 - DNA, 24 bp, synthetic construct
  source 1..24: mol_type = other DNA
  misc_feature 1..24: note = Synthetic
atgaaaatgacagtaaagacatag

SEQ ID NO: 2788 - DNA, 225 bp, synthetic construct
  source 1..225: mol_type = other DNA
  misc_feature 1..225: note = Synthetic
ctgccacgcccattttatcatataagcctgaagcccgtgagctggcctgacgagaccatgaggccagccaagtctacagattctgtgtttgtgaggaccccggtcgaggcgtgggtcgcgccctcgccgccggacgacaaggtggctgagtccagctacctcatgttcagggccatgtacgcggtgttcacccgggacgactcggtccgcactagcctgaggtaa

SEQ ID NO: 2789 - DNA, 63 bp, synthetic construct
  source 1..63: mol_type = other DNA
  misc_feature 1..63: note = Synthetic
atgttcagggccatgtacgcggtgttcacccgggacgactcggtccgcactagcctgaggtaa

SEQ ID NO: 2790 - DNA, 159 bp, synthetic construct
  source 1..159: mol_type = other DNA
  misc_feature 1..159: note = Synthetic
aagagctcaaaacagcaggaggaaaaatatttaaagtactacaaggctatgcgcaggggctatggagcagagggcaccaatggggactatcaacagctgcatgcttcagagccattgctaggggcattatccgactcggtccgcactagcctgaggtaa

SEQ ID NO: 2791 - DNA, 216 bp, synthetic construct
  source 1..216: mol_type = other DNA
  misc_feature 1..216: note = Synthetic
aagggcatccatcaaatttttggagcagctttcaaatcattgtttggaggaatgtcctggttctcacaaattctcattggaacgttgctgatgtggttgggtctgaacacaaagaatggatctatttcccttatgtgcttggccttagggggagtgttgatcttcttatccacagccgtctctgctgatgtggcgactcggtccgcactagcctga

SEQ ID NO: 2792 - DNA, 177 bp, synthetic construct
  misc_feature 1..177: note = Synthetic
  source 1..177: mol_type = other DNA
ttgtttggaggagcctcctggttctcacaaattctcattggaacgttgctgatgtggttgggtctgaacacaaagaatggatctatttcccttatgtgcttggccttagggggagtgttgatcttcttatccacagccgtctctgctgatgtggcgactcggtccgcactagcctga

SEQ ID NO: 2793 - DNA, 93 bp, synthetic construct
  source 1..93: mol_type = other DNA
  misc_feature 1..93: note = Synthetic
atgatccagataatgccaatttgtatacaatgtggacctatgtgtattatatggatgcggatgataagtggcataaggcaagaagtggggtga

SEQ ID NO: 2794 - DNA, 36 bp, synthetic construct
  misc_feature 1..36: note = Synthetic
  source 1..36: mol_type = other DNA
gtggagtggtgcttaggaagcttggacagtttgtag

SEQ ID NO: 2795 - DNA, 228 bp, synthetic construct
  source 1..228: mol_type = other DNA
  misc_feature 1..228: note = Synthetic
attgtattcaacccacagacacatcctctgaccattcaacgggacacaatagtgggcgtggcaatggcttgctatatccaccccggtaaggcagccagccaggcaccatacagcttctacgactgcaaggaagagagctggcacgtggggctcttccagatcaaacgcggaccgggaggggtctgtacaccaccttgccacgactcggtccgcactagcctgaggtaa

SEQ ID NO: 2796 - DNA, 15 bp, synthetic construct
  misc_feature 1..15: note = Synthetic
  source 1..15: mol_type = other DNA
atgttggagcagtaa

SEQ ID NO: 2797 - DNA, 93 bp, synthetic construct
  source 1..93: mol_type = other DNA
  misc_feature 1..93: note = Synthetic
ataattccctcctcaaagattgcctccacaaaaaggattttatttcctttgaggcactcatcgccagattgttgtcgactcggtccgcactag

SEQ ID NO: 2798 - DNA, 93 bp, synthetic construct
  misc_feature 1..93: note = Synthetic
  source 1..93: mol_type = other DNA
ataattccctcctcaaagattgtgtccacaaaaaggattttatttcctttgaggcactcatcgccagagccttgtcgactcggtccgcactag

SEQ ID NO: 2799 - DNA, 93 bp, synthetic construct
  misc_feature 1..93: note = Synthetic
  source 1..93: mol_type = other DNA
ataattccctcctcaaagattgtgtccacaaaaaggattttatttcctttgaggcactcatcgccagattgttgtcgactcggtccgcactag

SEQ ID NO: 2800 - DNA, 63 bp, synthetic construct
  misc_feature 1..63: note = Synthetic
  source 1..63: mol_type = other DNA
ataagtgccaaggatccgttcactaatcgaatggatctgtcgactcggtccgcactagcctga

SEQ ID NO: 2801 - DNA, 186 bp, synthetic construct
  misc_feature 1..186: note = Synthetic
  source 1..186: mol_type = other DNA
ctgaacacaatgaccaaagatgctgagagagggaagctaaaacggagagcaattgcaaccccagggatgcaaataagggggtttgtatactttgttgagacactggcaaggagtatatgtgagaaacttgaacaatcagggttgccagttggaggcaatgagacgactcggtccgcactagcctga

SEQ ID NO: 2802 - DNA, 201 bp, synthetic construct
  source 1..201: mol_type = other DNA
  misc_feature 1..201: note = Synthetic
attagagcattgaccctgaacacaatgaccaaagatgctgagagagggaagctaaaacggagagcaattgcaaccccagggatgcaaataagggggtttgtatactttgttgagacactggcaaggagtatatgtgagaaacttgaacaatcagggttgccagttggaggcagccagacgactcggtccgcactagcctga

SEQ ID NO: 2803 - DNA, 60 bp, synthetic construct
  misc_feature 1..60: note = Synthetic
  source 1..60: mol_type = other DNA
atgaatataactattgccctaccagcgcagacaagaacgactcggtccgcactagcctga

SEQ ID NO: 2804 - DNA, 63 bp, synthetic construct
  source 1..63: mol_type = other DNA
  misc_feature 1..63: note = Synthetic
atgccaacgaggtctccatcctttctcaccaacatagcggatgcgactagagtgcttagttga

SEQ ID NO: 2805 - DNA, 168 bp, synthetic construct
  misc_feature 1..168: note = Synthetic
  source 1..168: mol_type = other DNA
atgggtggcaagagctcaaaacagcaggaggaaaaatatttaaagtactacaaggctatgcgcaggggctatggagcagagggcaccaatggggactatcaacagctgcatgcttcagagccattgctaggggcattatccgactcggtccgcactagcctgaggtaa

SEQ ID NO: 2806 - DNA, 168 bp, synthetic construct
  misc_feature 1..168: note = Synthetic
  source 1..168: mol_type = other DNA
attttgttgttttatacatttgccattagttattgcagagcatttatttactcaattatggaaaccatagatccagtgtatatatctcagttcagttataaagaattatatattcgtagctcgtataaagatatcaatgaagtcatgagtcgactcggtccgcactag

SEQ ID NO: 2807 - DNA, 213 bp, synthetic construct
  source 1..213: mol_type = other DNA
  misc_feature 1..213: note = Synthetic
ttggaacagctcatagaaaatattaactttaacaactctagtataatttcgttgttctatacatttgccattagttattgcagagcattcatttactcaatcatggaaaccatagatcaaatgtatatatctcagttcagttataaagaattgtacattagtagctcgtataaagatattaatgaatccatgagtcgactcggtccgcactag

SEQ ID NO: 2808 - DNA, 213 bp, synthetic construct
  misc_feature 1..213: note = Synthetic
  source 1..213: mol_type = other DNA
ttggaacagctcatagaaaatattaactttaacaactctagtataatttcgttgttctatacatttgccattagttattgccgagcattcatttactcaattatggaaaccatagatccggtgtatatatctcagttcagttataaagaattatacgttagtagctcttataaagatattaatgaatccatgagtcgactcggtccgcactag

SEQ ID NO: 2809 - DNA, 120 bp, synthetic construct
  misc_feature 1..120: note = Synthetic
  source 1..120: mol_type = other DNA
atgaaagcaatgctgatatggaaaaagagatacaacgtcttagagatagaatcatggatcttgatagacagcttaacgagtgtaaacgcaacggtaacggaacatcttctgaggaggtaa

SEQ ID NO: 2810 - DNA, 120 bp, synthetic construct
  source 1..120: mol_type = other DNA
  misc_feature 1..120: note = Synthetic
atgaaagcaatgctgatgccgaaaaagagatacaacgtcttagagatagaatcatggatcttgatagacagcttaacgagtgtaaacgcaacggtaacggaacatcttctgaggaggtaa

SEQ ID NO: 2811 - DNA, 63 bp, synthetic construct
  source 1..63: mol_type = other DNA
  misc_feature 1..63: note = Synthetic
atgggccgggaaggattggaagaccaaggacctccccctcctccccctccaggtctagtctaa

SEQ ID NO: 2812 - DNA, 33 bp, synthetic construct
  source 1..33: mol_type = other DNA
  misc_feature 1..33: note = Synthetic
atgcgcaacgcgactcggtccgcactagcctga

SEQ ID NO: 2813 - DNA, 114 bp, synthetic construct
  source 1..114: mol_type = other DNA
  misc_feature 1..114: note = Synthetic
ttgacgctactcccgactttgaatatttgctcatggcagacggagaatggttccctacggaccttctttgtgtggacttggacgatgacgtcgactcggtccgcactagcctga

SEQ ID NO: 2814 - DNA, 168 bp, synthetic construct
  source 1..168: mol_type = other DNA
  misc_feature 1..168: note = Synthetic
atggcttgcaaacacggatacccagacgtgtgccctatttgcacagccgttgacgctactcccgactttgaatatttgctcatggcagacggagaatggttccctacggaccttctttgtgtggacttggacgatgacgtcgactcggtccgcactagcctgaggtaa

SEQ ID NO: 2815 - DNA, 171 bp, synthetic construct
  misc_feature 1..171: note = Synthetic
  source 1..171: mol_type = other DNA
ttgtcaatgccgcttgcaaacacggatacccagacgtgtgccctatttgcacagccgttgacgctactcccgactttgaatatttgctcatggcagacggagaatggttccctacggaccttctttgtgtggacttggacgatgacgtcgactcggtccgcactagcctga

SEQ ID NO: 2816 - DNA, 168 bp, synthetic construct
  source 1..168: mol_type = other DNA
  misc_feature 1..168: note = Synthetic
atgcattatacaaatatggagatattccctgtattcggcatttctaaaattagcaattttattgctaataatgactgtagatattatatagatgtagagcatcaaaaaattatatctgatgagatcaatagacagatggacgactcggtccgcactagcctgaggtaa

SEQ ID NO: 2817 - DNA, 21 bp, synthetic construct
  misc_feature 1..21: note = Synthetic
  source 1..21: mol_type = other DNA
atgactgtagatattatatag

SEQ ID NO: 2818 - DNA, 75 bp, synthetic construct
  misc_feature 1..75: note = Synthetic
  source 1..75: mol_type = other DNA
atgcggttaggggtggaggttcttttgaggttaggatctttgaacacaggatgcgacaaaggagagtttcggtga

SEQ ID NO: 2819 - DNA, 168 bp, synthetic construct
  source 1..168: mol_type = other DNA
  misc_feature 1..168: note = Synthetic
atgtctaacgacaatgccaaaacagatatagaaattctttatgaacaattatcttcccgagttgaaattgaaatagcttttctccctatgttaccaaaactgtacgatataatgctgccttcattagatgcccgactacacgactcggtccgcactagcctgaggtaa

SEQ ID NO: 2820 - DNA, 18 bp, synthetic construct
  misc_feature 1..18: note = Synthetic
  source 1..18: mol_type = other DNA
atgccaaaacagatatag

SEQ ID NO: 2821 - DNA, 81 bp, synthetic construct
  misc_feature 1..81: note = Synthetic
  source 1..81: mol_type = other DNA
atgttaccaaaactgtacgatataatgctgccttcattagatgcccgactacacgactcggtccgcactagcctgaggtaa

SEQ ID NO: 2822 - DNA, 213 bp, synthetic construct
  misc_feature 1..213: note = Synthetic
  source 1..213: mol_type = other DNA
attacattatctgcagaagtcatggcctatatacacacaatgaatccttctgttttggaggactggaactttggtttatcgcctccaccaaatggtacactggaggatacttatagatatgtacagtcacaggccattacctgtcagaaacccacacctgaaaaagaaaaacaggatccctataaggatacgactcggtccgcactagcctga

SEQ ID NO: 2823 - DNA, 213 bp, synthetic construct
  source 1..213: mol_type = other DNA
  misc_feature 1..213: note = Synthetic
attacattatctgcagaagtcatggcctatatacacacaatgaatccttctgttttggaggactggaactttggtttatcgcctccaccaaatggtacactggaggatacttatagatatgtacagtcacaggccattacctgtcagaaacccacacctgaaaaagaaaaacaggatccctatagccatacgactcggtccgcactagcctga

SEQ ID NO: 2824 - DNA, 228 bp, synthetic construct
  source 1..228: mol_type = other DNA
  misc_feature 1..228: note = Synthetic
attgtgtgtattgtagctgctgtaattattatggcaatcaatgtatttacgaattcacagatatttaatattatttcttacattattttgtttattctgttctttgcatatgtgatgaacatcgaaagacaggactatagaagaagtataaatgtaaccattcctgaacagtatacctgcaacaaaccttatactgcgggcgactcggtccgcactagcctgaggtaa

SEQ ID NO: 2825 - DNA, 198 bp, synthetic construct
  source 1..198: mol_type = other DNA
  misc_feature 1..198: note = Synthetic
atggcaatcaatgtatttacgaattcacagatatttaatattatttcttacattattttgtttattctgttctttgcatttgtgatgaacatcgaaagacaggactataaaagaagtataaatgtacccattcctgaacagtatacctgcaacaaaccttatattgcgggcgactcggtccgcactagcctgaggtaa

SEQ ID NO: 2826 - DNA, 30 bp, synthetic construct
  source 1..30: mol_type = other DNA
  misc_feature 1..30: note = Synthetic
attgtggcagaaatccaagaattgtgctaa

SEQ ID NO: 2827 - DNA, 24 bp, synthetic construct
  source 1..24: mol_type = other DNA
  misc_feature 1..24: note = Synthetic
atttccttgatcacgcctgtgtga

SEQ ID NO: 2828 - DNA, 18 bp, synthetic construct
  misc_feature 1..18: note = Synthetic
  source 1..18: mol_type = other DNA
ttgatcacgcctgtgtga

SEQ ID NO: 2829 - DNA, 168 bp, synthetic construct
  misc_feature 1..168: note = Synthetic
  source 1..168: mol_type = other DNA
atgaaagacagaggaaataaaaacacctctaaaacaagacagaccgtcaaatctcgccgaactagaaaaacaacgaaacagttcgtagaacggaaaaaaaatctatccgctaaaacgactatacgaaataatcgattacacgactcggtccgcactagcctgaggtaa

SEQ ID NO: 2830 - DNA, 18 bp, synthetic construct
  source 1..18: mol_type = other DNA
  misc_feature 1..18: note = Synthetic
atggctgatatgggctga

SEQ ID NO: 2831 - DNA, 60 bp, synthetic construct
  source 1..60: mol_type = other DNA
  misc_feature 1..60: note = Synthetic
atatacgagatgtcaactgatcccaagccgaaccctttcccgttattcctgaattgctag

SEQ ID NO: 2832 - DNA, 27 bp, synthetic construct
  misc_feature 1..27: note = Synthetic
  source 1..27: mol_type = other DNA
atggccaaaaacatccgaggattctga

SEQ ID NO: 2833 - DNA, 27 bp, synthetic construct
  source 1..27: mol_type = other DNA
  misc_feature 1..27: note = Synthetic
atggtcaaagaaagttcggtgtcctga

SEQ ID NO: 2834 - DNA, 228 bp, synthetic construct
  source 1..228: mol_type = other DNA
  misc_feature 1..228: note = Synthetic
attgtgtgtattgtagctgctgtaattattatggcaattaatgtatttacgaattcacagatatttaatattatttcttacattattttgtttattttgttctttgcatatgtgatgaacatcgaaagacaggactatagaagaagtataaatgtaaccattcctgaacagtatacctgcaacaaaccttatactgcgggcgactcggtccgcactagcctgaggtaa

SEQ ID NO: 2835 - DNA, 168 bp, synthetic construct
  misc_feature 1..168: note = Synthetic
  source 1..168: mol_type = other DNA
atgccggcagaaaacaagaaagttagattcgaaaatactacttcagacaaagggaaaattcctagtaaagttattaagagctactacggaaccatggacattaagaaaataaatgaaggattattggacagcaaaatattcgactcggtccgcactagcctgaggtaa

SEQ ID NO: 2836 - DNA, 111 bp, synthetic construct
  source 1..111: mol_type = other DNA
  misc_feature 1..111: note = Synthetic
attcctagtaaagttattaagagctactacggaaccatggacattaagaaaataaatgaaggattattggacagcaaaatattcgactcggtccgcactagcctgaggtaa

SEQ ID NO: 2837 - DNA, 168 bp, synthetic construct
  source 1..168: mol_type = other DNA
  misc_feature 1..168: note = Synthetic
atgggtgttgccaatgattcatcccctgaatatcaatggatgtctccccatagattatcagatactgttatattaggagactgtttgtattttaacaacataatgtcccaattagatttacaccaaaattgggctccgtccgactcggtccgcactagcctgaggtaa

SEQ ID NO: 2838 - DNA, 111 bp, synthetic construct
  source 1..111: mol_type = other DNA
  misc_feature 1..111: note = Synthetic
atgactgaggtgaaatacaaaggtgacagctctgtggaaccctcaacagcctcacagataaatttcatgtcatcattggttagacatgcgactcggtccgcactagcctga

SEQ ID NO: 2839 - DNA, 30 bp, synthetic construct
  source 1..30: mol_type = other DNA
  misc_feature 1..30: note = Synthetic
ctgtggaaccctcaacagcctcacagataa

SEQ ID NO: 2840 - DNA, 81 bp, synthetic construct
  source 1..81: mol_type = other DNA
  misc_feature 1..81: note = Synthetic
atcttcgcccaagaaaaccaatcattctcagaaaagaactttctacaaaggttttttgccatctcatcgaggccacactga

SEQ ID NO: 2841 - DNA, 138 bp, synthetic construct
  source 1..138: mol_type = other DNA
  misc_feature 1..138: note = Synthetic
atgtgtattttcatgatgtcgagcatgtttattttattttttacacagataagatgtatgctgaagaacgtgcatatgggtcatttgacgatgttatggaagtttatcaacagattgttaccgagtctattcagctga

SEQ ID NO: 2842 - DNA, 138 bp, synthetic construct
  misc_feature 1..138: note = Synthetic
  source 1..138: mol_type = other DNA
atgtgtattttcatgatgtcgagcatgtttattttattttttacacagataaggcctatgctgaagaacgtgcatatgggtcatttgacgatgttatggaagtttatcaacagattgttaccgagtctattcagctga

SEQ ID NO: 2843 - DNA, 51 bp, synthetic construct
  misc_feature 1..51: note = Synthetic
  source 1..51: mol_type = other DNA
atgactggcagaatgtttcatcaaaagtcgactcggtccgcactagcctga

SEQ ID NO: 2844 - DNA, 72 bp, synthetic construct
  source 1..72: mol_type = other DNA
  misc_feature 1..72: note = Synthetic
atgaggcattatcatttgaggagcaggatgaaatttatgcgtataccaaacgcaatgtcctgccgaccctaa

SEQ ID NO: 2845 - DNA, 36 bp, synthetic construct
  misc_feature 1..36: note = Synthetic
  source 1..36: mol_type = other DNA
atgcgtataccaaacgcaatgtcctgccgaccctaa

SEQ ID NO: 2846 - DNA, 39 bp, synthetic construct
  source 1..39: mol_type = other DNA
  misc_feature 1..39: note = Synthetic
atccttgcaggataccgggacatggcttggggtaggtga

SEQ ID NO: 2847 - DNA, 36 bp, synthetic construct
  source 1..36: mol_type = other DNA
  misc_feature 1..36: note = Synthetic
atgctattcgagattctgaagaaggacaatttctga

SEQ ID NO: 2848 - DNA, 108 bp, synthetic construct
  source 1..108: mol_type = other DNA
  misc_feature 1..108: note = Synthetic
atggaatctaaaatattcaatctaaattcatccgaatcagcatctcttacagaatttgatttcatcctcaacttggaattgtctgaagcccgactcggtccgcactag

SEQ ID NO: 2849 - DNA, 153 bp, synthetic construct
  misc_feature 1..153: note = Synthetic
  source 1..153: mol_type = other DNA
attgcatcctattataacagttttggatttctggaaccaatactaatggaatctaaaatattcaatctaaattcatccgaatcagcatctcttacagaatttgatttcatcctcaacttggaattgtctggcccccgactcggtccgcactag

SEQ ID NO: 2850 - DNA, 120 bp, synthetic construct
  source 1..120: mol_type = other DNA
  misc_feature 1..120: note = Synthetic
atttttcatttgctgctggctctcagcgtggcactgttgcaggcggtgttaatactgaccgcctcacctctgttttatcttctgctggtggttcgttcgactcggtccgcactagcctga

SEQ ID NO: 2851 - DNA, 66 bp, synthetic construct
  misc_feature 1..66: note = Synthetic
  source 1..66: mol_type = other DNA
atgcaccaagtggttgcggagccgctatcaagcgagcccactagaggggtctgcagcaatctctag

SEQ ID NO: 2852 - DNA, 228 bp, synthetic construct
  source 1..228: mol_type = other DNA
  misc_feature 1..228: note = Synthetic
attttccgggaataccggatattacgaattattggtagtgacgtaaataataaaattataatgcgattaatttttggtgcgttgattatttctttaacgtatatgtattattatgaagtgcatggaacggaattacgctgcaaatgtcttgatggtaaaaaactgccgcccaaaacaattatgttgggtaatttttggttcgactcggtccgcactagcctgaggtaa

SEQ ID NO: 2853 - DNA, 51 bp, synthetic construct
  misc_feature 1..51: note = Synthetic
  source 1..51: mol_type = other DNA
ttggttaggaccagtattcacaaactattttacaatccctacccaatatga

SEQ ID NO: 2854 - DNA, 189 bp, synthetic construct
  source 1..189: mol_type = other DNA
  misc_feature 1..189: note = Synthetic
attttacaatccctacccaatatgacctctaacagagcaagggtgacttacaacccaccaccaacaaccacaggcacacgatcgtgtgggccggaactttccgggtggatctctgagcaattgatgacaggcaagattccgattaccgatatcttcaatgacgactcggtccgcactagcctgaggtaa

SEQ ID NO: 2855 - DNA, 72 bp, synthetic construct
  misc_feature 1..72: note = Synthetic
  source 1..72: mol_type = other DNA
ttggttaggaccagtattcacaaactattttacaatccctacccaatgccacctctaacagagcaagggtga

SEQ ID NO: 2856 - DNA, 189 bp, synthetic construct
  misc_feature 1..189: note = Synthetic
  source 1..189: mol_type = other DNA
attttacaatccctacccaatgccacctctaacagagcaagggtgacttacaacccaccaccaacaaccacaggcacacgatcgtgtgggccggaactttccgggtggatctctgagcaattgatgacaggcaagattccgattaccgatatcttcaatgacgactcggtccgcactagcctgaggtaa

SEQ ID NO: 2857 - DNA, 174 bp, synthetic construct
  source 1..174: mol_type = other DNA
  misc_feature 1..174: note = Synthetic
atgaactgcgcatcgctggcatcacctttaaatgccgtctggcgaagagtggtgatcagttcctgtgggtcgacagaatccatgccgacacgttcagccagcttcccagccagcgttgcgagtgcagtactcattcgttttatacccgactcggtccgcactagcctgaggtaa

SEQ ID NO: 2858 - DNA, 24 bp, synthetic construct
  source 1..24: mol_type = other DNA
  misc_feature 1..24: note = Synthetic
atgccgtctggcgaagagtggtga

SEQ ID NO: 2859 - DNA, 186 bp, synthetic construct
  misc_feature 1..186: note = Synthetic
  source 1..186: mol_type = other DNA
atcagtaatgcgatgaactgcgcatcgctggcatcacctttaaatgccgtctggcgaagagtggtgatcagttcctgtgggtcgacagaatccgccccgacacgttcagccagcttcccagccagcgttgcgagtgcagtactcattcgttttatacccgactcggtccgcactagcctgaggtaa

SEQ ID NO: 2860 - DNA, 195 bp, synthetic construct
  source 1..195: mol_type = other DNA
  misc_feature 1..195: note = Synthetic
ttggcaacgatcagtagcccgatgaactgcgcatcgctggcatcacctttaaatgccgtctggcgaagagtggtgatcagttcctgtgggtcgacagaatccatgccgacacgttcagccagcttcccagccagcgttgcgagtgcagtactcattcgttttatacccgactcggtccgcactagcctgaggtaa

SEQ ID NO: 2861 - DNA, 186 bp, synthetic construct
  misc_feature 1..186: note = Synthetic
  source 1..186: mol_type = other DNA
attttcaatatccgcaagatgacgttgccagcaagcttaaaaggattcgaaactctagacatattcaatatatcaagcgtccggaatatctgtgaactaaacaaacacgccgaacacgtttccattaaaaatttacctttaattgatatttcggttggcgactcggtccgcactagcctgaggtaa

SEQ ID NO: 2862 - DNA, 36 bp, synthetic construct
  misc_feature 1..36: note = Synthetic
  source 1..36: mol_type = other DNA
acgccgaacacgtttccattaaaaatttacctttaa

SEQ ID NO: 2863 - DNA, 186 bp, synthetic construct
  misc_feature 1..186: note = Synthetic
  source 1..186: mol_type = other DNA
attttcaatatccgcaaggccacgttgccagcaagcttaaaaggattcgaaactctagacatattcaatatatcaagcgtccggaatatctgtgaactaaacaaacacgccgaacacgtttccattaaaaatttacctttaattgatatttcggttggcgactcggtccgcactagcctgaggtaa

SEQ ID NO: 2864 - DNA, 204 bp, synthetic construct
  misc_feature 1..204: note = Synthetic
  source 1..204: mol_type = other DNA
gtgctgttggaggtgctgtcgcagatgtggaacctgaacttagacatgggcctgacctcgtgtggcgagagtccgtgcgtggatgtcacggcggagcatatgagtcaattcttgcagtggtgccggagccttaaaaagaggttcaaggagagctacttcttcaactgtcgcccacggtttgcgactcggtccgcactagcctga

SEQ ID NO: 2865 - DNA, 111 bp, synthetic construct
  misc_feature 1..111: note = Synthetic
  source 1..111: mol_type = other DNA
atgactgaggtgaaatacaaaggccacagctctgtggaaccctcaacagcctcacagataaatttcatgtcatcattggttagacatgcgactcggtccgcactagcctga

SEQ ID NO: 2866 - DNA, 45 bp, synthetic construct
  source 1..45: mol_type = other DNA
  misc_feature 1..45: note = Synthetic
atgtcctgcagttctgccagtacttgcttccatgacagaagataa

SEQ ID NO: 2867 - DNA, 24 bp, synthetic construct
  source 1..24: mol_type = other DNA
  misc_feature 1..24: note = Synthetic
atgacttgggtcctcaatgcttaa

SEQ ID NO: 2868 - DNA, 138 bp, synthetic construct
  misc_feature 1..138: note = Synthetic
  source 1..138: mol_type = other DNA
ttgacacaggctatgtcttcctccatgtttagctgcaggtatgatgttcagaaccctcagaacatgtggtctgctagagcaacagttcgctatgggatagggtcccgtaggggcacagaagacacaagaggcaattaa

SEQ ID NO: 2869 - DNA, 138 bp, synthetic construct
  misc_feature 1..138: note = Synthetic
  source 1..138: mol_type = other DNA
ttgacacaggctgcctcttcctccatgtttagctgcaggtatgatgttcagaaccctcagaacatgtggtctgctagagcaacagttcgctatgggatagggtcccgtaggggcacagaagacacaagaggcaattaa

SEQ ID NO: 2870 - DNA, 222 bp, synthetic construct
  source 1..222: mol_type = other DNA
  misc_feature 1..222: note = Synthetic
atcctcttggatgtgaaaaaaactattaacatccctcaaaagactcaaggaaagatggttcctcaggctctcctgtttgtaccccttctggtttttccattgtgttttgggaaattccctatttacacgataccagacaagcttggtccctggagcccgattgacatacatcacctcagctgcccaaacaatttcgactcggtccgcactagcctgaggtaa

SEQ ID NO: 2871 - DNA, 219 bp, synthetic construct
  source 1..219: mol_type = other DNA
  misc_feature 1..219: note = Synthetic
gtgtcactgtccatctccctgtcttttcgcgccgccggtcccccccaaaccatgtctctagatgccgccagccaccaaccggcggcacggcggctcttggattcggcattggtgcgccgcgtcttggcctgcatgatcatcgtcatcatgatcgccattagcatctggatcctgacctacgtgctgtttctcgactcggtccgcactagcctgaggtaa

SEQ ID NO: 2872 - DNA, 219 bp, synthetic construct
  source 1..219: mol_type = other DNA
  misc_feature 1..219: note = Synthetic
gtgtcactgtccatctccctgtcttttcgcgccgccggtcccccccaaaccgcctctctagatgccgccagccaccaaccggcggcacggcggctcttggattcggcattggtgcgccgcgtcttggcctgcatgatcatcgtcatcatgatcgccattagcatctggatcctgacctacgtgctgtttctcgactcggtccgcactagcctgaggtaa

SEQ ID NO: 2873 - DNA, 69 bp, synthetic construct
  source 1..69: mol_type = other DNA
  misc_feature 1..69: note = Synthetic
atgatctgtttaatgcatttggaagcaactaatcgaatcaacattttgatccaaattaataataaataa

SEQ ID NO: 2874 - DNA, 18 bp, synthetic construct
  source 1..18: mol_type = other DNA
  misc_feature 1..18: note = Synthetic
atgttaattacaacctga

SEQ ID NO: 2875 - DNA, 18 bp, synthetic construct
  source 1..18: mol_type = other DNA
  misc_feature 1..18: note = Synthetic
aagatggcttcgaagtga

SEQ ID NO: 2876 - DNA, 132 bp, synthetic construct
  source 1..132: mol_type = other DNA
  misc_feature 1..132: note = Synthetic
atgcgtaaggcctcgaacatctcctcgccggcgctggtcttgacgtgcgtcagaaagtcagtgggaatgcctactttaggcaggagctcgagcgccgaccagttctccacgactcggtccgcactagcctga

SEQ ID NO: 2877 - DNA, 45 bp, synthetic construct
  misc_feature 1..45: note = Synthetic
  source 1..45: mol_type = other DNA
atactttgctacagcttatataaatttatgtgcgatacatcttaa

SEQ ID NO: 2878 - DNA, 27 bp, synthetic construct
  source 1..27: mol_type = other DNA
  misc_feature 1..27: note = Synthetic
atgattctggagacgtgctgtttttga

SEQ ID NO: 2879 - DNA, 171 bp, synthetic construct
  misc_feature 1..171: note = Synthetic
  source 1..171: mol_type = other DNA
agggccaactctaaatcgagtgcacgagctgccattgtggatactgtggaagctgtgaagaagagaaaatatatatctatcgatgagggaaccttaaataatgttgtagaaaaagaaaggaaatttctgaaacagtttttgtccgactcggtccgcactagcctgaggtaa

SEQ ID NO: 2880 - DNA, 27 bp, synthetic construct
  misc_feature 1..27: note = Synthetic
  source 1..27: mol_type = other DNA
atgattctggggacgtgctgtttttga

SEQ ID NO: 2881 - DNA, 192 bp, synthetic construct
  misc_feature 1..192: note = Synthetic
  source 1..192: mol_type = other DNA
gtgctgtttttgagtgaactaagaatgaactctaaatcgagtgcacgagctgccattgtggatactgtggaagctgtgaagaagagaaaatatatatctatcgaggcgggaaccttaaataatgttgtagaaaaagaaaggaaatttctgaaacagtttttgtccgactcggtccgcactagcctgaggtaa

SEQ ID NO: 2882 - DNA, 126 bp, synthetic construct
  misc_feature 1..126: note = Synthetic
  source 1..126: mol_type = other DNA
gtggaagctgtgaagaagagaaaatatatatctatcgaggcgggaaccttaaataatgttgtagaaaaagaaaggaaatttctgaaacagtttttgtccgactcggtccgcactagcctgaggtaa

SEQ ID NO: 2883 - DNA, 204 bp, synthetic construct
  source 1..204: mol_type = other DNA
  misc_feature 1..204: note = Synthetic
ctggccacccacaaaagaaccccccaaaaaccagagactaaatggatcaggatgccttcttttctgaagaatctatggaggaacagaaggagggacgctcaacaaccagcacactcaccagtgcagtcggactcatcgacatcatccttgccagtgaacccacagacatcagaaaagatagcgactcggtccgcactagcctga

SEQ ID NO: 2884 - DNA, 168 bp, synthetic construct
  source 1..168: mol_type = other DNA
  misc_feature 1..168: note = Synthetic
atggatcaggatgccttcttttctgaagaatctatggaggaacagaaggagggacgctcaacaaccagcacactcaccagtgcagtcggactcatcgacatcatccttgccagtgaacccacagacatcagaaaagatagcgactcggtccgcactagcctgaggtaa

SEQ ID NO: 2885 - DNA, 204 bp, synthetic construct
  misc_feature 1..204: note = Synthetic
  source 1..204: mol_type = other DNA
ctggccacccacaaaagaaccccccaaaaaccagagactaagccgatcaggatgccttcttttctgaagaatctatggaggaacagaaggagggacgctcaacaaccagcacactcaccagtgcagtcggactcatcgacatcatccttgccagtgaacccacagacatcagaaaagatagcgactcggtccgcactagcctga

SEQ ID NO: 2886 - DNA, 189 bp, synthetic construct
  misc_feature 1..189: note = Synthetic
  source 1..189: mol_type = other DNA
atctataataatattcaagacatgaacagcaacgcaacaaaaaagccaataagtggcaaaaacttcttactcacttacaatgacccagaagacaccattgacacgcccacaaacctagctgagcacctaacaaacagtttcgccgaaaacctagactttatcgactcggtccgcactagcctgaggtaa

SEQ ID NO: 2887 - DNA, 39 bp, synthetic construct
  source 1..39: mol_type = other DNA
  misc_feature 1..39: note = Synthetic
atgacccagaagacaccattgacacgcccacaaacctag

SEQ ID NO: 2888 - DNA, 168 bp, synthetic construct
  source 1..168: mol_type = other DNA
  misc_feature 1..168: note = Synthetic
atgagatcgaagcacaacgagctgaaaagtccaattatgagttgttccaagaggatggagtggaagagcatactaagccctcttattttcaggcagcagatgattctgacacagaatctgaaccagaaattgaagacaatcgactcggtccgcactagcctgaggtaa

SEQ ID NO: 2889 - DNA, 147 bp, synthetic construct
  misc_feature 1..147: note = Synthetic
  source 1..147: mol_type = other DNA
ctgaaaagtccaattatgagttgttccaagaggatggagtggaagagcatactaagccctcttattttcaggcagcagatgattctgacacagaatctgaaccagaaattgaagacaatcgactcggtccgcactagcctgaggtaa

SEQ ID NO: 2890 - DNA, 18 bp, synthetic construct
  misc_feature 1..18: note = Synthetic
  source 1..18: mol_type = other DNA
atttttatcgattattaa

SEQ ID NO: 2891 - DNA, 210 bp, synthetic construct
  misc_feature 1..210: note = Synthetic
  source 1..210: mol_type = other DNA
attaagaaaaaacaggccagaatggcgggcctaaatgagatactcctacctgaagtacatttaaactcacccatcgttagatataagcttttctactatatattacatggccagttaccaaatgatttggagccagatgacttgggcccactagcaaatcagaattggaaggcaattcgaggccaagcgactcggtccgcactagcctga

SEQ ID NO: 2892 - DNA, 210 bp, synthetic construct
  misc_feature 1..210: note = Synthetic
  source 1..210: mol_type = other DNA
attaagaaaaaacaggccagaatggcgggcctaaatgagatactcctacctgaagtacatttaaactcacccatcgttagatataagcttttctactatatattacatggccagttaccaaatgatttggagccagatgacttgggcccactagcaaatcagaattgggccgcaattcgagctgaagcgactcggtccgcactagcctga

SEQ ID NO: 2893 - DNA, 168 bp, synthetic construct
  misc_feature 1..168: note = Synthetic
  source 1..168: mol_type = other DNA
atgacgctcgtcatgggatcctgttgtggtagattctgtgacaagaataagaataagaataagaaggaagatgtagaagcgggaggagaaggatattacgattataagaacattaatgatctggatgaattcgaagcacgcgactcggtccgcactagcctgaggtaa

SEQ ID NO: 2894 - DNA, 66 bp, synthetic construct
  misc_feature 1..66: note = Synthetic
  source 1..66: mol_type = other DNA
acgattataagaacattaatgatctggatgaattcgaagcacgcgactcggtccgcactagcctga

SEQ ID NO: 2895 - DNA, 156 bp, synthetic construct
  misc_feature 1..156: note = Synthetic
  source 1..156: mol_type = other DNA
atgggatcctgttgtggtagattctgtgacaagaataagaataagaataagaaggaagatgtagaagcgggaggagaaggatattacgattataagaacattaatgatctggatgaattcgaagcacgcgactcggtccgcactagcctgaggtaa

SEQ ID NO: 2896 - DNA, 168 bp, synthetic construct
  misc_feature 1..168: note = Synthetic
  source 1..168: mol_type = other DNA
atgaactctaaatcgagtgcacgagctgccattgtggatactgtggaagctgtgaagaagagaaaatatatatctatcgatgagggaaccttaaataatgttgtagaaaaagaaaggaaatttctgaaacagtttttgtccgactcggtccgcactagcctgaggtaa

SEQ ID NO: 2897 - DNA, 123 bp, synthetic construct
  source 1..123: mol_type = other DNA
  misc_feature 1..123: note = Synthetic
aagaatttaaacccgaaaatgaattgcgtgactattttgaacaaattactggtggtagaactgttcctagaatcttttttgggaaaacttctattggtggatatagcgacctgttggaaatag

SEQ ID NO: 2898 - DNA, 141 bp, synthetic construct
  source 1..141: mol_type = other DNA
  misc_feature 1..141: note = Synthetic
atgaaattgtcgatattaaagaatttaaacccgaaaataaattgcacgactattttgaacaaattactggtggtagaactgttcctagaatattttttgggaaaacttctattggtggatatagcgacctgttggaaatag

SEQ ID NO: 2899 - DNA, 63 bp, synthetic construct
  source 1..63: mol_type = other DNA
  misc_feature 1..63: note = Synthetic
atggacgcattgggtgatattctatcatctattggtgtatcgactcggtccgcactagcctga

SEQ ID NO: 2900 - DNA, 48 bp, synthetic construct
  misc_feature 1..48: note = Synthetic
  source 1..48: mol_type = other DNA
attatgcatggttggatgtgccccccctttgggcgagcattggggtaa

SEQ ID NO: 2901 - DNA, 36 bp, synthetic construct
  misc_feature 1..36: note = Synthetic
  source 1..36: mol_type = other DNA
atggcgatatggttgacacaggctttggtgctatga

SEQ ID NO: 2902 - DNA, 174 bp, synthetic construct
  misc_feature 1..174: note = Synthetic
  source 1..174: mol_type = other DNA
attggcggcaaccagaaactggctcagtttgccttcctccgtgtcctccatgctgaggccaatacccgcgacataatgtttgccgtctttggtctgctcaattttgacagcccacatggcattccacttatcagccgcatccttccactctcgactcggtccgcactagcctga

SEQ ID NO: 2903 - DNA, 69 bp, synthetic construct
  misc_feature 1..69: note = Synthetic
  source 1..69: mol_type = other DNA
attttgacagcccacatggcattccacttatcagccgcatccttccactctcgactcggtccgcactag

SEQ ID NO: 2904 - DNA, 141 bp, synthetic construct
  source 1..141: mol_type = other DNA
  misc_feature 1..141: note = Synthetic
gtgctctacctcctggcgcttgtcgtctgggttgagatgttctgcctcgtcgccgtagccgtcgtcgagcgcgagatcgcctgggcgctgctgttgcggatgctggtcgttggcgactcggtccgcactagcctgaggtaa

SEQ ID NO: 2905 - DNA, 33 bp, synthetic construct
  misc_feature 1..33: note = Synthetic
  source 1..33: mol_type = other DNA
ataagtgcgacgttgctacgttcatatctataa

SEQ ID NO: 2906 - DNA, 192 bp, synthetic construct
  misc_feature 1..192: note = Synthetic
  source 1..192: mol_type = other DNA
atatctataataatattcgtaaatatgaactccactaacgtctctaaaccaatctctggaaagaactttctgctgacctataatgacagtgaagataaaattggaattggtgttgatatagcagaacatttaatagaaaaattccaagaaaaagttttattcatcgactcggtccgcactagcctgaggtaa

SEQ ID NO: 2907 - DNA, 222 bp, synthetic construct
  source 1..222: mol_type = other DNA
  misc_feature 1..222: note = Synthetic
atcctcttggatgtgaaaaaaactattaacatccctcaaaagactcaaggaaaggccgttcctcaggctctcctgtttgtaccccttctggtttttccattgtgttttgggaaattccctatttacacgataccagacaagcttggtccctggagcccgattgacatacatcacctcagctgcccaaacaatttcgactcggtccgcactagcctgaggtaa

SEQ ID NO: 2908 - DNA, 105 bp, synthetic construct
  source 1..105: mol_type = other DNA
  misc_feature 1..105: note = Synthetic
atggagacactcaatatgaccatgcctctctcctgcacaaagaacaacagtcatcattatataatggtgggcaatgagacaggactacgactcggtccgcactag

SEQ ID NO: 2909 - DNA, 117 bp, synthetic construct
  source 1..117: mol_type = other DNA
  misc_feature 1..117: note = Synthetic
ctggaactaaacatggagacactcaatatgaccatgcctctctcctgcacaaagaacaacagtcatcattatataatggtgggcaatgagacaggactacgactcggtccgcactag

SEQ ID NO: 2910 - DNA, 210 bp, synthetic construct
  misc_feature 1..210: note = Synthetic
  source 1..210: mol_type = other DNA
attaagaaaaaacaggccagaatggcgggcctaaatgagatactcctacctgaagtacatttaaactcacccatcgttagatataagcttttctactatatattacatggccagttaccaaatgatttggagccagatgacttgggcccactagcaaatcagaattggaaggcaattcgagctgaagcgactcggtccgcactagcctga

SEQ ID NO: 2911 - DNA, 168 bp, synthetic construct
  misc_feature 1..168: note = Synthetic
  source 1..168: mol_type = other DNA
atgtcactacatttagactgtgtaaatttgctattaacgtacaacgatccagaaggaaagatctttggtgatatgagcctcttagaccaactaattgagaatttcaaagagtatgaaccaatatacggagtatgcagtaacgactcggtccgcactagcctgaggtaa

SEQ ID NO: 2912 - DNA, 168 bp, synthetic construct
  source 1..168: mol_type = other DNA
  misc_feature 1..168: note = Synthetic
atgtcactacgtttagactgtgtaaatttgctattaacgtataacgacccagaaggaaagatctttggtgatatgagcctcttagaccaactaattgagaatttcaaagagtatgaaccaatatacggagtatcctgtaacgactcggtccgcactagcctgaggtaa

SEQ ID NO: 2913 - DNA, 195 bp, synthetic construct
  source 1..195: mol_type = other DNA
  misc_feature 1..195: note = Synthetic
gtgacatttataaataatattaagaaagcctcactacatttagactgtgtaaatttgctattaacgtacaacgatccagaaggaaagatctttggtgatatgagcctcttagaccaactaattgagaatttcaaagagtatgaaccaatatacggagtatgcagtaacgactcggtccgcactagcctgaggtaa

SEQ ID NO: 2914 - DNA, 126 bp, synthetic construct
  source 1..126: mol_type = other DNA
  misc_feature 1..126: note = Synthetic
acgacattccctttccaggacccatcagccatgacgacaatcctggccatcaagatgatgatccgactgactcacaggatacgaccattcccgatgtgcgactcggtccgcactagcctgaggtaa

SEQ ID NO: 2915 - DNA, 189 bp, synthetic construct
  source 1..189: mol_type = other DNA
  misc_feature 1..189: note = Synthetic
aggatcatagggacgcgcccgcaccgcggcgacagcgccacgaccggcagcggggcctggtgtgggacgacgaggactcggccgacgatagcagcgtgttggacttgggcgggagcggtggtggggccaacccgttcgcgcatctgcagcccagactggggcaacggatgtcgactcggtccgcactag

SEQ ID NO: 2916 - DNA, 42 bp, synthetic construct
  misc_feature 1..42: note = Synthetic
  source 1..42: mol_type = other DNA
atggagctattcgaggaagacatagattcactaactaactaa

SEQ ID NO: 2917 - DNA, 30 bp, synthetic construct
  misc_feature 1..30: note = Synthetic
  source 1..30: mol_type = other DNA
atgactgcggacgggaagctttcagagtga

SEQ ID NO: 2918 - DNA, 15 bp, synthetic construct
  misc_feature 1..15: note = Synthetic
  source 1..15: mol_type = other DNA
atgaggttctcatag

SEQ ID NO: 2919 - DNA, 57 bp, synthetic construct
  source 1..57: mol_type = other DNA
  misc_feature 1..57: note = Synthetic
atattattaacaatgaaaattcagtttttatcgcaacacacagtgaaacggagttaa

SEQ ID NO: 2920 - DNA, 150 bp, synthetic construct
  misc_feature 1..150: note = Synthetic
  source 1..150: mol_type = other DNA
ttgagattaaagatgttgaagagaggatctagaaaattctcttccatgctggctaggcgtcatactcctaaaaaaatgaacatagttactgatttggaaaatcgtttaaagaagaatagctacgactcggtccgcactagcctgaggtaa

SEQ ID NO: 2921 - DNA, 18 bp, synthetic construct
  misc_feature 1..18: note = Synthetic
  source 1..18: mol_type = other DNA
atattaagactatcctaa

SEQ ID NO: 2922 - DNA, 168 bp, synthetic construct
  source 1..168: mol_type = other DNA
  misc_feature 1..168: note = Synthetic
atgggtactataattcaatttctggtggtctcctgtctattggcaggagcaggcagccttgatccagcagccctcatgcaaatcggtgtcattccaacaaatgtccggcaacttatgtattatactgaggcctcatcagccgactcggtccgcactagcctgaggtaa

SEQ ID NO: 2923 - DNA, 102 bp, synthetic construct
  source 1..102: mol_type = other DNA
  misc_feature 1..102: note = Synthetic
atccagcagccctcatgcaaatcggtgtcattccaacaaatgtccggcaacttatgtattatactgaggcctcatcagccgactcggtccgcactagcctga

SEQ ID NO: 2924 - DNA, 168 bp, synthetic construct
  source 1..168: mol_type = other DNA
  misc_feature 1..168: note = Synthetic
atgttaactcccgcggtctttccggccgtgctctacctcctggcgcttgtcgtctgggttgagatgttctgcctcgtcgccgtagccgtcgtcgagcgcgagatcgcctgggcgctgctgttgcggatgctggtcgttggcgactcggtccgcactagcctgaggtaa

SEQ ID NO: 2925 - DNA, 21 bp, synthetic construct
  source 1..21: mol_type = other DNA
  misc_feature 1..21: note = Synthetic
atgaagtcgtcactgggctaa

SEQ ID NO: 2926 - DNA, 45 bp, synthetic construct
  misc_feature 1..45: note = Synthetic
  source 1..45: mol_type = other DNA
atgaaaattcagtttttatcggaacacatagtgaaacggagttaa

SEQ ID NO: 2927 - DNA, 210 bp, synthetic construct
  source 1..210: mol_type = other DNA
  misc_feature 1..210: note = Synthetic
ctggcgtatgacgtgccggagggcatccggcgccaccttcgcaatcccaagattcggcgcgcgttcacggagcagtgtataaattaccagcgcacgcacaaggccgtcctgtcgtcggtgtcgctgccgcccgagctgaggccgctgctggtgctggtctcccgcctctgtcacgccaacccggccgcgactcggtccgcactagcctga

SEQ ID NO: 2928 - DNA, 42 bp, synthetic construct
  source 1..42: mol_type = other DNA
  misc_feature 1..42: note = Synthetic
ctgacgacccaattagtatccaaaaatcagctgaggcattag

SEQ ID NO: 2929 - DNA, 51 bp, synthetic construct
  source 1..51: mol_type = other DNA
  misc_feature 1..51: note = Synthetic
atgttcttgaagaccagacccttgtcaacgactcggtccgcactagcctga

SEQ ID NO: 2930 - DNA, 216 bp, synthetic construct
  source 1..216: mol_type = other DNA
  misc_feature 1..216: note = Synthetic
acgcgggccagcatttcagtttcccgcgcttccagttcggcaatgcgcccttgcaaattaacaaggataagcgggaacatttcagggcttggcatggattccagcatttcagccgaaaggcccgcgctatcaatttcagcaatcaatttttcttcattggtcattgttgtcaccctcaaaagtaataacggtgccattcgactcggtccgcactag

SEQ ID NO: 2931 - DNA, 216 bp, synthetic construct
  misc_feature 1..216: note = Synthetic
  source 1..216: mol_type = other DNA
acgcgggccagcatttcagtttcccgcgcttccagttcggcaatgcgcccttgcaaattaacaaggataagcgggaacatttcagggcttggcatggattccagcatttcagccgaaaggcccgcgctatcaatttcagcaatcaatttttcttcattggtcattgttgtcaccctcaaaagtaataacggtttgattcgactcggtccgcactag

SEQ ID NO: 2932 - DNA, 162 bp, synthetic construct
  source 1..162: mol_type = other DNA
  misc_feature 1..162: note = Synthetic
atgcgagaaccgtacagggttagtttttatgctgtggggtgcgcatgcacagaagacaacccaaccgaattcaagatgtcatctggtgctaacacacgcgcatccgtcgccattgtcccgtgttccatttcggaattgtcgacatttcgttcaagccaatga

SEQ ID NO: 2933 - DNA, 144 bp, synthetic construct
  misc_feature 1..144: note = Synthetic
  source 1..144: mol_type = other DNA
gtggtaaaactaactgcagtgtgtatgaaatgctttaaggaggcgtccttttctaaacgattaggtacagaaaccaagatagaaataataggaggaattgatatgtatcaatcggtgtgtagaaagtgttacatcgactcataa

SEQ ID NO: 2934 - DNA, 144 bp, synthetic construct
  misc_feature 1..144: note = Synthetic
  source 1..144: mol_type = other DNA
gtggtaaaactaactgctgtgtgtatgaaatgctttaaggaggcttccttttctaaacgattgggtgaggaaaccgagatagaaataataggaggtaatgatatgtatcaatcggtgtgtagaaagtgttacatcgactcataa

SEQ ID NO: 2935 - DNA, 144 bp, synthetic construct
  source 1..144: mol_type = other DNA
  misc_feature 1..144: note = Synthetic
gtggtaaaactaactgcagtgtgtatgaaatgctttaaggaggcttccttttctaaacgattaggtgcagaaaccgagatagaaataataggaggtaatgatatgtatcaatctgtgtgtagaaagtgttacatcgactcataa

SEQ ID NO: 2936 - DNA, 39 bp, synthetic construct
  source 1..39: mol_type = other DNA
  misc_feature 1..39: note = Synthetic
ctgcatcagaccctgtcgactcggtccgcactagcctga

SEQ ID NO: 2937 - DNA, 21 bp, synthetic construct
  misc_feature 1..21: note = Synthetic
  source 1..21: mol_type = other DNA
atgcgcacagtccgaacgtaa

SEQ ID NO: 2938 - DNA, 138 bp, synthetic construct
  source 1..138: mol_type = other DNA
  misc_feature 1..138: note = Synthetic
acgcggacgaagacgaggatgagatcgaagaagagtacgaggaggaggacgaggacgaggaggaagagtctgccgagggcgccgccgactcctcagtcagcgacgtggcgctctccgactcggtccgcactagcctga

SEQ ID NO: 2939 - DNA, 96 bp, synthetic construct
  misc_feature 1..96: note = Synthetic
  source 1..96: mol_type = other DNA
atgacgacaatcctggccatcaagatgatgatccgactgactcacaggatacgaccattcccgatgtgcgactcggtccgcactagcctgaggtaa

SEQ ID NO: 2940 - DNA, 204 bp, synthetic construct
  misc_feature 1..204: note = Synthetic
  source 1..204: mol_type = other DNA
atggcgctgccgatactcccgacaatccccaccattgcctgcttaagcagaatttctgtcatcatggacagcacggaacgggtgaagctgcgccagttctgctcactgccggtcagcatcgccgccatattctgtgcaataccatcaaaggtctgcgtggctgcactttttacctgcgacatactgcgactcggtccgcactag

SEQ ID NO: 2941 - DNA, 198 bp, synthetic construct
  misc_feature 1..198: note = Synthetic
  source 1..198: mol_type = other DNA
ctgccgatactcccgacaatccccaccattgcctgcttaagcagaatttctgtcatcatggacagcacggaacgggtgaagctgcgccagttctgctcactgccggtcagcatcgccgccatattctgtgcaataccatcaaaggtctgcgtggctgcactttttacctgcgacatactgcgactcggtccgcactag

SEQ ID NO: 2942 - DNA, 33 bp, synthetic construct
  source 1..33: mol_type = other DNA
  misc_feature 1..33: note = Synthetic
gtgagctcaacgactcggtccgcactagcctga

SEQ ID NO: 2943 - DNA, 18 bp, synthetic construct
  source 1..18: mol_type = other DNA
  misc_feature 1..18: note = Synthetic
atggccttccaggactag

SEQ ID NO: 2944 - DNA, 168 bp, synthetic construct
  source 1..168: mol_type = other DNA
  misc_feature 1..168: note = Synthetic
atgggaaactccgtacagctccccgcgcaagagccgccggggcccatgctcaccgccgagatggagctcacgctcatggacatgctcgacgtgatcgcgcaggcgcgccatggcgagctagtgcacaccggcgcgctgatcgactcggtccgcactagcctgaggtaa

SEQ ID NO: 2945 - DNA, 123 bp, synthetic construct
  misc_feature 1..123: note = Synthetic
  source 1..123: mol_type = other DNA
atgctcaccgccgagatggagctcacgctcatggacatgctcgacgtgatcgcgcaggcgcgccatggcgagctagtgcacaccggcgcgctgatcgactcggtccgcactagcctgaggtaa

SEQ ID NO: 2946 - DNA, 36 bp, synthetic construct
  misc_feature 1..36: note = Synthetic
  source 1..36: mol_type = other DNA
atgctttcttgtagacgtgccctacgcgcttgttga

SEQ ID NO: 2947 - DNA, 39 bp, synthetic construct
  misc_feature 1..39: note = Synthetic
  source 1..39: mol_type = other DNA
ctgaaatcaaaaatgtgcgccgaagagggacttttataa

SEQ ID NO: 2948 - DNA, 213 bp, synthetic construct
  misc_feature 1..213: note = Synthetic
  source 1..213: mol_type = other DNA
atcagttcatccagcgcggctgctttgttcatggctttgatgatatcccgtttcaggaaatcaacatgtcggttttccagttccggaaaacgccgctgcaccgacagggggagcccgtcgagaatactggcaatttcacctgcgatccgcgacagcacgaaagtacagaatgcggtttccaccacttcagcgactcggtccgcactagcctga

SEQ ID NO: 2949 - DNA, 213 bp, synthetic construct
  source 1..213: mol_type = other DNA
  misc_feature 1..213: note = Synthetic
atcagttcatccagcgcggctgctttgttcatggctttgatgatatcccgtttcaggaaatcaacatgtcggttttccagttccggaaaacgccgctgcaccgacagggggagcccgtcgagaatactggcaatttcacgcccgatccgcgacagcacgaaagtacagaatgcggtttccaccacttcagcgactcggtccgcactagcctga

SEQ ID NO: 2950 - DNA, 39 bp, synthetic construct
  source 1..39: mol_type = other DNA
  misc_feature 1..39: note = Synthetic
atgcggtttccaccacttcagcgactcggtccgcactag

SEQ ID NO: 2951 - DNA, 183 bp, synthetic construct
  misc_feature 1..183: note = Synthetic
  source 1..183: mol_type = other DNA
atggctttgatgatatcccgtttcaggaaatcaacatgtcggttttccagttccggaaaacgccgctgcaccgacagggggagcccgtcgagaatactggcaatttcacctgcgatccgcgacagcacgaaagtacagaatgcggtttccaccacttcagcgactcggtccgcactagcctga

SEQ ID NO: 2952 - DNA, 201 bp, synthetic construct
  misc_feature 1..201: note = Synthetic
  source 1..201: mol_type = other DNA
ctggctggcatctctccgatgttccaaccttgcgtagttcctcctaagccgtggactggcattactggtggtggctattgggctaacggtcgtcgtcctctggcgctggtgcgtactcacagtaagaaagcactgatgcgctacgaagacgtttacatgcctgaggtgtacaaagcgattaaccgactcggtccgcactag

SEQ ID NO: 2953 - DNA, 30 bp, synthetic construct
  misc_feature 1..30: note = Synthetic
  source 1..30: mol_type = other DNA
gtgtatactatttttaacactcataaataa

SEQ ID NO: 2954 - DNA, 33 bp, synthetic construct
  misc_feature 1..33: note = Synthetic
  source 1..33: mol_type = other DNA
atacatttacaacaaaaactggatcgtatgtaa

SEQ ID NO: 2955 - DNA, 48 bp, synthetic construct
  misc_feature 1..48: note = Synthetic
  source 1..48: mol_type = other DNA
atgcgatcagtaacttttaacgactcggtccgcactagcctgaggtaa

SEQ ID NO: 2956 - DNA, 162 bp, synthetic construct
  misc_feature 1..162: note = Synthetic
  source 1..162: mol_type = other DNA
ttgtctacaagggaaatattttctgcaattggaataacttgtatggctttactgatgatagtttctggtggagctttagcatttaaatctttagcacctcacagagtaatatctatgcgatcagtaacttttaacgactcggtccgcactagcctgaggtaa

SEQ ID NO: 2957 - DNA, 168 bp, synthetic construct
  source 1..168: mol_type = other DNA
  misc_feature 1..168: note = Synthetic
atgaggaccgaaatcataaggatgatggaaagtgcaagaccagaagatgtgtctttccaggggcggggagtcttcgagctctcggacgaaaaggcagcgagcccgatcgtgccttcctttgacatgagtaatgaaggatcttatttcttccgactcggtccgcactag

SEQ ID NO: 2958 - DNA, 45 bp, synthetic construct
  source 1..45: mol_type = other DNA
  misc_feature 1..45: note = Synthetic
atgaatccgtcagtacgccagtcgccactgccggagccttcataa

SEQ ID NO: 2959 - DNA, 108 bp, synthetic construct
  misc_feature 1..108: note = Synthetic
  source 1..108: mol_type = other DNA
atgccgcattgcactttcgtccctggcagtggtcgtctctttcatatacccgggagtgatttccgtcttacggtaatccattgtacgactcggtccgcactagcctga

SEQ ID NO: 2960 - DNA, 15 bp, synthetic construct
  misc_feature 1..15: note = Synthetic
  source 1..15: mol_type = other DNA
atgaaccttatataa

SEQ ID NO: 2961 - DNA, 84 bp, synthetic construct
  source 1..84: mol_type = other DNA
  misc_feature 1..84: note = Synthetic
attcaagataaagaaacaatgaaaattatgttagaatctcagcctgaaaaaatgcacgactcggtccgcactagcctgaggtaa

SEQ ID NO: 2962 - DNA, 204 bp, synthetic construct
  misc_feature 1..204: note = Synthetic
  source 1..204: mol_type = other DNA
atggatcttgccgacctcttcaatgcgcaacccgggttgacctcgtcagttataggtgctcttccgcaggggatggttctaagctgtcaaggctccgatgacatcagaaagcttctggactcacaaaataggaaggacattaagcttatcgatgttgaaatgaccagggaagcttccgactcggtccgcactagcctgaggtaa

SEQ ID NO: 2963 - DNA, 168 bp, synthetic construct
  source 1..168: mol_type = other DNA
  misc_feature 1..168: note = Synthetic
ttgacctcgtcagttataggtgctcttccgcaggggatggttctaagctgtcaaggctccgatgacatcagaaagcttctggactcacaaaataggaaggacattaagcttatcgatgttgaaatgaccagggaagcttccgactcggtccgcactagcctgaggtaa

SEQ ID NO: 2964 - DNA, 66 bp, synthetic construct
  source 1..66: mol_type = other DNA
  misc_feature 1..66: note = Synthetic
atcatcaccatgttggctcagacttgcaatggaactggctgttgttaccgggcaacgagttggtga

SEQ ID NO: 2965 - DNA, 33 bp, synthetic construct
  misc_feature 1..33: note = Synthetic
  source 1..33: mol_type = other DNA
atggtcatttttgtttcgaagtttcacgcgtga

SEQ ID NO: 2966 - DNA, 129 bp, synthetic construct
  source 1..129: mol_type = other DNA
  misc_feature 1..129: note = Synthetic
gtggacggctccgtcctggtgcgaatggccaccaagcctcccgtgattggtcttataacagtgctcttcctcctagtcataggcgcctgcgtctactgctgcgactcggtccgcactagcctgaggtaa

SEQ ID NO: 2967 - DNA, 30 bp, synthetic construct
  source 1..30: mol_type = other DNA
  misc_feature 1..30: note = Synthetic
atgccaagagcaaggctggaattgctatag

SEQ ID NO: 2968 - DNA, 201 bp, synthetic construct
  misc_feature 1..201: note = Synthetic
  source 1..201: mol_type = other DNA
ctggctggcatctctccgatgttccaaccttgcgtagttcctcctaagccgtggactggcattactggtggtggctattgggctaacggtcgtcgtcctctggcgctggtgcgtactcacagtaagaaagcactggcccgctacgaagacgtttacatgcctgaggtgtacaaagcgattaaccgactcggtccgcactag

SEQ ID NO: 2969 - DNA, 210 bp, synthetic construct
  misc_feature 1..210: note = Synthetic
  source 1..210: mol_type = other DNA
atggcagcattcactgggaatacagaggggagaacatctgacatgaggaccgaaatcataaggatgatggaaagtgcaagaccagaagatgtgtctttccaggggcggggagtcttcgagctctcggacgaaaaggcagcgagcccgatcgtgccttcctttgacatgagtaatgaaggatcttatttcttccgactcggtccgcactag

SEQ ID NO: 2970 - DNA, 81 bp, synthetic construct
  source 1..81: mol_type = other DNA
  misc_feature 1..81: note = Synthetic
atgtgtctttccaggggcggggagtcttcgagctctcggacgaaaaggcagcgagcccgatcgtgccttcctttgacatga

SEQ ID NO: 2971 - DNA, 60 bp, synthetic construct
  misc_feature 1..60: note = Synthetic
  source 1..60: mol_type = other DNA
atggatccaacatctttaccaagagtcggccccctcacaatcagatgtagcactgattag

SEQ ID NO: 2972 - DNA, 111 bp, synthetic construct
  source 1..111: mol_type = other DNA
  misc_feature 1..111: note = Synthetic
ataacccccgcttttagtataagctcagagccttgccacgctctttacccatttataagaatagtgaagggggattacgctcagctaaagggtcaatcttctgatgtgtag

SEQ ID NO: 2973 - DNA, 75 bp, synthetic construct
  source 1..75: mol_type = other DNA
  misc_feature 1..75: note = Synthetic
atgtgtagacagacaaagaacctcctaaccaagattgtgtactcctgcgactcggtccgcactagcctgaggtaa

SEQ ID NO: 2974 - DNA, 12 bp, synthetic construct
  misc_feature 1..12: note = Synthetic
  source 1..12: mol_type = other DNA
aagatactttaa

SEQ ID NO: 2975 - DNA, 105 bp, synthetic construct
  misc_feature 1..105: note = Synthetic
  source 1..105: mol_type = other DNA
gtgtacaaaaaaatgcagtcttacaattctctacctatcaaggaacaaatattgtacggtagaattgataatataaatatgagcattagtatttctgtcaattaa

SEQ ID NO: 2976 - DNA, 96 bp, synthetic construct
  source 1..96: mol_type = other DNA
  misc_feature 1..96: note = Synthetic
atgagtgttaacgtgactactgagatgcgcaagccattcgtcctgcctcatcgtggaccggtaaatacggcgccagcggtcccacaagctgactga

SEQ ID NO: 2977 - DNA, 189 bp, synthetic construct
  misc_feature 1..189: note = Synthetic
  source 1..189: mol_type = other DNA
atgttaccccaccagaatcgcgccacacaattgatggccctgttgggcgagtcagcactccatggtcaaaacttctacaaaaagattagtggcatggtaatcaaagaagtgaagaatggtgggcatgagttctatgtgccaaagtttgagtccatgtacaagtggacgactcggtccgcactagcctga

SEQ ID NO: 2978 - DNA, 27 bp, synthetic construct
  source 1..27: mol_type = other DNA
  misc_feature 1..27: note = Synthetic
aggagattgcagaattactcgagctga

SEQ ID NO: 2979 - DNA, 63 bp, synthetic construct
  source 1..63: mol_type = other DNA
  misc_feature 1..63: note = Synthetic
gtgactcagctagcaccgccgacttctccaatgaccaggagattgcagaattactcgagctga

SEQ ID NO: 2980 - DNA, 168 bp, synthetic construct
  misc_feature 1..168: note = Synthetic
  source 1..168: mol_type = other DNA
atgagcatgacttccccgtctccagtcaccggaggaatggtggacggctccgtcctggtgcgaatggccaccaagcctcccgtgattggtcttataacagtgctcttcctcctagtcataggcgcctgcgtctactgctgcgactcggtccgcactagcctgaggtaa

SEQ ID NO: 2981 - DNA, 36 bp, synthetic construct
  misc_feature 1..36: note = Synthetic
  source 1..36: mol_type = other DNA
aggcagatgatgtcgactcggtccgcactagcctga

SEQ ID NO: 2982 - DNA, 168 bp, synthetic construct
  source 1..168: mol_type = other DNA
  misc_feature 1..168: note = Synthetic
atggcatatacaacattgaaactgtgggtggatgagggtgacatgtcgtcttcgctcctatcattcccgttggtactaaaagagacagacagaggcacaaaggagcttcaaccacaggtaagggtagattcaattggcgacgactcggtccgcactagcctgaggtaa

SEQ ID NO: 2983 - DNA, 198 bp, synthetic construct
  misc_feature 1..198: note = Synthetic
  source 1..198: mol_type = other DNA
atgaaaaaaacaggcaacaccactgataaaatgaactttctacgtaagatagtgaaaaattgcagggacgaggacactcaaaaaccctctcccgtgtcagcccctctggatgacgatgacttgtggcttccaccccctgaatacgtcccgctaaaagaacttacaagcaacgactcggtccgcactagcctgaggtaa

SEQ ID NO: 2984 - DNA, 198 bp, synthetic construct
  misc_feature 1..198: note = Synthetic
  source 1..198: mol_type = other DNA
atgaaaaaaacaggcaacaccactgataaagccaactttctacgtaagatagtgaaaaattgcagggacgaggacactcaaaaaccctctcccgtgtcagcccctctggatgacgatgacttgtggcttccaccccctgaatacgtcccgctaaaagaacttacaagcaacgactcggtccgcactagcctgaggtaa

SEQ ID NO: 2985 - DNA, 213 bp, synthetic construct
  misc_feature 1..213: note = Synthetic
  source 1..213: mol_type = other DNA
atcgcgtcctgggccattaagtgggagtacgtcgttctcctgttcctcctgcttgcagacgcgcgcgtctgctcctgcttgtggatgatgttactcatatcccaagcggaggcggctttggagaacctcgtaatactcaatgcagcatccctggccgggacgcacggtcgcctgtccttcctcgtgttcttctgccgactcggtccgcactag

SEQ ID NO: 2986 - DNA, 213 bp, synthetic construct
  source 1..213: mol_type = other DNA
  misc_feature 1..213: note = Synthetic
atcgcgtcctgggccattaagtgggagtacgtcgttctcctgttcctcctgcttgcagacgcgcgcgtctgctcctgcttgtggatgatgttactcatatcccaagcggaggcggctttggagaacctcgtaatactcaatgcagcatccctggccgggacgcacggtcttgtgtccttcctcgtgttcttctgccgactcggtccgcactag

SEQ ID NO: 2987 - DNA, 213 bp, synthetic construct
  misc_feature 1..213: note = Synthetic
  source 1..213: mol_type = other DNA
atcgcgtcctgggccattaagtgggagtacgtcgttctcctgttcctcctgcttgcagacgcgcgcgtctgctcctgcttgtgggccatgttactcatatcccaagcggaggcggctttggagaacctcgtaatactcaatgcagcatccctggccgggacgcacggtcttgtgtccttcctcgtgttcttctgccgactcggtccgcactag

SEQ ID NO: 2988 - DNA, 90 bp, synthetic construct
  misc_feature 1..90: note = Synthetic
  source 1..90: mol_type = other DNA
atgaagaaaagttttttcctcagagcggggttctcatctttgggaagcaaggctcagagaaaacaaatgtggacattgaaaaggtcatga

SEQ ID NO: 2989 - DNA, 33 bp, synthetic construct
  misc_feature 1..33: note = Synthetic
  source 1..33: mol_type = other DNA
atgttacggtggaattcatttagcaacgactaa

SEQ ID NO: 2990 - DNA, 24 bp, synthetic construct
  source 1..24: mol_type = other DNA
  misc_feature 1..24: note = Synthetic
atgtgtttggacgaaatttgctga

SEQ ID NO: 2991 - DNA, 141 bp, synthetic construct
  source 1..141: mol_type = other DNA
  misc_feature 1..141: note = Synthetic
atgtataataagatcaagaactcacaaaatccgaatccaagtccgaatttaaattcgcctcctccagaaacaagaaataccaagtttgtaaataatctggaaaaggatcatatcgactcggtccgcactagcctgaggtaa

SEQ ID NO: 2992 - DNA, 189 bp, synthetic construct
  misc_feature 1..189: note = Synthetic
  source 1..189: mol_type = other DNA
ttgttgatcggtatttgtgtagcagttaccgtcgccatcctatactcgatgtataataagatcaagaactcacaaaatccgaatccaagtccgaatttaaattcgcctcctccagaaccaaaaaataccaagtttgtaaataatctggaaaaggatcatatcgactcggtccgcactagcctgaggtaa

SEQ ID NO: 2993 - DNA, 159 bp, synthetic construct
  source 1..159: mol_type = other DNA
  misc_feature 1..159: note = Synthetic
ctgctggcggcggcgtacagccaggtgtacgccctggcggttgagctgagcgtgtgcacccggctggacccccggagtctggacgtggctgcggtggtgcgcaacgccggcctgctggccgagctggaggccgactcggtccgcactagcctgaggtaa

SEQ ID NO: 2994 - DNA, 159 bp, synthetic construct
  misc_feature 1..159: note = Synthetic
  source 1..159: mol_type = other DNA
ctgctggcggcggcgtacagccaggtgtacgccctggcggttgagctgagcgtgtgcgcccggctggaccccaggagtctggacgtggctgcggtggtgcgcaacgccggcctgctggccgagctggaggccgactcggtccgcactagcctgaggtaa

SEQ ID NO: 2995 - DNA, 159 bp, synthetic construct
  source 1..159: mol_type = other DNA
  misc_feature 1..159: note = Synthetic
ctgctggcggcggcgtacagccaggtgtacgccctggcggttgagctgagcgtgtgcgcccggctggacccccggagtctggacgtggctgcggtagtgcgcaacgccggcctgctggccgagctggaggccgactcggtccgcactagcctgaggtaa

SEQ ID NO: 2996 - DNA, 78 bp, synthetic construct
  source 1..78: mol_type = other DNA
  misc_feature 1..78: note = Synthetic
atgaaatacccgaaattgttgacctacattgcgacgagcaatttgacagctcagaagaagagaataaccatcaactga

SEQ ID NO: 2997 - DNA, 201 bp, synthetic construct
  source 1..201: mol_type = other DNA
  misc_feature 1..201: note = Synthetic
ataaaaaacttaggagcaaagcgtgctcgaaaaatggacactgaatctagcaatggcactgtatctgacatactctatcctgagtgtcaccttaactctcctatcgttaaaggtaaaatagcacaattacacacgattatgagtctacctcagccttacgatatggatgacgacgactcggtccgcactagcctgaggtaa

SEQ ID NO: 2998 - DNA, 63 bp, synthetic construct
  misc_feature 1..63: note = Synthetic
  source 1..63: mol_type = other DNA
atgagtctacctcagccttacgatatggatgacgacgactcggtccgcactagcctgaggtaa

SEQ ID NO: 2999 - DNA, 141 bp, synthetic construct
  source 1..141: mol_type = other DNA
  misc_feature 1..141: note = Synthetic
atgacgttcgccacatcgccgtacttaatgggcgaatccgttaccatgctggaaaggaacggcgcaccttgtttggcggtattcacaaaatgcaaatgccagccgctggtttcagtgtggcgctggttgtccgggtcataa

SEQ ID NO: 3000 - DNA, 54 bp, synthetic construct
  source 1..54: mol_type = other DNA
  misc_feature 1..54: note = Synthetic
atggaagctatcggacctcgcttaggactcccattcccatggagaaactcctag

SEQ ID NO: 3001 - DNA, 54 bp, synthetic construct
  misc_feature 1..54: note = Synthetic
  source 1..54: mol_type = other DNA
atggaagctatcggacctcgcttaggactcccattcccgccgagaaactcctag

SEQ ID NO: 3002 - DNA, 72 bp, synthetic construct
  misc_feature 1..72: note = Synthetic
  source 1..72: mol_type = other DNA
atgggaacgttagatctgaatcatcgcacgttgccccgtatgaaatccacctggctgcgttcgacccattaa

SEQ ID NO: 3003 - DNA, 48 bp, synthetic construct
  source 1..48: mol_type = other DNA
  misc_feature 1..48: note = Synthetic
atcgaggtacagaaccataaatcaatcacgaagggcaacgccggctaa

SEQ ID NO: 3004 - DNA, 96 bp, synthetic construct
  source 1..96: mol_type = other DNA
  misc_feature 1..96: note = Synthetic
atccatacgaacattatagcgagtgcttcaatgagaggtttgctcagatccagcattcttcagcaccccgactcggtccgcactagcctgaggtaa

SEQ ID NO: 3005 - DNA, 168 bp, synthetic construct
  source 1..168: mol_type = other DNA
  misc_feature 1..168: note = Synthetic
atgtcggggctgctggcggcggcgtacagccaggtgtacgccctggcggttgagctgagcgtgtgcacccggctggacccccggagtctggacgtggctgcggtggtgcgcaacgccggcctgctggccgagctggaggccgactcggtccgcactagcctgaggtaa

SEQ ID NO: 3006 - DNA, 168 bp, synthetic construct
  source 1..168: mol_type = other DNA
  misc_feature 1..168: note = Synthetic
atgtcggggctgctggcggcggcgtacagccaggtgtacgccctggcggttgagctgagcgtgtgcgcccggctggaccccaggagtctggacgtggctgcggtggtgcgcaacgccggcctgctggccgagctggaggccgactcggtccgcactagcctgaggtaa

SEQ ID NO: 3007 - DNA, 168 bp, synthetic construct
  misc_feature 1..168: note = Synthetic
  source 1..168: mol_type = other DNA
atggctaatgccagtaaaggtgttacagtcaacatcaacaatgcaaaacggaagcctcgcttcaccaataaccagcgagctagatctactaggccaaattttacaccagcacccaaatttaggaaacgtcggtttattcccgactcggtccgcactagcctgaggtaa

SEQ ID NO: 3008 - DNA, 174 bp, synthetic construct
  misc_feature 1..174: note = Synthetic
  source 1..174: mol_type = other DNA
atgactgccgctaatgccagtaaaggtgttacagtcaacatcaacaatgcaaaacggaagcctcgcttcaccaataaccagcgagctagatctactaggccaaattttacaccagcacccaaatttaggaaacgtcggtttattcccgactcggtccgcactagcctgaggtaa

SEQ ID NO: 3009 - DNA, 39 bp, synthetic construct
  source 1..39: mol_type = other DNA
  misc_feature 1..39: note = Synthetic
atgagaattacctggggatggtgcaggaatgtaacatga

SEQ ID NO: 3010 - DNA, 42 bp, synthetic construct
  misc_feature 1..42: note = Synthetic
  source 1..42: mol_type = other DNA
atggagcttgtagaagaagacatagaatcactgactaattaa

SEQ ID NO: 3011 - DNA, 168 bp, synthetic construct
  misc_feature 1..168: note = Synthetic
  source 1..168: mol_type = other DNA
atggcactggcacctatccctgaatacaacttggaaactggaattccaggggtcccggactgggtattcaacttcattgcatcccacctgcccgagttgcctagcctgcaggacgtgttcaatagaattgcctatggaatcgactcggtccgcactagcctgaggtaa

SEQ ID NO: 3012 - DNA, 162 bp, synthetic construct
  misc_feature 1..162: note = Synthetic
  source 1..162: mol_type = other DNA
ctggcacctatccctgaatacaacttggaaactggaattccaggggtcccggactgggtattcaacttcattgcatcccacctgcccgagttgcctagcctgcaggacgtgttcaatagaattgcctatggaatcgactcggtccgcactagcctgaggtaa

SEQ ID NO: 3013 - DNA, 99 bp, synthetic construct
  source 1..99: mol_type = other DNA
  misc_feature 1..99: note = Synthetic
acgcactcgctgctctacgaaagcatgacctccgagtccaagagcatcgagaacgagagccagcgcaagctcaagccgactcggtccgcactagcctga

SEQ ID NO: 3014 - DNA, 21 bp, synthetic construct
  misc_feature 1..21: note = Synthetic
  source 1..21: mol_type = other DNA
atgcgactcggtccgcactag

SEQ ID NO: 3015 - DNA, 12 bp, synthetic construct
  misc_feature 1..12: note = Synthetic
  source 1..12: mol_type = other DNA
atggagttctaa

SEQ ID NO: 3016 - DNA, 48 bp, synthetic construct
  source 1..48: mol_type = other DNA
  misc_feature 1..48: note = Synthetic
atgacaagtataatgacatctatgattttactgcaatatgtatgctga

SEQ ID NO: 3017 - DNA, 45 bp, synthetic construct
  misc_feature 1..45: note = Synthetic
  source 1..45: mol_type = other DNA
atgttgctattacacgtgctaagaagggtattctctgtgtcatga

SEQ ID NO: 3018 - DNA, 192 bp, synthetic construct
  source 1..192: mol_type = other DNA
  misc_feature 1..192: note = Synthetic
attctctgtgtcatgagtagtatgcaattatttgagtctcttaattttactacactgacgttggataagattaacaatccacgattacagtgtactacaaatttgtttaaggattgtagcaggagctatgtaggatatcacccagcccatgcaccatcctttttggcagcgactcggtccgcactagcctga

SEQ ID NO: 3019 - DNA, 165 bp, synthetic construct
  misc_feature 1..165: note = Synthetic
  source 1..165: mol_type = other DNA
attaacctgtctatttttctttgtcttaatattttcctatattctatgattactatggaccacacaactattgctattattattgctactactaatgctactattgctactattggtataggttgcattacatgtactacttactgctttgatagagaagcttga

SEQ ID NO: 3020 - DNA, 174 bp, synthetic construct
  source 1..174: mol_type = other DNA
  misc_feature 1..174: note = Synthetic
attaacctgtctatttttctttgtcttaatattttcctatattctatgattactatggaccacacaactattgctattattattgctactactaatgctactattgctactattggtataggttgcattacatgtactacttactgctttgatagagaagcttggccagtctga

SEQ ID NO: 3021 - DNA, 81 bp, synthetic construct
  source 1..81: mol_type = other DNA
  misc_feature 1..81: note = Synthetic
ctgcccttcctcccaactttcgtacgggatgtgccaacgggcggcaaactttctccaccgactcggtccgcactagcctga

SEQ ID NO: 3022 - DNA, 18 bp, synthetic construct
  misc_feature 1..18: note = Synthetic
  source 1..18: mol_type = other DNA
ctgtgtcgggtggaatga

SEQ ID NO: 3023 - DNA, 204 bp, synthetic construct
  source 1..204: mol_type = other DNA
  misc_feature 1..204: note = Synthetic
atgaataacatgtcttctgctgcgcccatgggttcgcgaccatgcgccctcggcctattttgctgttgctcctcatgtttctgcctatgctgcccgcgccaccgcccggtcagccgtctggccgccgccgtgggcggcgcagcggcggttccggcggtggtttctggggtgaccgggctgacgactcggtccgcactagcctga

SEQ ID NO: 3024 - DNA, 204 bp, synthetic construct
  misc_feature 1..204: note = Synthetic
  source 1..204: mol_type = other DNA
atgaataacatgtcttctgctgcgcccatgggttcgcgaccgcccgccctcggcctattttgctgttgctcctcatgtttctgcctatgctgcccgcgccaccgcccggtcagccgtctggccgccgccgtgggcggcgcagcggcggttccggcggtggtttctggggtgaccgggctgacgactcggtccgcactagcctga

SEQ ID NO: 3025 - DNA, 216 bp, synthetic construct
  source 1..216: mol_type = other DNA
  misc_feature 1..216: note = Synthetic
atgaccttacaccaatgttcagtcccatgtttcatagccttcgagacgagcgtcgctatggctgttggcaggtatagcatggtcaccctgcggcaaccggctgatcgcatgttagtaccgccacaacgatcaccgccccctgtcgaatggggcagagcgaatcagactccctatctttacgtacacacaaactcacctcgactcggtccgcactag

SEQ ID NO: 3026 - DNA, 141 bp, synthetic construct
  misc_feature 1..141: note = Synthetic
  source 1..141: mol_type = other DNA
atgacgttcataacatcgccgtacttaatgggcgaatccgttaccatgctggaaaggaacggcgcaccttgtttggcggtattcacaaaatgcaaatgccagccgctggtttcagtgtggcgctggttgtccgggtcataa

SEQ ID NO: 3027 - DNA, 21 bp, synthetic construct
  source 1..21: mol_type = other DNA
  misc_feature 1..21: note = Synthetic
atgaagaagtatctgaattaa

SEQ ID NO: 3028 - DNA, 42 bp, synthetic construct
  source 1..42: mol_type = other DNA
  misc_feature 1..42: note = Synthetic
atggggcagtatatacattcgactcggtccgcactagcctga

SEQ ID NO: 3029 - DNA, 75 bp, synthetic construct
  source 1..75: mol_type = other DNA
  misc_feature 1..75: note = Synthetic
ataccggctccaaatctgttagatctatgtagacaaaatgaaaattctattcctgagtgtttttataacttttag

SEQ ID NO: 3030 - DNA, 33 bp, synthetic construct
  source 1..33: mol_type = other DNA
  misc_feature 1..33: note = Synthetic
atgccatttgttttgtctgtggattgtatttga

SEQ ID NO: 3031 - DNA, 45 bp, synthetic construct
  misc_feature 1..45: note = Synthetic
  source 1..45: mol_type = other DNA
atgaaaaaaactaacaccactccgcaggtccatcaatcatcatga

SEQ ID NO: 3032 - DNA, 168 bp, synthetic construct
  misc_feature 1..168: note = Synthetic
  source 1..168: mol_type = other DNA
atgagcaagatttttatcaatcctagtgacattcgatcaggacttgcagatcttgagatggctgaagagaccgtcgaattggtcaaccggaacatggaagacagtcaagctcatctccaaggggtccccatagatgtggacgactcggtccgcactagcctgaggtaa

SEQ ID NO: 3033 - DNA, 174 bp, synthetic construct
  source 1..174: mol_type = other DNA
  misc_feature 1..174: note = Synthetic
atgaaaaaaactaacaccactccgcaggtccatcaatcatcgccagcaagatttttatcaatcctagtgacattcgatcaggacttgcagatcttgagatggctgaagagaccgtcgaattggtcaaccggaacatggaagacagtcaagctcatctccaaggggtccccatag

SEQ ID NO: 3034 - DNA, 174 bp, synthetic construct
  source 1..174: mol_type = other DNA
  misc_feature 1..174: note = Synthetic
atcatcgccagcaagatttttatcaatcctagtgacattcgatcaggacttgcagatcttgagatggctgaagagaccgtcgaattggtcaaccggaacatggaagacagtcaagctcatctccaaggggtccccatagatgtggacgactcggtccgcactagcctgaggtaa

SEQ ID NO: 3035 - DNA, 117 bp, synthetic construct
  source 1..117: mol_type = other DNA
  misc_feature 1..117: note = Synthetic
atgctcaacccaaatgcaaccctaatttacattactggactactcaggatgaaggtgctgcaatcggactggcctggataccatatttcgggccagcagccgagggaatttacatag

SEQ ID NO: 3036 - DNA, 117 bp, synthetic construct
  misc_feature 1..117: note = Synthetic
  source 1..117: mol_type = other DNA
atgctcaacccaaatgcaaccctaatttacattactggactactcaggatggccgtgctgcaatcggactggcctggataccatatttcgggccagcagccgagggaatttacatag

SEQ ID NO: 3037 - DNA, 39 bp, synthetic construct
  source 1..39: mol_type = other DNA
  misc_feature 1..39: note = Synthetic
atgtatagtgcaatctgtattgagagatatatctattaa

SEQ ID NO: 3038 - DNA, 60 bp, synthetic construct
  misc_feature 1..60: note = Synthetic
  source 1..60: mol_type = other DNA
ttgtcaagtatgaatacggaacacaaacataaactgaagtttaacattatttatttatga

SEQ ID NO: 3039 - DNA, 111 bp, synthetic construct
  source 1..111: mol_type = other DNA
  misc_feature 1..111: note = Synthetic
atctttaaagaactaatcttaaaacacacggatgaaaatgttttgatttctccagtttccattttatctactttatctattctcgactcggtccgcactagcctgaggtaa

SEQ ID NO: 3040 - DNA, 21 bp, synthetic construct
  source 1..21: mol_type = other DNA
  misc_feature 1..21: note = Synthetic
atggacaaaaggaaaatataa

SEQ ID NO: 3041 - DNA, 147 bp, synthetic construct
  source 1..147: mol_type = other DNA
  misc_feature 1..147: note = Synthetic
acgttctctgcaccacgatcaaccaaatcgcccaccgagataagcaggtcttttttgttgtcgaatccaatcgtatccagtttgttcatcaggttcgtgctcatctttccttcccgttcttccctggtacgactcggtccgcactag

SEQ ID NO: 3042 - DNA, 210 bp, synthetic construct
  source 1..210: mol_type = other DNA
  misc_feature 1..210: note = Synthetic
atttgctcgccgtttccacgtacagctctgaaccaggggaatgtgattaattccaggcattcaacgttctctgcaccacgatcaaccaaatcgcccaccgagataagcaggtcttttttgttgtcgaatccaatcgtatccagtttgttcatcaggttcgtgctcatctttccttcccgttcttccctggtacgactcggtccgcactag

SEQ ID NO: 3043 - DNA, 213 bp, synthetic construct
  misc_feature 1..213: note = Synthetic
  source 1..213: mol_type = other DNA
acggaaggacaaatccagaatccaaccacaactcaatcaaccaaagattcatggaagacaatgttcaaaacaatcaaatcatggattcttgggaagagggatcaggagataaatcatctgacatctcatcggccctcgacatcattgaattcatactcagcaccgactcccaagagaacacggcagacagcgactcggtccgcactagcctga

SEQ ID NO: 3044 - DNA, 213 bp, synthetic construct
  misc_feature 1..213: note = Synthetic
  source 1..213: mol_type = other DNA
acggaaggacaaatccagaatccaaccacaactcaatcaaccaaagattcgccgaagacaatgttcaaaacaatcaaatcatggattcttgggaagagggatcaggagataaatcatctgacatctcatcggccctcgacatcattgaattcatactcagcaccgactcccaagagaacacggcagacagcgactcggtccgcactagcctga

SEQ ID NO: 3045 - DNA, 45 bp, synthetic construct
  source 1..45: mol_type = other DNA
  misc_feature 1..45: note = Synthetic
atcaccaagataccggagaagagagtgccagcagcgggaagctag

SEQ ID NO: 3046 - DNA, 57 bp, synthetic construct
  misc_feature 1..57: note = Synthetic
  source 1..57: mol_type = other DNA
aagcaattgtcaatgctcaacccaaatgcaaccctaattcgactcggtccgcactag

SEQ ID NO: 3047 - DNA, 216 bp, synthetic construct
  source 1..216: mol_type = other DNA
  misc_feature 1..216: note = Synthetic
atcaccaaatcagcagcctgctacagcctgtacaacattataaaacagctccaggaaaatgatgtgaaaacatccagagattcaatgcttgaagaccctaaacatgtggcgctacacaatctgatactatcttatgttgatatgagtaaaaatccggcaagtttgatcaacagcctcaagcggcttcccagagcgactcggtccgcactagcctga

SEQ ID NO: 3048 - DNA, 198 bp, synthetic construct
  misc_feature 1..198: note = Synthetic
  source 1..198: mol_type = other DNA
atggaaaaaacaggcaacaccactgacgcaatgaattttttccgaaagatagtgaaaagttgcaaagatgaggaggatcaaaagccagctctgatgtcggctccaccagatgatgacgatctgtggcttcccccgccggagtatgtacctttgaccgagatcacagctaacgactcggtccgcactagcctgaggtaa

SEQ ID NO: 3049 - DNA, 198 bp, synthetic construct
  misc_feature 1..198: note = Synthetic
  source 1..198: mol_type = other DNA
atggaaaaaacaggcaacaccactgacgcagccaattttttccgaaagatagtgaaaagttgcaaagatgaggaggatcaaaagccagctctgatgtcggctccaccagatgatgacgatctgtggcttcccccgccggagtatgtacctttgaccgagatcacagctaacgactcggtccgcactagcctgaggtaa

SEQ ID NO: 3050 - DNA, 15 bp, synthetic construct
  misc_feature 1..15: note = Synthetic
  source 1..15: mol_type = other DNA
ctggagctaaagtaa

SEQ ID NO: 3051 - DNA, 180 bp, synthetic construct
  misc_feature 1..180: note = Synthetic
  source 1..180: mol_type = other DNA
ctggagttctgcgagacgcgttctggcggcaaggatcactgtccgctcttcacctgcaccatcacgatatccggaaaggtcgttgccgcggccgacggggccagcaagaaactggcgcgccacaccgcctgcgccagcgcacttaccatcctcatcaacaactgcggcatcagcttctaa

SEQ ID NO: 3052 - DNA, 54 bp, synthetic construct
  misc_feature 1..54: note = Synthetic
  source 1..54: mol_type = other DNA
aaggagagagtggcgtgtcatagtttttacaatgacatcgagaaggccccttaa

SEQ ID NO: 3053 - DNA, 168 bp, synthetic construct
  misc_feature 1..168: note = Synthetic
  source 1..168: mol_type = other DNA
atgacatcgagaaggccccttaaagatcacctgttcaaccatctgtttaggtatcattacccgtcctgggatcagatacttcaggagttagataccctgtccgtcgccaccctcaatccagactgccacgtacccgctctcgactcggtccgcactagcctgaggtaa

SEQ ID NO: 3054 - DNA, 174 bp, synthetic construct
  source 1..174: mol_type = other DNA
  misc_feature 1..174: note = Synthetic
atggagacagaggtccctcagcccttgtcacgacaactcccttattttaaaccgtatgtgctccaaaccgcatctcctcatcgtcacgtgaaataccatgggaccccttttcgtcacacacgtctttccgcttactcaacgcgtcagcccgcgctcggcagagctaccatataa

SEQ ID NO: 3055 - DNA, 93 bp, synthetic construct
  misc_feature 1..93: note = Synthetic
  source 1..93: mol_type = other DNA
atgggaccccttttcgtcacacacgtctttccgcttactcaacgcgtcagcccgcgctcggcagagctaccatataaaaacgcaggggtttag

SEQ ID NO: 3056 - DNA, 174 bp, synthetic construct
  misc_feature 1..174: note = Synthetic
  source 1..174: mol_type = other DNA
atggagacagaggtccctcagcccttgtcacgacaactccctttatttaaaccgtatgtgctccaaaccgcatctcctcatcgtcacgtgaaataccatgggaccccttttcgtcacacacgtctttccgcttactcaacgcgtcagcccgcgctcggcagagctaccatataa

SEQ ID NO: 3057 - DNA, 174 bp, synthetic construct
  misc_feature 1..174: note = Synthetic
  source 1..174: mol_type = other DNA
atggagacagaggtccctcagcccttgtcacgacaactcccttttcttaaaccgtatgtgctccaaaccgcatctcctcatcgtcacgtgaaataccatgggaccccttttcgtcacacacgtctttccgcttactcaacgcgtcagcccgcgctcggcagagctaccatataa

SEQ ID NO: 3058 - DNA, 174 bp, synthetic construct
  misc_feature 1..174: note = Synthetic
  source 1..174: mol_type = other DNA
atggagacagaggtccctcagcccttgtcacgacaactccctttttataaaccgtatgtgctccaaaccgcatctcctcatcgtcacgtgaaataccatgggaccccttttcgtcacacacgtctttccgcttactcaacgcgtcagcccgcgctcggcagagctaccatataa

SEQ ID NO: 3059 - DNA, 174 bp, synthetic construct
  misc_feature 1..174: note = Synthetic
  source 1..174: mol_type = other DNA
atggagacagaggtccctcagcccttgtcacgacaactcccttttttgaaaccgtatgtgctccaaaccgcatctcctcatcgtcacgtgaaataccatgggaccccttttcgtcacacacgtctttccgcttactcaacgcgtcagcccgcgctcggcagagctaccatataa

SEQ ID NO: 3060 - DNA, 174 bp, synthetic construct
  misc_feature 1..174: note = Synthetic
  source 1..174: mol_type = other DNA
atggagacagaggtccctcagcccttgtcacgacaactccctttttttaaaccgaatgtgctccaaaccgcatctcctcatcgtcacgtgaaataccatgggaccccttttcgtcacacacgtctttccgcttactcaacgcgtcagcccgcgctcggcagagctaccatataa

SEQ ID NO: 3061 - DNA, 57 bp, synthetic construct
  misc_feature 1..57: note = Synthetic
  source 1..57: mol_type = other DNA
atggagacagaggtccctcagcccttgtcacgacaactccctttttttaaaccgtag

SEQ ID NO: 3062 - DNA, 174 bp, synthetic construct
  source 1..174: mol_type = other DNA
  misc_feature 1..174: note = Synthetic
atggagacagaggtccctcagcccttgtcacgacaactccctttttttaaaccgtatgcgctccaaaccgcatctcctcatcgtcacgtgaaataccatgggaccccttttcgtcacacacgtctttccgcttactcaacgcgtcagcccgcgctcggcagagctaccatataa

SEQ ID NO: 3063 - DNA, 174 bp, synthetic construct
  source 1..174: mol_type = other DNA
  misc_feature 1..174: note = Synthetic
atggagacagaggtccctcagcccttgtcacgacaactccctttttttaaaccgtatgtactccaaaccgcatctcctcatcgtcacgtgaaataccatgggaccccttttcgtcacacacgtctttccgcttactcaacgcgtcagcccgcgctcggcagagctaccatataa

SEQ ID NO: 3064 - DNA, 174 bp, synthetic construct
  misc_feature 1..174: note = Synthetic
  source 1..174: mol_type = other DNA
atggagacagaggtccctcagcccttgtcacgacaactccctttttttaaaccgtatgtgcgccaaaccgcatctcctcatcgtcacgtgaaataccatgggaccccttttcgtcacacacgtctttccgcttactcaacgcgtcagcccgcgctcggcagagctaccatataa

SEQ ID NO: 3065 - DNA, 174 bp, synthetic construct
  source 1..174: mol_type = other DNA
  misc_feature 1..174: note = Synthetic
atggagacagaggtccctcagcccttgtcacgacaactccctttttttaaaccgtatgtgctccaaaccgcatctcctcatcgtcacgtgaaataccatgggaccccttttcgtcacacacgtctttccgcttactcaacgcgtcagcccgcgctcggcagagctaccatataa

SEQ ID NO: 3066 - DNA, 174 bp, synthetic construct
  source 1..174: mol_type = other DNA
  misc_feature 1..174: note = Synthetic
atggagacagaggtccctcagcccttgtcacgacaactccctttttttaaaccgtatgtgctccaatccgcatctcctcatcgtcacgtgaaataccatgggaccccttttcgtcacacacgtctttccgcttactcaacgcgtcagcccgcgctcggcagagctaccatataa

SEQ ID NO: 3067 - DNA, 174 bp, synthetic construct
  misc_feature 1..174: note = Synthetic
  source 1..174: mol_type = other DNA
atggagacagaggtccctcagcccttgtcacgacaactccctttttttaaaccgtatgtgctccacaccgcatctcctcatcgtcacgtgaaataccatgggaccccttttcgtcacacacgtctttccgcttactcaacgcgtcagcccgcgctcggcagagctaccatataa

SEQ ID NO: 3068 - DNA, 174 bp, synthetic construct
  source 1..174: mol_type = other DNA
  misc_feature 1..174: note = Synthetic
atggagacagaggtccctcagcccttgtcacgacaactccctttttttaaaccgtatgtgctcctaaccgcatctcctcatcgtcacgtgaaataccatgggaccccttttcgtcacacacgtctttccgcttactcaacgcgtcagcccgcgctcggcagagctaccatataa

SEQ ID NO: 3069 - DNA, 174 bp, synthetic construct
  misc_feature 1..174: note = Synthetic
  source 1..174: mol_type = other DNA
atggagacagaggtccctcagcccttgtcacgacaactccctttttttagaccgtatgtgctccaaaccgcatctcctcatcgtcacgtgaaataccatgggaccccttttcgtcacacacgtctttccgcttactcaacgcgtcagcccgcgctcggcagagctaccatataa

SEQ ID NO: 3070 - DNA, 174 bp, synthetic construct
  source 1..174: mol_type = other DNA
  misc_feature 1..174: note = Synthetic
atggagacagaggtccctcagcccttgtcacgacaactccctttttttgaaccgtatgtgctccaaaccgcatctcctcatcgtcacgtgaaataccatgggaccccttttcgtcacacacgtctttccgcttactcaacgcgtcagcccgcgctcggcagagctaccatataa

SEQ ID NO: 3071 - DNA, 168 bp, synthetic construct
  misc_feature 1..168: note = Synthetic
  source 1..168: mol_type = other DNA
atgactcatttagtgcttctattgtgctgctgtgtggggtctgtttgtgcatttttctcagatctggttaaatttgaaaatgtcaccgcccatgcaggtgctagagtgaatctcacctgcagcgttcctagcaatgagtccgactcggtccgcactagcctgaggtaa

SEQ ID NO: 3072 - DNA, 156 bp, synthetic construct
  misc_feature 1..156: note = Synthetic
  source 1..156: mol_type = other DNA
gtgcttctattgtgctgctgtgtggggtctgtttgtgcatttttctcagatctggttaaatttgaaaatgtcaccgcccatgcaggtgctagagtgaatctcacctgcagcgttcctagcaatgagtccgactcggtccgcactagcctgaggtaa

SEQ ID NO: 3073 - DNA, 18 bp, synthetic construct
  misc_feature 1..18: note = Synthetic
  source 1..18: mol_type = other DNA
atgccaatggcgccatag

SEQ ID NO: 3074 - DNA, 225 bp, synthetic construct
  misc_feature 1..225: note = Synthetic
  source 1..225: mol_type = other DNA
atgagcctcctaagccccgggctcagcggctcggtctcacacacgtattttccgagcatggcacagggcctgtacgtcggagggtttgtagatgttgtgtcctgccccaagctggagcaagagctctatctcgatccggatcaggtgacggattatctcccagtcacagaaccccttccaataacaatcgaacacctcgactcggtccgcactagcctgaggtaa

SEQ ID NO: 3075 - DNA, 225 bp, synthetic construct
  misc_feature 1..225: note = Synthetic
  source 1..225: mol_type = other DNA
atgagcctcctaagccccgggctcagcggctcggtctcacacacgtattttccgagcgccgcacagggcctgtacgtcggagggtttgtagatgttgtgtcctgccccaagctggagcaagagctctatctcgatccggatcaggtgacggattatctcccagtcacagaaccccttccaataacaatcgaacacctcgactcggtccgcactagcctgaggtaa

SEQ ID NO: 3076 - DNA, 168 bp, synthetic construct
  source 1..168: mol_type = other DNA
  misc_feature 1..168: note = Synthetic
atggggtcaggatatcaacttctccaattgcctcgggaacgttttcgtaaaacttcgttcttagtatgggtaatcatcctcttccagcgagcaatctccatgccgcttggtatagtgacaaatagcactctcaaagcaaccgactcggtccgcactagcctgaggtaa

SEQ ID NO: 3077 - DNA, 171 bp, synthetic construct
  source 1..171: mol_type = other DNA
  misc_feature 1..171: note = Synthetic
atcataactacactactcacctccaacaccacaggaaatccagaactcacaagtcaaatggaaaccttccactcaacttcctccgaaggcaatccaagcccttctcaagtctctacaacatccgagtacccatcacaaccttcatctccacccaacacaccacgccagtag

SEQ ID NO: 3078 - DNA, 54 bp, synthetic construct
  source 1..54: mol_type = other DNA
  misc_feature 1..54: note = Synthetic
atggcgaccgagcgtgcgttcgttcttttttgttatctgtgtctagtacgatga

SEQ ID NO: 3079 - DNA, 189 bp, synthetic construct
  source 1..189: mol_type = other DNA
  misc_feature 1..189: note = Synthetic
ttgttatctgtgtctagtacgatgaggagacgagccgtgctaggcggagcggtggtgtatccggagggtcctcctccttcttacgagagcgtgatgcagcaacaggcggcgatgatacagcccccactggaggctcccttcgtacccccacggtacctggccgactcggtccgcactagcctgaggtaa

SEQ ID NO: 3080 - DNA, 72 bp, synthetic construct
  misc_feature 1..72: note = Synthetic
  source 1..72: mol_type = other DNA
atggcgaccgagcgtgcgttcgttcttttttgttatctgtgtctagtacggccaggagacgagccgtgctag

SEQ ID NO: 3081 - DNA, 180 bp, synthetic construct
  source 1..180: mol_type = other DNA
  misc_feature 1..180: note = Synthetic
gtgtctagtacggccaggagacgagccgtgctaggcggagcggtggtgtatccggagggtcctcctccttcttacgagagcgtgatgcagcaacaggcggcgatgatacagcccccactggaggctcccttcgtacccccacggtacctggccgactcggtccgcactagcctgaggtaa

SEQ ID NO: 3082 - DNA, 177 bp, synthetic construct
  source 1..177: mol_type = other DNA
  misc_feature 1..177: note = Synthetic
atggcgtcttccacagtaaacttccggttgctgtctgactccgcctgttctgcctgccgtttcatcagggcgagatgctcaatgcgctgcagggctgacagttcagaaagcgtgacggtcacaccgttatgttcaaatgattcggttttcaggaacatcgctgactctccggattaa

SEQ ID NO: 3083 - DNA, 201 bp, synthetic construct
  source 1..201: mol_type = other DNA
  misc_feature 1..201: note = Synthetic
atggcgtcttccacagtaaacttccggttgctgtctgactccgcctgttctgcctgccgtttcatcagggcgagatgctcaatgcgctgcagggctgacagttcagaaagcgtgacggtcacaccgttatgttcaaatgattcggttttcaggaacatcgctgactctccgggccaaccgactcggtccgcactagcctga

SEQ ID NO: 3084 - DNA, 168 bp, synthetic construct
  source 1..168: mol_type = other DNA
  misc_feature 1..168: note = Synthetic
atgaacaccaaggagtccgtgctgctggagatcatcccgaagatccgcgcgtacctgcgcgagggtgctggcgagaagtcgtactccgacttcatctcgcgcaacaagagcatcttcgtgtgcaacctgtacaacgtgaacgactcggtccgcactagcctgaggtaa

SEQ ID NO: 3085 - DNA, 150 bp, synthetic construct
  source 1..150: mol_type = other DNA
  misc_feature 1..150: note = Synthetic
gtgctgctggagatcatcccgaagatccgcgcgtacctgcgcgagggtgctggcgagaagtcgtactccgacttcatctcgcgcaacaagagcatcttcgtgtgcaacctgtacaacgtgaacgactcggtccgcactagcctgaggtaa

SEQ ID NO: 3086 - DNA, 108 bp, synthetic construct
  source 1..108: mol_type = other DNA
  misc_feature 1..108: note = Synthetic
atatctgtttacaaagatattaccgataaatatttctggactgcctatggattcacatcctcgactaatatctccgtaacgatgaattatcaaactatacgttcctga

SEQ ID NO: 3087 - DNA, 63 bp, synthetic construct
  source 1..63: mol_type = other DNA
  misc_feature 1..63: note = Synthetic
atgttaccgataaatatttctggactgcctatggaatcacatcctcgactaatatctccgtaa

SEQ ID NO: 3088 - DNA, 33 bp, synthetic construct
  source 1..33: mol_type = other DNA
  misc_feature 1..33: note = Synthetic
atgaattatcaaactatacgttccggattttaa

SEQ ID NO: 3089 - DNA, 48 bp, synthetic construct
  source 1..48: mol_type = other DNA
  misc_feature 1..48: note = Synthetic
atgttaccgataaatatttctggactgcctatggaatcacatccttga

SEQ ID NO: 3090 - DNA, 27 bp, synthetic construct
  source 1..27: mol_type = other DNA
  misc_feature 1..27: note = Synthetic
atcggaatccgagtgatacaagtctaa

SEQ ID NO: 3091 - DNA, 132 bp, synthetic construct
  misc_feature 1..132: note = Synthetic
  source 1..132: mol_type = other DNA
atgaaatacgtttcgtgcaaactaggtgtaatgggcgtctgcgacgaatggccgctggagatgtgccaggtattcaagagagagacgcctggtaatacgtataagaaagcttttcggtggatccttgattaa

SEQ ID NO: 3092 - DNA, 198 bp, synthetic construct
  source 1..198: mol_type = other DNA
  misc_feature 1..198: note = Synthetic
acgatccagggaaaccaccgtccagtggccatgtttgttccctggcaactcggtacaattacccgtcaccgagatgagctccaaaaactactggcagcctccctgctcccggagcacccggaggagagcctcggtaaccccataatgacacagattcaccagtcgctccacgactcggtccgcactagcctgaggtaa

SEQ ID NO: 3093 - DNA, 72 bp, synthetic construct
  source 1..72: mol_type = other DNA
  misc_feature 1..72: note = Synthetic
atgagctccaaaaactactggcagcctccctgctcccggagcacccggaggagagcctcggtaaccccataa

SEQ ID NO: 3094 - DNA, 198 bp, synthetic construct
  source 1..198: mol_type = other DNA
  misc_feature 1..198: note = Synthetic
acgatccagggaaaccaccgtccagtggccgcctttgttccctggcaactcggtacaattacccgtcaccgagatgagctccaaaaactactggcagcctccctgctcccggagcacccggaggagagcctcggtaaccccataatgacacagattcaccagtcgctccacgactcggtccgcactagcctgaggtaa

SEQ ID NO: 3095 - DNA, 102 bp, synthetic construct
  misc_feature 1..102: note = Synthetic
  source 1..102: mol_type = other DNA
atgcttgcaatgtgttcaattggagccacatcttctccaatctcatcaagctctatccagcttgaatctgtcagttcgcatgccttgttgaactcattctga

SEQ ID NO: 3096 - DNA, 33 bp, synthetic construct
  misc_feature 1..33: note = Synthetic
  source 1..33: mol_type = other DNA
ctgtggctctgcagtgagacacctctgatgtga

SEQ ID NO: 3097 - DNA, 207 bp, synthetic construct
  source 1..207: mol_type = other DNA
  misc_feature 1..207: note = Synthetic
ctgcgctgcatctacacttacttccgcttcctcgcggacaagaagatgacgctgctcaagagcatcctcttcgacccgacagcgcccaagctggaggccgtcgaagtactcagcgacggcatgaaggagtacatgaagatggagcgctggacgcggaagtccgtgcaggtgctttcggacgactcggtccgcactagcctgaggtaa

SEQ ID NO: 3098 - DNA, 33 bp, synthetic construct
  misc_feature 1..33: note = Synthetic
  source 1..33: mol_type = other DNA
acgtatttaggcctgagaagcagggagttttaa

SEQ ID NO: 3099 - DNA, 12 bp, synthetic construct
  source 1..12: mol_type = other DNA
  misc_feature 1..12: note = Synthetic
ctgacagtttag

SEQ ID NO: 3100 - DNA, 168 bp, synthetic construct
  source 1..168: mol_type = other DNA
  misc_feature 1..168: note = Synthetic
atgcagaagaacatgaagacgaagaagacgaagaaacgaggacgaaaggaggggaatacaccggagaccgagcggcggatggagcccgctcggtctcgcacgtccgcgataccgagcgggctccgtcgccgctccggacccgactcggtccgcactagcctgaggtaa

SEQ ID NO: 3101 - DNA, 174 bp, synthetic construct
  source 1..174: mol_type = other DNA
  misc_feature 1..174: note = Synthetic
aagaacgcccagaagaacatgaagacgaagaagacgaagaaacgaggacgaaaggaggggaatacaccggagaccgagcggcggatggagcccgctcggtctcgcacgtccgcgataccgagcgggctccgtcgccgctccggacccgactcggtccgcactagcctgaggtaa

SEQ ID NO: 3102 - DNA, 165 bp, synthetic construct
  misc_feature 1..165: note = Synthetic
  source 1..165: mol_type = other DNA
aagaagttaactatggagtccttgtcagtttatatcttcgtaatgggagtctgctttacatcgaatttcacatgcgagcaaaaaatagtcttaattcaggaacataaacttagatctatatgcatctctacttgttacgactcggtccgcactagcctgaggtaa

SEQ ID NO: 3103 - DNA, 174 bp, synthetic construct
  misc_feature 1..174: note = Synthetic
  source 1..174: mol_type = other DNA
atggagacagaggtccctcagcccttgtcacgacaactccctttttttaaaccgtatgtgctcgaaaccgcatctcctcatcgtcacgtgaaataccatgggaccccttttcgtcacacacgtctttccgcttactcaacgcgtcagcccgcgctcggcagagctaccatataa

SEQ ID NO: 3104 - DNA, 174 bp, synthetic construct
  misc_feature 1..174: note = Synthetic
  source 1..174: mol_type = other DNA
atggagacagaggtccctcagcccttgtcacgacaactccctttttttaaaccgtatgtgctgcaaaccgcatctcctcatcgtcacgtgaaataccatgggaccccttttcgtcacacacgtctttccgcttactcaacgcgtcagcccgcgctcggcagagctaccatataa

SEQ ID NO: 3105 - DNA, 174 bp, synthetic construct
  source 1..174: mol_type = other DNA
  misc_feature 1..174: note = Synthetic
atggagacagaggtccctcagcccttgtcacgacaactccctttttttaaaccgtatgtgttccaaaccgcatctcctcatcgtcacgtgaaataccatgggaccccttttcgtcacacacgtctttccgcttactcaacgcgtcagcccgcgctcggcagagctaccatataa

SEQ ID NO: 3106 - DNA, 174 bp, synthetic construct
  misc_feature 1..174: note = Synthetic
  source 1..174: mol_type = other DNA
atggagacagaggtccctcagcccttgtcacgacaactccctttttttaaaccgtatttgctccaaaccgcatctcctcatcgtcacgtgaaataccatgggaccccttttcgtcacacacgtctttccgcttactcaacgcgtcagcccgcgctcggcagagctaccatataa

SEQ ID NO: 3107 - DNA, 174 bp, synthetic construct
  source 1..174: mol_type = other DNA
  misc_feature 1..174: note = Synthetic
atggagacagaggtccctcagcccttgtcacgacaactccctttttttaaaccgtgcctgctccaaaccgcatctcctcatcgtcacgtgaaataccatgggaccccttttcgtcacacacgtctttccgcttactcaacgcgtcagcccgcgctcggcagagctaccatataa

SEQ ID NO: 3108 - DNA, 174 bp, synthetic construct
  misc_feature 1..174: note = Synthetic
  source 1..174: mol_type = other DNA
atggagacagaggtccctcagcccttgtcacgacaactccctttttttaaaccgtgtgtgctccaaaccgcatctcctcatcgtcacgtgaaataccatgggaccccttttcgtcacacacgtctttccgcttactcaacgcgtcagcccgcgctcggcagagctaccatataa

SEQ ID NO: 3109 - DNA, 174 bp, synthetic construct
  misc_feature 1..174: note = Synthetic
  source 1..174: mol_type = other DNA
atggagacagaggtccctcagcccttgtcacgacaactccctttttttaaaccttatgtgctccaaaccgcatctcctcatcgtcacgtgaaataccatgggaccccttttcgtcacacacgtctttccgcttactcaacgcgtcagcccgcgctcggcagagctaccatataa

SEQ ID NO: 3110 - DNA, 174 bp, synthetic construct
  misc_feature 1..174: note = Synthetic
  source 1..174: mol_type = other DNA
atggagacagaggtccctcagcccttgtcacgacaactccctttttttaaactgtatgtgctccaaaccgcatctcctcatcgtcacgtgaaataccatgggaccccttttcgtcacacacgtctttccgcttactcaacgcgtcagcccgcgctcggcagagctaccatataa

SEQ ID NO: 3111 - DNA, 36 bp, synthetic construct
  misc_feature 1..36: note = Synthetic
  source 1..36: mol_type = other DNA
atgtgctccaaaccgcatctcctcatcgtcacgtga

SEQ ID NO: 3112 - DNA, 174 bp, synthetic construct
  source 1..174: mol_type = other DNA
  misc_feature 1..174: note = Synthetic
atggagacagaggtccctcagcccttgtcacgacaactccctttttttaaatcgtatgtgctccaaaccgcatctcctcatcgtcacgtgaaataccatgggaccccttttcgtcacacacgtctttccgcttactcaacgcgtcagcccgcgctcggcagagctaccatataa

SEQ ID NO: 3113 - DNA, 174 bp, synthetic construct
  source 1..174: mol_type = other DNA
  misc_feature 1..174: note = Synthetic
atggagacagaggtccctcagcccttgtcacgacaactccctttttttaagccgtatgtgctccaaaccgcatctcctcatcgtcacgtgaaataccatgggaccccttttcgtcacacacgtctttccgcttactcaacgcgtcagcccgcgctcggcagagctaccatataa

SEQ ID NO: 3114 - DNA, 153 bp, synthetic construct
  misc_feature 1..153: note = Synthetic
  source 1..153: mol_type = other DNA
atggagtccttgtcagtttatatcttcgtaatgggagtctgctttacatcgaatttcacatgcgagcaaaaaatagtcttaattcaggaacataaacttagatctatatgcatctctacttgttacgactcggtccgcactagcctgaggtaa

SEQ ID NO: 3115 - DNA, 48 bp, synthetic construct
  misc_feature 1..48: note = Synthetic
  source 1..48: mol_type = other DNA
atgcggcagattttttggaagaaattgcaaacgatctgtgaattctaa

SEQ ID NO: 3116 - DNA, 168 bp, synthetic construct
  misc_feature 1..168: note = Synthetic
  source 1..168: mol_type = other DNA
atgaagaagttaactatggagtccttgttagtttatacctttgtaatgggagtctgctttacatcgaatctcacatgcgagcaaaaaatagttttaattcaggaacagaaacttggagctatatgcatctctacttgttacgactcggtccgcactagcctgaggtaa

SEQ ID NO: 3117 - DNA, 165 bp, synthetic construct
  misc_feature 1..165: note = Synthetic
  source 1..165: mol_type = other DNA
aagaagttaactatggagtccttgttagtttatacctttgtaatgggagtctgctttacatcgaatctcacatgcgagcaaaaaatagttttaattcaggaacagaaacttggagctatatgcatctctacttgttacgactcggtccgcactagcctgaggtaa

SEQ ID NO: 3118 - DNA, 60 bp, synthetic construct
  source 1..60: mol_type = other DNA
  misc_feature 1..60: note = Synthetic
atctcctttgtcattggccctcctacctcttctgtaccgactcggtccgcactagcctga

SEQ ID NO: 3119 - DNA, 48 bp, synthetic construct
  misc_feature 1..48: note = Synthetic
  source 1..48: mol_type = other DNA
atgacgcgaaatcaattgctagaacataaacgttctcaacaggtatga

SEQ ID NO: 3120 - DNA, 84 bp, synthetic construct
  source 1..84: mol_type = other DNA
  misc_feature 1..84: note = Synthetic
atggcatcgttccggtggtgggcgttgatggctggtcccgcatcatcaatgaaaaccgactcggtccgcactagcctgaggtaa

SEQ ID NO: 3121 - DNA, 27 bp, synthetic construct
  source 1..27: mol_type = other DNA
  misc_feature 1..27: note = Synthetic
ttgatccattctattttgttgcagtag

SEQ ID NO: 3122 - DNA, 96 bp, synthetic construct
  source 1..96: mol_type = other DNA
  misc_feature 1..96: note = Synthetic
atgccaccaccctgcaccaccgggacgttgtgttttacgtcacggcagacagaaaccgcgcctactttgtgtgcggggggtccgtttattccgtag

SEQ ID NO: 3123 - DNA, 189 bp, synthetic construct
  source 1..189: mol_type = other DNA
  misc_feature 1..189: note = Synthetic
acgcacctacccaccggcagaatgtttccataccctcagctgaactttccaccagtttaccctacaaatccgatggcttaccgagatccaaaccctcctaggcgccgctggaggccgtttcggcccccgctggctgctcaaatcgaagatcttaggaggtccgactcggtccgcactagcctgaggtaa

SEQ ID NO: 3124 - DNA, 189 bp, synthetic construct
  misc_feature 1..189: note = Synthetic
  source 1..189: mol_type = other DNA
acgcacctacccaccggcagagcctttccataccctcagctgaactttccaccagtttaccctacaaatccgatggcttaccgagatccaaaccctcctaggcgccgctggaggccgtttcggcccccgctggctgctcaaatcgaagatcttaggaggtccgactcggtccgcactagcctgaggtaa

SEQ ID NO: 3125 - DNA, 36 bp, synthetic construct
  misc_feature 1..36: note = Synthetic
  source 1..36: mol_type = other DNA
atgaggaacgactcggtccgcactagcctgaggtaa

SEQ ID NO: 3126 - DNA, 48 bp, synthetic construct
  misc_feature 1..48: note = Synthetic
  source 1..48: mol_type = other DNA
atgggtaatgattcatcagaagctacaaacacgggcctggggccatag

SEQ ID NO: 3127 - DNA, 144 bp, synthetic construct
  misc_feature 1..144: note = Synthetic
  source 1..144: mol_type = other DNA
atgattcatcagaagctacaaacacgggcctggggccatagtggcggcagtatgctcgaagcattgggcaatataaattactggcgtgaattgtgcccaccagagggtgagcccacctgtctgacttggcccccgtgtacataa

SEQ ID NO: 3128 - DNA, 30 bp, synthetic construct
  misc_feature 1..30: note = Synthetic
  source 1..30: mol_type = other DNA
atttcacagctaacggaagaaggaaaataa

SEQ ID NO: 3129 - DNA, 195 bp, synthetic construct
  source 1..195: mol_type = other DNA
  misc_feature 1..195: note = Synthetic
aggaaaataagacgaacactggtcgccgccgctttggttcaaaacaacagggccggtagtgtttacacaacgccgacagattcaagatatcaatcgccgggtagtcgcccatgccagtcaacttcgggctcaacaccttcccctgccagagcgtcaggccgacataccgactcggtccgcactagcctgaggtaa

SEQ ID NO: 3130 - DNA, 177 bp, synthetic construct
  misc_feature 1..177: note = Synthetic
  source 1..177: mol_type = other DNA
atcggcgccatgctggcggacggctttgaaactgacatcgcgataccctcgggcatctcgcgccccgatgcggcggcgctgcagcgctgcgaagggcgggtggtattcctgccgaccatccgccggcaactgacgctggccgacgtggccgactcggtccgcactagcctgaggtaa

SEQ ID NO: 3131 - DNA, 27 bp, synthetic construct
  misc_feature 1..27: note = Synthetic
  source 1..27: mol_type = other DNA
gtgctgcccatgcttgacataagctga

SEQ ID NO: 3132 - DNA, 168 bp, synthetic construct
  source 1..168: mol_type = other DNA
  misc_feature 1..168: note = Synthetic
atgcgcgagttcggactcgcggcgcgcatggcccgcgccatcgaggacgtgtgtccgcgcggcgcggtgatattcgtatccagcgccgcgtccatgaccgactgtctgaacccgtcggtgtttaagcacgcggcgatatacgactcggtccgcactagcctgaggtaa

SEQ ID NO: 3133 - DNA, 168 bp, synthetic construct
  misc_feature 1..168: note = Synthetic
  source 1..168: mol_type = other DNA
atgtctgaccaactagaaatcgacgggcagtgcactgagcagcttatccttgctcggcgaaaactcaaacaacaaaatcaggaactgttcaaccttcaagccctacaccaatgcaaaaagggtcttttttgtctggttaacgactcggtccgcactagcctgaggtaa

SEQ ID NO: 3134 - DNA, 87 bp, synthetic construct
  source 1..87: mol_type = other DNA
  misc_feature 1..87: note = Synthetic
atcaggaactgttcaaccttcaagccctacaccaatgcaaaaagggtcttttttgtctggttaacgactcggtccgcactagcctga

SEQ ID NO: 3135 - DNA, 78 bp, synthetic construct
  misc_feature 1..78: note = Synthetic
  source 1..78: mol_type = other DNA
acgcggagcgctagcagggcggcgcctgcgcctggcatgcttgaggcgtccgacaccggacgaaaggtcttcgcgtag

SEQ ID NO: 3136 - DNA, 207 bp, synthetic construct
  source 1..207: mol_type = other DNA
  misc_feature 1..207: note = Synthetic
atggagaccaccgtgaacgcccaccaaatattgcccaaggtcttacataagaggactcttggactctcagcaatgtcaacgaccgaccttgaggcatacttcaaagactgtttgtttaaagactgggaggagttgggggaggagattaggttaaaggtctttgtactaggaggctgtaggcatacgactcggtccgcactagcctga

SEQ ID NO: 3137 - DNA, 216 bp, synthetic construct
  misc_feature 1..216: note = Synthetic
  source 1..216: mol_type = other DNA
aagttaacacccgtggttgataatcaggggcagcgtctctacgtcagatactcgtcagacacgatctctatattattgggccccttcacctatctggtggcagagctttcaccggtggaactcgtgacagatgtctacgccaccctaggcatcgtggagatcatcgacgagctctaccggagcagtcgcctggcgactcggtccgcactagcctga

SEQ ID NO: 3138 - DNA, 144 bp, synthetic construct
  misc_feature 1..144: note = Synthetic
  source 1..144: mol_type = other DNA
atgattcatcagaagctacaaacacgggcctggggccatagtggcggcagtatgctcgaagcattgggcaatataaattactggcgtgaattgtgcccaccagagggtgagcccacctgtctgacttggcccctgtgtacataa

SEQ ID NO: 3139 - DNA, 198 bp, synthetic construct
  misc_feature 1..198: note = Synthetic
  source 1..198: mol_type = other DNA
atatcacctgtatttactgccgtttccaagatgggatcaattaccgcttcgttcatattaataacgatgcaaattttatttttttgtgaagacagcagtggggagccaaactttgcagaacggaatttttggcatgccagctgttcggctcgtggagtttatatcgacggcgactcggtccgcactagcctgaggtaa

SEQ ID NO: 3140 - DNA, 186 bp, synthetic construct
  misc_feature 1..186: note = Synthetic
  source 1..186: mol_type = other DNA
atgcgcgttccgcaggaacaaagagaacatgcaagcaaccacacgcgtgcaaagcaggaggtgttcgacatggccggtaagaagggggtattcgccgccttacgcgccagaaaaggtcttcgtcgtcccgcgagcccgagagtccggctcttggggacgaaagagagccgactcggtccgcactag

SEQ ID NO: 3141 - DNA, 186 bp, synthetic construct
  source 1..186: mol_type = other DNA
  misc_feature 1..186: note = Synthetic
atgcgcgttccgcaggaacaaagagaacgcccaagcaaccacacgcgtgcaaagcaggaggtgttcgacatggccggtaagaagggggtattcgccgccttacgcgccagaaaaggtcttcgtcgtcccgcgagcccgagagtccggctcttggggacgaaagagagccgactcggtccgcactag

SEQ ID NO: 3142 - DNA, 21 bp, synthetic construct
  source 1..21: mol_type = other DNA
  misc_feature 1..21: note = Synthetic
atgttacatccctacccatag

SEQ ID NO: 3143 - DNA, 24 bp, synthetic construct
  misc_feature 1..24: note = Synthetic
  source 1..24: mol_type = other DNA
atgaacggggacttggaatgttaa

SEQ ID NO: 3144 - DNA, 195 bp, synthetic construct
  misc_feature 1..195: note = Synthetic
  source 1..195: mol_type = other DNA
aggaaaataagacgaacactggtcgccatggctttgagcattcaagactgcgcacgcctgaccggtcaaagcgtggcaactattgaacgctttttacccctgcgcaatatttggaaccgagcccgcgaatttatgcgagcaacaactaccgctgccggcatcacatgcgactcggtccgcactagcctgaggtaa

SEQ ID NO: 3145 - DNA, 195 bp, synthetic construct
  misc_feature 1..195: note = Synthetic
  source 1..195: mol_type = other DNA
aggaaaataagacgaacactggtcgccatggctttggttcaaaacaacagggccggtagtgtttacacaacgccgacagattcaagatatcaatcgccgggtagtcgcccatgccagtcaacttcgggctcaacaccttcccctgccagagcgtcaggccgacataccgactcggtccgcactagcctgaggtaa

SEQ ID NO: 3146 - DNA, 195 bp, synthetic construct
  source 1..195: mol_type = other DNA
  misc_feature 1..195: note = Synthetic
aggaaaataagacgaacactggtcgccgccgctttgagcattcaagactgcgcacgcctgaccggtcaaagcgtggcaactattgaacgctttttacccctgcgcaatatttggaaccgagcccgcgaatttatgcgagcaacaactaccgctgccggcatcacatgcgactcggtccgcactagcctgaggtaa

SEQ ID NO: 3147 - DNA, 30 bp, synthetic construct
  misc_feature 1..30: note = Synthetic
  source 1..30: mol_type = other DNA
acgattttaccttggacacaggaagattaa

SEQ ID NO: 3148 - DNA, 27 bp, synthetic construct
  source 1..27: mol_type = other DNA
  misc_feature 1..27: note = Synthetic
attttcggctccgcggtagaacactga

SEQ ID NO: 3149 - DNA, 147 bp, synthetic construct
  source 1..147: mol_type = other DNA
  misc_feature 1..147: note = Synthetic
atggcccaaatgtttacagatccgcccaaggcggcaaaaatatacattaactcatccgttgagtctacatttatagacacttcttcactgaactctgaaaaatatgccacaatttggcgcgactcggtccgcactagcctgaggtaa

SEQ ID NO: 3150 - DNA, 45 bp, synthetic construct
  source 1..45: mol_type = other DNA
  misc_feature 1..45: note = Synthetic
ttggacaccggaagattaaacacaatgttttcggctccacggtag

SEQ ID NO: 3151 - DNA, 138 bp, synthetic construct
  misc_feature 1..138: note = Synthetic
  source 1..138: mol_type = other DNA
atgtttacagatccgcccaaggcggcaaaaatatacattaactcatccgtcgagtctacatttatagacacttcttcactgaactctgaaaaatatgccacaatttggcgcgactcggtccgcactagcctgaggtaa

SEQ ID NO: 3152 - DNA, 147 bp, synthetic construct
  misc_feature 1..147: note = Synthetic
  source 1..147: mol_type = other DNA
atggcccaaatgtttacagatccgcccaaggcggcaaaaatatacattaactcatccgtcgagtctacatttatagacacttcttcgctgaactctgaaaaatatgccacaatttggcgcgactcggtccgcactagcctgaggtaa

SEQ ID NO: 3153 - DNA, 174 bp, synthetic construct
  source 1..174: mol_type = other DNA
  misc_feature 1..174: note = Synthetic
ctgaaggcctctgaccaactagaaatcgacgggcagtgcactgagcagcttatccttgctcggcgaaaactcaaacaacaaaatcaggaactgttcaaccttcaagccctacaccaatgcaaaaagggtcttttttgtctggttaacgactcggtccgcactagcctgaggtaa

SEQ ID NO: 3154 - DNA, 192 bp, synthetic construct
  source 1..192: mol_type = other DNA
  misc_feature 1..192: note = Synthetic
acgcgctctccagagatgcgtacgatgggcgcggatgcgaccggcaacaacgtcacgctcgaggaggaccacgccgaccatttcctgcgagtgtctcgaaccgaggccgcgctcttcgtggtgctcacgctgtttggaattgtgctgctgttggccttcctcgcgtacctactccgactcggtccgcactag

SEQ ID NO: 3155 - DNA, 192 bp, synthetic construct
  misc_feature 1..192: note = Synthetic
  source 1..192: mol_type = other DNA
acgcgctctccagagatgcgtacgatgggcgcgggcccgaccggcaacaacgtcacgctcgaggaggaccacgccgaccatttcctgcgagtgtctcgaaccgaggccgcgctcttcgtggtgctcacgctgtttggaattgtgctgctgttggccttcctcgcgtacctactccgactcggtccgcactag

SEQ ID NO: 3156 - DNA, 153 bp, synthetic construct
  misc_feature 1..153: note = Synthetic
  source 1..153: mol_type = other DNA
acgtcacgctcgaggaggaccacgccgaccatttcctgcgagtgtctcgaaccgaggccgcgctcttcgtggtgctcacgctgtttggaattgtgctgctgttggccttcctcgcgtacctactccgactcggtccgcactagcctgaggtaa

SEQ ID NO: 3157 - DNA, 168 bp, synthetic construct
  source 1..168: mol_type = other DNA
  misc_feature 1..168: note = Synthetic
atggggacggaagactgcgatcacgaagggcggtcggttgcggctcccgtggaggttacggcgctgtatgcgaccgacgggtgcgttatcacctcctcgctcgccctcctcacaaactgcctgctgggggccgagccgttcgactcggtccgcactagcctgaggtaa

SEQ ID NO: 3158 - DNA, 60 bp, synthetic construct
  misc_feature 1..60: note = Synthetic
  source 1..60: mol_type = other DNA
ctggacactaaagtgctggaccgcgagatcctgcgcgtgctggggctggggcagccatga

SEQ ID NO: 3159 - DNA, 75 bp, synthetic construct
  source 1..75: mol_type = other DNA
  misc_feature 1..75: note = Synthetic
atgggcatccgcgtgcagaagaggtccaacttccacgtgtcgaacaacgactcggtccgcactagcctgaggtaa

SEQ ID NO: 3160 - DNA, 126 bp, synthetic construct
  misc_feature 1..126: note = Synthetic
  source 1..126: mol_type = other DNA
gtgtccgacgcggactacgagttctgcctgttctgcgagaccgtgtttcccatgggcatccgcgtgcagaagaggtccaacttccacgtgtcgaacaacgactcggtccgcactagcctgaggtaa

SEQ ID NO: 3161 - DNA, 24 bp, synthetic construct
  misc_feature 1..24: note = Synthetic
  source 1..24: mol_type = other DNA
atggtaacgtgggctttgtcgtga

SEQ ID NO: 3162 - DNA, 171 bp, synthetic construct
  source 1..171: mol_type = other DNA
  misc_feature 1..171: note = Synthetic
aagacacagatcgcgcccaagacaaggagtccggacacgagccccgcaagggccaaactgtggttttcgtcacgcggcgaactgccgcccgctttctccttgaccttggccgtgctcatcttcttcctgcatgttccgggcatgttatcgactcggtccgcactagcctga

SEQ ID NO: 3163 - DNA, 57 bp, synthetic construct
  source 1..57: mol_type = other DNA
  misc_feature 1..57: note = Synthetic
ttgggacgcggctcgccaacaatgttccgaaaatcattgctaggcagaagaaaatga

SEQ ID NO: 3164 - DNA, 72 bp, synthetic construct
  misc_feature 1..72: note = Synthetic
  source 1..72: mol_type = other DNA
acgggtgtgctttggttgggacgcggctcgccaacaatgttccgaaaatcattgctaggcagaagaaaatga

SEQ ID NO: 3165 - DNA, 57 bp, synthetic construct
  misc_feature 1..57: note = Synthetic
  source 1..57: mol_type = other DNA
atgcagcgtgcggcgcctctctcatggatccactgtcaccgtcgcgatgggaggtag

SEQ ID NO: 3166 - DNA, 168 bp, synthetic construct
  source 1..168: mol_type = other DNA
  misc_feature 1..168: note = Synthetic
atgggaggtagccctgttccccagctcaccaccgtcactcaaggactcatgccatctgtgcgcatggactttcgggctcgccggcccttgcgccgcttggctttctacgcgccgcgagctcgtcggaggcttttccagaacgactcggtccgcactagcctgaggtaa

SEQ ID NO: 3167 - DNA, 57 bp, synthetic construct
  misc_feature 1..57: note = Synthetic
  source 1..57: mol_type = other DNA
atgcagcgtgcggcgcctctctcatggatccactgtcaccgtcgcggccggaggtag

SEQ ID NO: 3168 - DNA, 78 bp, synthetic construct
  misc_feature 1..78: note = Synthetic
  source 1..78: mol_type = other DNA
ctgttgaaggaggtctctatccagtcgctcggctcgatgcctggccatatcagggaagtcaggaacgccttctggtga

SEQ ID NO: 3169 - DNA, 216 bp, synthetic construct
  misc_feature 1..216: note = Synthetic
  source 1..216: mol_type = other DNA
atagacatcagaattaagaaaaacgtagggtccaagtggtttcccgttatggactcgctatctgtcaaccagatcttataccctgaagttcacctagatagcccgatagttaccaataagatagtagctatcctggagtatgctcgagtccctcacgcttacagcctggaggaccctacactgtgtcacgactcggtccgcactagcctgaggtaa

SEQ ID NO: 3170 - DNA, 72 bp, synthetic construct
  misc_feature 1..72: note = Synthetic
  source 1..72: mol_type = other DNA
atgctcgagtccctcacgcttacagcctggaggaccctacactgtgtcacgactcggtccgcactagcctga

SEQ ID NO: 3171 - DNA, 27 bp, synthetic construct
  source 1..27: mol_type = other DNA
  misc_feature 1..27: note = Synthetic
gtgcgctaccaccccagcatcctttaa

SEQ ID NO: 3172 - DNA, 168 bp, synthetic construct
  source 1..168: mol_type = other DNA
  misc_feature 1..168: note = Synthetic
atggctctcacttgccgcctgcgcattcccgtcccgaattaccgaggaagatcccgccgcaggagaggcatggcaggcagcggcctaaaccgccgccggcggcgggccatgcgcaggcgcctgagtggcgggttcctgcccgactcggtccgcactagcctgaggtaa

SEQ ID NO: 3173 - DNA, 150 bp, synthetic construct
  misc_feature 1..150: note = Synthetic
  source 1..150: mol_type = other DNA
ctgcgcattcccgtcccgaattaccgaggaagatcccgccgcaggagaggcatggcaggcagcggcctaaaccgccgccggcggcgggccatgcgcaggcgcctgagtggcgggttcctgcccgactcggtccgcactagcctgaggtaa

SEQ ID NO: 3174 - DNA, 168 bp, synthetic construct
  misc_feature 1..168: note = Synthetic
  source 1..168: mol_type = other DNA
atggctctcacttgccgcctgcgcatccccgtcccgaattaccgaggaagatcccgccgcaggagaggcatggcaggcagcggcctgaaccgccgccggcggcgggccatgcgcaggcgcctgagtggcggctttctgcccgactcggtccgcactagcctgaggtaa

SEQ ID NO: 3175 - DNA, 87 bp, synthetic construct
  source 1..87: mol_type = other DNA
  misc_feature 1..87: note = Synthetic
ttgaatcacagcaggtcacaccgaatgaccatgctaacgctagagcattttcgcatctggctaccgactcggtccgcactagcctga

SEQ ID NO: 3176 - DNA, 192 bp, synthetic construct
  source 1..192: mol_type = other DNA
  misc_feature 1..192: note = Synthetic
atgaaattttattccggattcaaaatggagatccggtgtctcaactggttcgaggcacgcggcgaggagcgcgcgctctacctcaaggccaagacccgcgccggagacactctcttcgtacgcttcccgcattactactactatgtggtcgacgggggcacgctcgactcggtccgcactagcctgaggtaa

SEQ ID NO: 3177 - DNA, 192 bp, synthetic construct
  misc_feature 1..192: note = Synthetic
  source 1..192: mol_type = other DNA
atgaaattttattccggattcaaagccgagatccggtgtctcaactggttcgaggcacgcggcgaggagcgcgcgctctacctcaaggccaagacccgcgccggagacactctcttcgtacgcttcccgcattactactactatgtggtcgacgggggcacgctcgactcggtccgcactagcctgaggtaa

SEQ ID NO: 3178 - DNA, 216 bp, synthetic construct
  misc_feature 1..216: note = Synthetic
  source 1..216: mol_type = other DNA
atagacatcagaattaagaaaaacgtagggtccaagtggtttcccgttgccgactcgctatctgtcaaccagatcttataccctgaagttcacctagatagcccgatagttaccaataagatagtagctatcctggagtatgctcgagtccctcacgcttacagcctggaggaccctacactgtgtcacgactcggtccgcactagcctgaggtaa

SEQ ID NO: 3179 - DNA, 27 bp, synthetic construct
  misc_feature 1..27: note = Synthetic
  source 1..27: mol_type = other DNA
atgagagaattgtctatcagcttgtaa

SEQ ID NO: 3180 - DNA, 180 bp, synthetic construct
  source 1..180: mol_type = other DNA
  misc_feature 1..180: note = Synthetic
atgataagtggtagtcctgggcatacaattccagactccaccaaaattgtttccacagacttatcgtcgtggttgtgtgtgcagccactcttgtctgcactgtctatttcaatgcagcgtgacagcaacttgagtccctcaatcagaaccatcgactcggtccgcactagcctgaggtaa

SEQ ID NO: 3181 - DNA, 177 bp, synthetic construct
  misc_feature 1..177: note = Synthetic
  source 1..177: mol_type = other DNA
ataagtggtagtcctgggcatacaattccagactccaccaaagccgtttccacagacttatcgtcgtggttgtgtgtgcagccactcttgtctgcactgtctatttcaatgcagcgtgacagcaacttgagtccctcaatcagaaccatcgactcggtccgcactagcctgaggtaa

SEQ ID NO: 3182 - DNA, 21 bp, synthetic construct
  misc_feature 1..21: note = Synthetic
  source 1..21: mol_type = other DNA
atgacccgccgatgtcgttga

SEQ ID NO: 3183 - DNA, 15 bp, synthetic construct
  source 1..15: mol_type = other DNA
  misc_feature 1..15: note = Synthetic
atggaagatacttag

SEQ ID NO: 3184 - DNA, 168 bp, synthetic construct
  source 1..168: mol_type = other DNA
  misc_feature 1..168: note = Synthetic
atggaaaccttccatatgctgcgctccatggagcgcaagttctacgcggacctggctctcgcgctgcccgcgcacaagagcgccttcgcgcaccgcgacatgctcttcatcttctacgcgcccaaggcggctacggtggccgactcggtccgcactagcctgaggtaa

SEQ ID NO: 3185 - DNA, 153 bp, synthetic construct
  source 1..153: mol_type = other DNA
  misc_feature 1..153: note = Synthetic
atgctgcgctccatggagcgcaagttctacgcggacctggctctcgcgctgcccgcgcacaagagcgccttcgcgcaccgcgacatgctcttcatcttctacgcgcccaaggcggctacggtggccgactcggtccgcactagcctgaggtaa

SEQ ID NO: 3186 - DNA, 168 bp, synthetic construct
  misc_feature 1..168: note = Synthetic
  source 1..168: mol_type = other DNA
atggatcctgtgtacgtggacatagacgctgacagcgcctttttgaaggccctgcaacgtgcgtaccccatgtttgaggtggaacctaggcaggtcacaccgaatgaccatgctaatgctagagcgttctcgcatctagccgactcggtccgcactagcctgaggtaa

SEQ ID NO: 3187 - DNA, 159 bp, synthetic construct
  source 1..159: mol_type = other DNA
  misc_feature 1..159: note = Synthetic
gtgtacgtggacatagacgctgacagcgcctttttgaaggccctgcaacgtgcgtaccccatgtttgaggtggaacctaggcaggtcacaccgaatgaccatgctaatgctagagcgttctcgcatctagccgactcggtccgcactagcctgaggtaa

SEQ ID NO: 3188 - DNA, 168 bp, synthetic construct
  source 1..168: mol_type = other DNA
  misc_feature 1..168: note = Synthetic
atgcgccagtcctatcgctacgcgtctggggccgttgttcggaggaccctcaagggtttacgaaagctcattctctgccaagacttgcggcaggacatccgccacttagttcgtagctatgctgatatgaacattagcctcgactcggtccgcactagcctgaggtaa

SEQ ID NO: 3189 - DNA, 99 bp, synthetic construct
  misc_feature 1..99: note = Synthetic
  source 1..99: mol_type = other DNA
attctctgccaagacttgcggcaggacatccgccacttagttcgtagctatgctgatatgaacattagcctcgactcggtccgcactagcctgaggtaa

SEQ ID NO: 3190 - DNA, 216 bp, synthetic construct
  source 1..216: mol_type = other DNA
  misc_feature 1..216: note = Synthetic
aagccgtgcagcaaccgcaggaagctcatcgtctggcccgtggggaaaatgtcgatgacggcctcgtcatccacgccgcggcccacgcccaagtacgacgacgccttgatcctcaacctctcgtcggccgccaagatcgaacggatcgtcgacaaggtcaagtccctctcgcgcgagcgctttgcgcccgactcggtccgcactagcctgaggtaa

SEQ ID NO: 3191 - DNA, 216 bp, synthetic construct
  misc_feature 1..216: note = Synthetic
  source 1..216: mol_type = other DNA
aagccgtgcagcaaccgcaggaagctcatcgtctggcccgtggggaaagcctcgatgacggcctcgtcatccacgccgcggcccacgcccaagtacgacgacgccttgatcctcaacctctcgtcggccgccaagatcgaacggatcgtcgacaaggtcaagtccctctcgcgcgagcgctttgcgcccgactcggtccgcactagcctgaggtaa

SEQ ID NO: 3192 - DNA, 90 bp, synthetic construct
  source 1..90: mol_type = other DNA
  misc_feature 1..90: note = Synthetic
atggcttactcgcgtgtcccctcttctcccttcgcagcggccaatgacatcgtattaaatagacggagacgcgacttttgtaacccgtag

SEQ ID NO: 3193 - DNA, 39 bp, synthetic construct
  misc_feature 1..39: note = Synthetic
  source 1..39: mol_type = other DNA
atgtccacatcctacaatattaaacggatacttgtctag

SEQ ID NO: 3194 - DNA, 90 bp, synthetic construct
  source 1..90: mol_type = other DNA
  misc_feature 1..90: note = Synthetic
atctacttgctctccaggaaatacatggcaaccggaacttccaaaatgtgtacgctaataaacgactcggtccgcactagcctgaggtaa

SEQ ID NO: 3195 - DNA, 33 bp, synthetic construct
  source 1..33: mol_type = other DNA
  misc_feature 1..33: note = Synthetic
acgttaccaataaaaaacaaaaaaataaattaa

SEQ ID NO: 3196 - DNA, 183 bp, synthetic construct
  misc_feature 1..183: note = Synthetic
  source 1..183: mol_type = other DNA
gtgttttacagcgtgatggagcagatgaagatgctcgacacgctgcagaacacgcagctgcagagcgccattgtgaaggcgatgtatgccgccaccattgagagtgagctggatacgcagtcagcgatggattttattctgggcgcgaacagtcacgactcggtccgcactagcctgaggtaa

SEQ ID NO: 3197 - DNA, 39 bp, synthetic construct
  misc_feature 1..39: note = Synthetic
  source 1..39: mol_type = other DNA
acgggcagactcgcggtgcaaatgtgttttacagcgtga

SEQ ID NO: 3198 - DNA, 57 bp, synthetic construct
  source 1..57: mol_type = other DNA
  misc_feature 1..57: note = Synthetic
atggattttattctgggcgcgaacagtcacgactcggtccgcactagcctgaggtaa

SEQ ID NO: 3199 - DNA, 30 bp, synthetic construct
  source 1..30: mol_type = other DNA
  misc_feature 1..30: note = Synthetic
attttgcagaagccgacagtaagtacctaa

SEQ ID NO: 3200 - DNA, 168 bp, synthetic construct
  misc_feature 1..168: note = Synthetic
  source 1..168: mol_type = other DNA
atggagttcatcccaacccaaactttttacaacaggaggtaccagcctcgaccctggactccgcgccctactatccaagtcatcaggcccagaccgcgcccgcagaggcaagctgggcaacttgcccagctgatctcagccgactcggtccgcactagcctgaggtaa

SEQ ID NO: 3201 - DNA, 159 bp, synthetic construct
  source 1..159: mol_type = other DNA
  misc_feature 1..159: note = Synthetic
atcccaacccaaactttttacaacaggaggtaccagcctcgaccctggactccgcgccctactatccaagtcatcaggcccagaccgcgcccgcagaggcaagctgggcaacttgcccagctgatctcagccgactcggtccgcactagcctgaggtaa

SEQ ID NO: 3202 - DNA, 216 bp, synthetic construct
  misc_feature 1..216: note = Synthetic
  source 1..216: mol_type = other DNA
atagcctttacggttttctttagactgttgcgaacttggcacctccagatggcccccgtccacgttttatgctgcgttagcgtactgcttgccacgttttacctgacgcccacagaaagcgcggggtcactcgtgtcgtacacgcctaatagctgctgctacgggttccagcagcacccaccgcccgtcgactcggtccgcactagcctgaggtaa

SEQ ID NO: 3203 - DNA, 216 bp, synthetic construct
  misc_feature 1..216: note = Synthetic
  source 1..216: mol_type = other DNA
atagcctttacggttttctttagactgttgcgaacttggcacctccaggccgcccccgtccacgttttatgctgcgttagcgtactgcttgccacgttttacctgacgcccacagaaagcgcggggtcactcgtgtcgtacacgcctaatagctgctgctacgggttccagcagcacccaccgcccgtcgactcggtccgcactagcctgaggtaa

SEQ ID NO: 3204 - DNA, 24 bp, synthetic construct
  misc_feature 1..24: note = Synthetic
  source 1..24: mol_type = other DNA
atgccttaccgcctttctttatga

SEQ ID NO: 3205 - DNA, 114 bp, synthetic construct
  source 1..114: mol_type = other DNA
  misc_feature 1..114: note = Synthetic
atgattgattcgccccgcgcctcaagtgtttctataatggcggggttagggatagcggcaagtttagcgccgcctgttgccacgtccttatatttgcttaccaatcctttatag

SEQ ID NO: 3206 - DNA, 219 bp, synthetic construct
  source 1..219: mol_type = other DNA
  misc_feature 1..219: note = Synthetic
atgccatcaggccggaccctcgggtccattgcgtcctcaagttttcgcacccgtcgcccctctccaaggttccgttcggaacctgccagcatttcctcgtggcgaaccgatacctcgagacccggtcgatttcacccatcgactggtcggtttgaaaggcatcgacgtccggggtttttgtcggtgggggcttttgcgactcggtccgcactagcctga

SEQ ID NO: 3207 - DNA, 45 bp, synthetic construct
  misc_feature 1..45: note = Synthetic
  source 1..45: mol_type = other DNA
atgtattttgggctgtgcccctgctattggggaacactgggctaa

SEQ ID NO: 3208 - DNA, 15 bp, synthetic construct
  source 1..15: mol_type = other DNA
  misc_feature 1..15: note = Synthetic
atggtgatatggtag

SEQ ID NO: 3209 - DNA, 168 bp, synthetic construct
  misc_feature 1..168: note = Synthetic
  source 1..168: mol_type = other DNA
atgcgcaccaaatctccgggagatggctcgactcgcaaagcaaatcgttgggctggacaggtgcaggtagcggcaactgcgcagccgccgagtatggcgtgtttataccccgcgtgtgctcgctcgtgctgccggtggtccgactcggtccgcactagcctgaggtaa

SEQ ID NO: 3210 - DNA, 78 bp, synthetic construct
  source 1..78: mol_type = other DNA
  misc_feature 1..78: note = Synthetic
ctggattggcccgcaccaaatctccgggagatggctcgactcgcaaagcaaatcgttgggctggacaggtgcaggtag

SEQ ID NO: 3211 - DNA, 33 bp, synthetic construct
  source 1..33: mol_type = other DNA
  misc_feature 1..33: note = Synthetic
gtggatcctaggcgttttgacttgcgcaattaa

SEQ ID NO: 3212 - DNA, 168 bp, synthetic construct
  misc_feature 1..168: note = Synthetic
  source 1..168: mol_type = other DNA
atggggcagctgatctcgtttttcggggaaattccatcaataatacacgaggccctgaacattgcattaatagcagtcagcatcatatcaattctgaagggtgttatcaacatttgggggagtggcctactgcagttcatcgactcggtccgcactagcctgaggtaa

SEQ ID NO: 3213 - DNA, 159 bp, synthetic construct
  source 1..159: mol_type = other DNA
  misc_feature 1..159: note = Synthetic
ctgatctcgtttttcggggaaattccatcaataatacacgaggccctgaacattgcattaatagcagtcagcatcatatcaattctgaagggtgttatcaacatttgggggagtggcctactgcagttcatcgactcggtccgcactagcctgaggtaa

SEQ ID NO: 3214 - DNA, 27 bp, synthetic construct
  source 1..27: mol_type = other DNA
  misc_feature 1..27: note = Synthetic
aagtttttcaccatgtcagcaatctga

SEQ ID NO: 3215 - DNA, 30 bp, synthetic construct
  source 1..30: mol_type = other DNA
  misc_feature 1..30: note = Synthetic
atgtggtttccgtcgtccgggccgtgctga

SEQ ID NO: 3216 - DNA, 105 bp, synthetic construct
  misc_feature 1..105: note = Synthetic
  source 1..105: mol_type = other DNA
gtgctgaccagccgctcactgccgtcgtccgctgttacggtcagacggagcaggaaactcacgcccttcaccaccttcggtgtgtcccatcgcgccagcacctga

SEQ ID NO: 3217 - DNA, 60 bp, synthetic construct
  misc_feature 1..60: note = Synthetic
  source 1..60: mol_type = other DNA
gtgtgtcccatcgcgccagcacctgatattccccgctcgactcggtccgcactagcctga

SEQ ID NO: 3218 - DNA, 66 bp, synthetic construct
  misc_feature 1..66: note = Synthetic
  source 1..66: mol_type = other DNA
ctgaaacaggtccccatccccgaacccgaccagatgggagacgacggaccagacccgggtccctaa

SEQ ID NO: 3219 - DNA, 51 bp, synthetic construct
  source 1..51: mol_type = other DNA
  misc_feature 1..51: note = Synthetic
atgccgaggcccgagaattcctatgccacgtcggagggtactgggatctag

SEQ ID NO: 3220 - DNA, 216 bp, synthetic construct
  source 1..216: mol_type = other DNA
  misc_feature 1..216: note = Synthetic
atgggtgtctctccgggcacagggcttcacaaacttccaggatctatcgcctttccgtttgtacctttaagcttgtatgtcgccaaaaagttattccgtgccagggggtttcgcttctgtcaaaagcctggcgtcttggctttggcccccgaggttgacccttgttcgattcagcatgaggtaactggcgactcggtccgcactagcctgaggtaa

SEQ ID NO: 3221 - DNA, 108 bp, synthetic construct
  misc_feature 1..108: note = Synthetic
  source 1..108: mol_type = other DNA
atgtcgccaaaaagttattccgtgccagggggtttcgcttctgtcaaaagcctggcgtcttggctttggcccccgaggttgacccttgttcgattcagcatgaggtaa

SEQ ID NO: 3222 - DNA, 90 bp, synthetic construct
  source 1..90: mol_type = other DNA
  misc_feature 1..90: note = Synthetic
atgacgatgacgaagaccagtacgaggactgatcggccgtaccttttgttagatgcagcgaccggcgatcatcgcggagagggctcctaa

SEQ ID NO: 3223 - DNA, 168 bp, synthetic construct
  misc_feature 1..168: note = Synthetic
  source 1..168: mol_type = other DNA
atgcagcgaccggcgatcatcgcggagagggctcctaacctggatcccgcggttttggcggccatgcaaagccagccttctggcgttacagcttcagatgactggacagcggccatggatcgtattatggctttaacggccgactcggtccgcactagcctgaggtaa

SEQ ID NO: 3224 - DNA, 90 bp, synthetic construct
  misc_feature 1..90: note = Synthetic
  source 1..90: mol_type = other DNA
atgacgatgacgaagaccagtacgaggactgatcggccgtaccttttgttaggcccagcgaccggcgatcatcgcggagagggctcctaa

SEQ ID NO: 3225 - DNA, 129 bp, synthetic construct
  source 1..129: mol_type = other DNA
  misc_feature 1..129: note = Synthetic
ctggatcccgcggttttggcggccatgcaaagccagccttctggcgttacagcttcagatgactggacagcggccatggatcgtattatggctttaacggccgactcggtccgcactagcctgaggtaa

SEQ ID NO: 3226 - DNA, 30 bp, synthetic construct
  misc_feature 1..30: note = Synthetic
  source 1..30: mol_type = other DNA
atccaaatcttaatgatcttgaaaggctga

SEQ ID NO: 3227 - DNA, 33 bp, synthetic construct
  source 1..33: mol_type = other DNA
  misc_feature 1..33: note = Synthetic
ctggctataactttagtcttggtgctgccgtga

SEQ ID NO: 3228 - DNA, 162 bp, synthetic construct
  misc_feature 1..162: note = Synthetic
  source 1..162: mol_type = other DNA
ctgaaagacaagcacccagttctgggggtcatcactgaacagcagtccagcatcaacatttctggctataactttagtcttggtgctgccgtgaaggcaggggcagccctgttggatgggggtaacatgttagagtcaattttgcgactcggtccgcactag

SEQ ID NO: 3229 - DNA, 42 bp, synthetic construct
  misc_feature 1..42: note = Synthetic
  source 1..42: mol_type = other DNA
atgcccggttctggacaaagcggtcgaggagatcaaaggtag

SEQ ID NO: 3230 - DNA, 168 bp, synthetic construct
  misc_feature 1..168: note = Synthetic
  source 1..168: mol_type = other DNA
atgagacacctgcgcctcctgccttcaactgtgcccggtgagctggctgtgcttatgctggaggactttgtggatacagtattggaggacgaactgcatccaagtccgttcgagctgggacccacacttcaggatctctacgactcggtccgcactagcctgaggtaa

SEQ ID NO: 3231 - DNA, 192 bp, synthetic construct
  misc_feature 1..192: note = Synthetic
  source 1..192: mol_type = other DNA
ctgagctccgctcccagagaccgagaaaagccagacacctgcgcctcctgccttcaactgtgcccggtgagctggctgtgcttatgctggaggactttgtggatacagtattggaggacgaactgcatccaagtccgttcgagctgggacccacacttcaggatctctacgactcggtccgcactagcctga

SEQ ID NO: 3232 - DNA, 159 bp, synthetic construct
  source 1..159: mol_type = other DNA
  misc_feature 1..159: note = Synthetic
ctgcgcctcctgccttcaactgtgcccggtgagctggctgtgcttatgctggaggactttgtggatacagtattggaggacgaactgcatccaagtccgttcgagctgggacccacacttcaggatctctacgactcggtccgcactagcctgaggtaa

SEQ ID NO: 3233 - DNA, 48 bp, synthetic construct
  source 1..48: mol_type = other DNA
  misc_feature 1..48: note = Synthetic
atttgttactggatggtatatgtgcgttggctccggtttaaatcctag

SEQ ID NO: 3234 - DNA, 216 bp, synthetic construct
  misc_feature 1..216: note = Synthetic
  source 1..216: mol_type = other DNA
aggggtgtctctccgggcacagggcttcacaaacttccaggatctatcatgtttccgtttgtacctttaagcttgtatgtcgccaaaaagttattccgtgccagggggtttcgcttctgtcaaaagcctggcgtcttggctttggcccccgaggttgacccttgttcgattcagcatgaggtaactggcgactcggtccgcactagcctgaggtaa

SEQ ID NO: 3235 - DNA, 216 bp, synthetic construct
  source 1..216: mol_type = other DNA
  misc_feature 1..216: note = Synthetic
aggggtgtctctccgggcacagggcttcacaaacttccaggatctatcgcctttccgtttgtacctttaagcttgtatgtcgccaaaaagttattccgtgccagggggtttcgcttctgtcaaaagcctggcgtcttggctttggcccccgaggttgacccttgttcgattcagcatgaggtaactggcgactcggtccgcactagcctgaggtaa

SEQ ID NO: 3236 - DNA, 216 bp, synthetic construct
  source 1..216: mol_type = other DNA
  misc_feature 1..216: note = Synthetic
atgggtgtctctccgggcacagggcttcacaaacttccaggatctatcatgtttccgtttgtacctttaagcttgtatgtcgccaaaaagttattccgtgccagggggtttcgcttctgtcaaaagcctggcgtcttggctttggcccccgaggttgacccttgttcgattcagcatgaggtaactggcgactcggtccgcactagcctgaggtaa

SEQ ID NO: 3237 - DNA, 12 bp, synthetic construct
  source 1..12: mol_type = other DNA
  misc_feature 1..12: note = Synthetic
acgacgctttag

SEQ ID NO: 3238 - DNA, 57 bp, synthetic construct
  misc_feature 1..57: note = Synthetic
  source 1..57: mol_type = other DNA
acgttcaaaatatcttacagattcttcaccaagcgtacgaccaaacattatcaatga

SEQ ID NO: 3239 - DNA, 81 bp, synthetic construct
  source 1..81: mol_type = other DNA
  misc_feature 1..81: note = Synthetic
attccaccaatcatttttccgacggatgctctgatttcagtggcattctggcgttctccatcagtctccatctgttcgtaa

SEQ ID NO: 3240 - DNA, 75 bp, synthetic construct
  source 1..75: mol_type = other DNA
  misc_feature 1..75: note = Synthetic
ctggcgttctccatcagtctccatctgttcgtaagaccgtttggtgccttggcgactcggtccgcactagcctga

SEQ ID NO: 3241 - DNA, 36 bp, synthetic construct
  misc_feature 1..36: note = Synthetic
  source 1..36: mol_type = other DNA
acgtcgacgcgaagactagttgaaaataacgcttaa

SEQ ID NO: 3242 - DNA, 186 bp, synthetic construct
  source 1..186: mol_type = other DNA
  misc_feature 1..186: note = Synthetic
ttgaaaataacgcttaagatgagttgtaagaaaagcgcaaggcaaagcttatatgtcagtctctgcctcttttacattcttgtttttgcggccgctacggaagtggacttttattctccagagtgccattcgcatacctatgagatcgtcttgaattccgactcggtccgcactagcctgaggtaa

SEQ ID NO: 3243 - DNA, 186 bp, synthetic construct
  misc_feature 1..186: note = Synthetic
  source 1..186: mol_type = other DNA
ttgaaaataacgcttaaggccagttgtaagaaaagcgcaaggcaaagcttatatgtcagtctctgcctcttttacattcttgtttttgcggccgctacggaagtggacttttattctccagagtgccattcgcatacctatgagatcgtcttgaattccgactcggtccgcactagcctgaggtaa

SEQ ID NO: 3244 - DNA, 198 bp, synthetic construct
  misc_feature 1..198: note = Synthetic
  source 1..198: mol_type = other DNA
ctggtgacgtttatcggcaggcaccgcaccagcgcggaggagggcgtaacgttccgcctggaggacggcgccggggctctcggggccgcaggacccagcaaggcgtccattctcccgaaccaggccgttccgatcgccctgatcattacccccgtccgcatcgatccggacgactcggtccgcactagcctgaggtaa

SEQ ID NO: 3245 - DNA, 126 bp, synthetic construct
  misc_feature 1..126: note = Synthetic
  source 1..126: mol_type = other DNA
acgtccgtgtcgcgagaaaaggttcgcaggtcggccggggtgatctccagctgcttaaagttctcgtccagaaacgcctgcagctcgcgcagctccacgtcctcgctaggctgcagcagcacgtaa

SEQ ID NO: 3246 - DNA, 36 bp, synthetic construct
  source 1..36: mol_type = other DNA
  misc_feature 1..36: note = Synthetic
acgtcgacgcgaagactagttcaaaataacacttaa

SEQ ID NO: 3247 - DNA, 168 bp, synthetic construct
  misc_feature 1..168: note = Synthetic
  source 1..168: mol_type = other DNA
atgagttgtaagaaaggcgcaaggcaacgcttatatgtcagtctctggctcttttacattcttgtttttgcggccgctacggaaatggacttttattcttcagagtgccattcgcacacctatgagatcgtcttgaattccgactcggtccgcactagcctgaggtaa

SEQ ID NO: 3248 - DNA, 66 bp, synthetic construct
  misc_feature 1..66: note = Synthetic
  source 1..66: mol_type = other DNA
atgactagtaccgcgggcaacgccttcgagcacataaggagcattgcaggcgtggggagcaaatag

SEQ ID NO: 3249 - DNA, 54 bp, synthetic construct
  misc_feature 1..54: note = Synthetic
  source 1..54: mol_type = other DNA
gtgataacgccattacctacaaagcccagcgcgacaaaaatgccagagaactga

SEQ ID NO: 3250 - DNA, 15 bp, synthetic construct
  misc_feature 1..15: note = Synthetic
  source 1..15: mol_type = other DNA
atgtcaccggggtaa

SEQ ID NO: 3251 - DNA, 24 bp, synthetic construct
  misc_feature 1..24: note = Synthetic
  source 1..24: mol_type = other DNA
ttggggcaataccggcattggtag

SEQ ID NO: 3252 - DNA, 195 bp, synthetic construct
  source 1..195: mol_type = other DNA
  misc_feature 1..195: note = Synthetic
gtgaacaagttttttgatcagtggataatgactaaaaaaccaggaaagtccggcaatcgtcggactgtcaatatgctaaagcgcggagcatcccgcgcacttggcccactagccaagtttaagaggatgttttccagcctgctggatgggagaggaccattacggatcgactcggtccgcactagcctgaggtaa

SEQ ID NO: 3253 - DNA, 57 bp, synthetic construct
  misc_feature 1..57: note = Synthetic
  source 1..57: mol_type = other DNA
atgaaaaaaaacctgaacatgctcgacggtagcgccgtctcttttgacacggaataa

SEQ ID NO: 3254 - DNA, 168 bp, synthetic construct
  misc_feature 1..168: note = Synthetic
  source 1..168: mol_type = other DNA
atgtcctgcgcggccgccatcctgaagtccatcggtgggctcgcgcttttccaggtggccaacggcgccatcgagatgctcaagcactgcctcatgtacttctacgagcagcgcttgcgcgccaactcctttgctttcgtcgactcggtccgcactagcctgaggtaa

SEQ ID NO: 3255 - DNA, 195 bp, synthetic construct
  misc_feature 1..195: note = Synthetic
  source 1..195: mol_type = other DNA
ctgcatcgtcagctcaggaagcgtcctccggcgcagaagcggcatcagcaaaggccactgaagcggaaaaaagtgccgcagccgcagagtcctcaaaaaacgcggcggccaccagtgccggtgcggcgaaaacgtcagaagccaatgctgcagcgtcacaacaatcacgactcggtccgcactagcctgaggtaa

SEQ ID NO: 3256 - DNA, 180 bp, synthetic construct
  misc_feature 1..180: note = Synthetic
  source 1..180: mol_type = other DNA
gtgtttttggaccagccttgccatatgctgcaggaggcctatcccacgctcgccgccagccacagagttatgcttgacgagtacatgtcaaacaagcagacacacgccccagtacacatgggccagtatctcattgaagaggtggcgccgatgaagacgactcggtccgcactagcctga

SEQ ID NO: 3257 - DNA, 54 bp, synthetic construct
  misc_feature 1..54: note = Synthetic
  source 1..54: mol_type = other DNA
ctgctctcaaaaccgatgtgttcagtcctcctgacactgctgcatcaaacatga

SEQ ID NO: 3258 - DNA, 24 bp, synthetic construct
  source 1..24: mol_type = other DNA
  misc_feature 1..24: note = Synthetic
atgcagtccattagtgcacagtga

SEQ ID NO: 3259 - DNA, 99 bp, synthetic construct
  source 1..99: mol_type = other DNA
  misc_feature 1..99: note = Synthetic
acgacacctgtgtgcatgtggcataagtctttatactggtcccagactgcattttcatacttcctggaatcagtttcgactcggtccgcactagcctga

SEQ ID NO: 3260 - DNA, 99 bp, synthetic construct
  misc_feature 1..99: note = Synthetic
  source 1..99: mol_type = other DNA
acgacacctgtgtgcatgtggcataagtctttatactggtcccagactgcattttcatacttcgccgaatcagtttcgactcggtccgcactagcctga

SEQ ID NO: 3261 - DNA, 54 bp, synthetic construct
  source 1..54: mol_type = other DNA
  misc_feature 1..54: note = Synthetic
ctgctctcaaaaccggcctgttcagtcctcctgacactgctgcatcaaacatga

SEQ ID NO: 3262 - DNA, 192 bp, synthetic construct
  source 1..192: mol_type = other DNA
  misc_feature 1..192: note = Synthetic
agggccaccgtggacgctgtcattatgaacaaccgccgaggctccaagccgtctatccaacgttccgcgttcgcctcttatatacactctgcaatgcagtccgactctgcccctctacccagggtggaatatgtgttcgaaacaagcaaatttagaatgacgtccgactcggtccgcactagcctgaggtaa

SEQ ID NO: 3263 - DNA, 30 bp, synthetic construct
  misc_feature 1..30: note = Synthetic
  source 1..30: mol_type = other DNA
atgtgttcgaaacaagcaaatttagaatga

SEQ ID NO: 3264 - DNA, 192 bp, synthetic construct
  source 1..192: mol_type = other DNA
  misc_feature 1..192: note = Synthetic
agggccaccgtggacgctgtcattgccaacaaccgccgaggctccaagccgtctatccaacgttccgcgttcgcctcttatatacactctgcaatgcagtccgactctgcccctctacccagggtggaatatgtgttcgaaacaagcaaatttagaatgacgtccgactcggtccgcactagcctgaggtaa

SEQ ID NO: 3265 - DNA, 150 bp, synthetic construct
  misc_feature 1..150: note = Synthetic
  source 1..150: mol_type = other DNA
atcctgaagtccatcggtgggctcgcgcttttccaggtggccaacggcgccatcgagatgctcaagcactgcctcatgtacttctacgagcagcgcttgcgcgccaactcctttgctttcgtcgactcggtccgcactagcctgaggtaa

SEQ ID NO: 3266 - DNA, 138 bp, synthetic construct
  misc_feature 1..138: note = Synthetic
  source 1..138: mol_type = other DNA
atgttgaagagaggatctagaaaatcctcttccatactggctaggcgtcctactcctaaaaaaatgaacatagttactgatttggaaaatcgtttaaagaagaatagctacgactcggtccgcactagcctgaggtaa

SEQ ID NO: 3267 - DNA, 156 bp, synthetic construct
  source 1..156: mol_type = other DNA
  misc_feature 1..156: note = Synthetic
attccatcgagatcaaagatgttgaagagaggatctagaaaatcctcttccatactggctaggcgtcctactcctaaaaaaatgaacatagttactgatttggaaaatcgtttaaagaagaatagctacgactcggtccgcactagcctgaggtaa

SEQ ID NO: 3268 - DNA, 72 bp, synthetic construct
  misc_feature 1..72: note = Synthetic
  source 1..72: mol_type = other DNA
atgacgaaaaccagagaatgccatcacgggtccagatcccggtcttttcgcagatataacgggcatcagtaa

SEQ ID NO: 3269 - DNA, 180 bp, synthetic construct
  source 1..180: mol_type = other DNA
  misc_feature 1..180: note = Synthetic
gtgtttttggaccagccttgccatatgctgcaggaggcctatcccacgctcgccgccagccacagagttatgctagacgagtacatgtcaaacaagcagacacacgccccagtacacatgggccagtatctcattgaagaggtggcgccgatgaagacgactcggtccgcactagcctga

SEQ ID NO: 3270 - DNA, 51 bp, synthetic construct
  misc_feature 1..51: note = Synthetic
  source 1..51: mol_type = other DNA
acgccccagtacacatgggccagtatctcattgaagaggtggcgccgatga

SEQ ID NO: 3271 - DNA, 195 bp, synthetic construct
  misc_feature 1..195: note = Synthetic
  source 1..195: mol_type = other DNA
ctgcatcgtcagctcaggaagcgtcctccggcgcagaagcggcatcagcaaaggccactgaagcggaaaaaagtgccgcagccgcagagtcctcaaaaaacgcggcggccaccagtgccggcccggcgaaaacgtcagaaacgaatgctgcagcgtcacaacaatcacgactcggtccgcactagcctgaggtaa

SEQ ID NO: 3272 - DNA, 138 bp, synthetic construct
  source 1..138: mol_type = other DNA
  misc_feature 1..138: note = Synthetic
ctgaagcggaaaaaagtgccgcagccgcagagtcctcaaaaaacgcggcggccaccagtgccggtgcggcgaaaacgtcagaaacgaatgctgcagcgtcacaacaatcacgactcggtccgcactagcctgaggtaa

SEQ ID NO: 3273 - DNA, 195 bp, synthetic construct
  source 1..195: mol_type = other DNA
  misc_feature 1..195: note = Synthetic
ctgcatcgtcagctcaggaagcgtcctccggcgcagaagcggcatcagcaaaggccactgaagcggaaaaaagtgccgcagccgcagagtcctcaaaaaacgcggcggccaccagtgccggtgcggcgaaaacgtcagaaacgaatgctgcagcgtcacaacagccacgactcggtccgcactagcctgaggtaa

SEQ ID NO: 3274 - DNA, 111 bp, synthetic construct
  misc_feature 1..111: note = Synthetic
  source 1..111: mol_type = other DNA
atggtaccgccgccggaattcaggagagctgatatggtagtggaaagattttctgtatcattatccccaagtttaacttttaccgactcggtccgcactagcctgaggtaa

SEQ ID NO: 3275 - DNA, 168 bp, synthetic construct
  source 1..168: mol_type = other DNA
  misc_feature 1..168: note = Synthetic
atggctagcaagtccaacaagcaagtaactgttgaggtcagtaataatggccgcagcaggagtaaatcaagggcccgttcacaatctaggggccgagacaaatcagtcaagatcacagtcaattcaagaaacagagccagcgactcggtccgcactagcctgaggtaa

SEQ ID NO: 3276 - DNA, 201 bp, synthetic construct
  misc_feature 1..201: note = Synthetic
  source 1..201: mol_type = other DNA
atcgcatttggaggggaggaccaaagaagtgtggccgctagcaagtccaacaagcaagtaactgttgaggtcagtaataatggccgcagcaggagtaaatcaagggcccgttcacaatctaggggccgagacaaatcagtcaagatcacagtcaattcaagaaacagagccagcgactcggtccgcactagcctgaggtaa

SEQ ID NO: 3277 - DNA, 168 bp, synthetic construct
  misc_feature 1..168: note = Synthetic
  source 1..168: mol_type = other DNA
atggcacaaacacagctaaagctttatgtcaatgatggtgatccctccaacagactccttgcatttcctatagtgatgaaagagtctgctcaaggggggaaagtgcttcaaccacaattgagaatatcatatctaggagacgactcggtccgcactagcctgaggtaa

SEQ ID NO: 3278 - DNA, 48 bp, synthetic construct
  source 1..48: mol_type = other DNA
  misc_feature 1..48: note = Synthetic
atgtcaatgatggtgatccctccaacagactccttgcatttcctatag

SEQ ID NO: 3279 - DNA, 150 bp, synthetic construct
  source 1..150: mol_type = other DNA
  misc_feature 1..150: note = Synthetic
aagctttatgtcaatgatggtgatccctccaacagactccttgcatttcctatagtgatgaaagagtctgctcaaggggggaaagtgcttcaaccacaattgagaatatcatatctaggagacgactcggtccgcactagcctgaggtaa

SEQ ID NO: 3280 - DNA, 150 bp, synthetic construct
  source 1..150: mol_type = other DNA
  misc_feature 1..150: note = Synthetic
atgttcttcatgcctaaacgaaaaatacccgatcctattgatagattacgacgtgctaatctagcgtgtgaagacgataaattaatgatctatggattaccatggataacaactcaaacatctgcgtcgactcggtccgcactagcctga

SEQ ID NO: 3281 - DNA, 150 bp, synthetic construct
  misc_feature 1..150: note = Synthetic
  source 1..150: mol_type = other DNA
atgttcttcatgcctaaacgaaaaatacccgatcctattgatagattacgacgtgctaatctagcgtgtgaagacgataaattaatgatctatggattaccatggatgacaactcaaacatctgcgtcgactcggtccgcactagcctga

SEQ ID NO: 3282 - DNA, 150 bp, synthetic construct
  source 1..150: mol_type = other DNA
  misc_feature 1..150: note = Synthetic
atgttcttcatgcctaaacgaaaaatacccgatcctattgatagattacgccgtgctaatttagcgtgtgaagacgataaattaatgatctatggattaccatggatgacaactcaaacatctgcgtcgactcggtccgcactagcctga

SEQ ID NO: 3283 - DNA, 150 bp, synthetic construct
  misc_feature 1..150: note = Synthetic
  source 1..150: mol_type = other DNA
atgttcttcatgcataaacgaaaaatacccgatcctattgatagattacgacgtgctaatctagcgtgtgaagacgataaattaatgatctatggattaccatggataacaactcaaacatctgcatcgactcggtccgcactagcctga

SEQ ID NO: 3284 - DNA, 198 bp, synthetic construct
  misc_feature 1..198: note = Synthetic
  source 1..198: mol_type = other DNA
ttgtttataatagtcgtttttctcgcagaaatgggaaaggacgacggtaagaagaagaaggggccgggctcctccggatggttgttaccaccggggcgcgctggcttaggaaggaaggaggagaaaaagaagaaggagaagaggggtgtgcggagcacatctcagccggtcgactcggtccgcactagcctgaggtaa

SEQ ID NO: 3285 - DNA, 24 bp, synthetic construct
  misc_feature 1..24: note = Synthetic
  source 1..24: mol_type = other DNA
ataacgaaggttcgactatgttag

SEQ ID NO: 3286 - DNA, 204 bp, synthetic construct
  source 1..204: mol_type = other DNA
  misc_feature 1..204: note = Synthetic
atgttagcattcgcagagataacatctatcatggtgaaccttatgttcatgggtgcggtggcggtttgtgtgggtattctgggtatttcctgttttgtaggactgaaggagataatatactttatatttgttagtgttaattccatgtggcctttttgtaataagttattgactaccgactcggtccgcactagcctgaggtaa

SEQ ID NO: 3287 - DNA, 60 bp, synthetic construct
  source 1..60: mol_type = other DNA
  misc_feature 1..60: note = Synthetic
atgtggcctttttgtgatacgttattgactaccgactcggtccgcactagcctgaggtaa

SEQ ID NO: 3288 - DNA, 48 bp, synthetic construct
  misc_feature 1..48: note = Synthetic
  source 1..48: mol_type = other DNA
atgttgaacttttccatatacgactcggtccgcactagcctgaggtaa

SEQ ID NO: 3289 - DNA, 186 bp, synthetic construct
  misc_feature 1..186: note = Synthetic
  source 1..186: mol_type = other DNA
attaaaacagaactgctggaaacgcagaccgtggatttcagcgtcggcgcagaagggcttcgccatgtaccgggcgatgttattgaaatctgcgatgatgactatgccggtatcagcaccggtggtcgtgtgctggcggtgaacagccagacccggacgctgacgactcggtccgcactagcctga

SEQ ID NO: 3290 - DNA, 78 bp, synthetic construct
  misc_feature 1..78: note = Synthetic
  source 1..78: mol_type = other DNA
atgtaccgggcgatgttattgaaatctgcgatgatgactatgccggtatcagcaccggtggtcgtgtgctggcggtga

SEQ ID NO: 3291 - DNA, 219 bp, synthetic construct
  source 1..219: mol_type = other DNA
  misc_feature 1..219: note = Synthetic
ctgctgatgcccaactacgcgctgcatccttccatcatccccacgccgggctaccgcggcacgcgcttctaccgcggtcatacaaccagccgccgccgcaagaccaccacccgccgccgccgtcgccgcacagccgctgcatctacccctgccgccctggtgcggagagtgtaccgccgcggccgcgcgcctctgacgactcggtccgcactagcctga

SEQ ID NO: 3292 - DNA, 42 bp, synthetic construct
  misc_feature 1..42: note = Synthetic
  source 1..42: mol_type = other DNA
ttgctattacacgtgctaagaagggtattctctgtgtcatga

SEQ ID NO: 3293 - DNA, 21 bp, synthetic construct
  misc_feature 1..21: note = Synthetic
  source 1..21: mol_type = other DNA
gtgtccgtgtcctcaacgtag

SEQ ID NO: 3294 - DNA, 153 bp, synthetic construct
  source 1..153: mol_type = other DNA
  misc_feature 1..153: note = Synthetic
atgagctcggcagacggactctctggacccggatttactatttccattatttatgcacttgaaatcgcgcccgcgggaaaagtgaatttctatcgccacacgtggagcggccgcatcatgtcgcccgactcggtccgcactagcctgaggtaa

SEQ ID NO: 3295 - DNA, 33 bp, synthetic construct
  misc_feature 1..33: note = Synthetic
  source 1..33: mol_type = other DNA
atgcacttgaaatcgcgcccgcgggaaaagtga

SEQ ID NO: 3296 - DNA, 111 bp, synthetic construct
  source 1..111: mol_type = other DNA
  misc_feature 1..111: note = Synthetic
atgtccgccactcgtcaccaccggtgttgtaccctcaggttccgtcgccggtgtcgcgcccgttgccgccgcagtcgaaacaccagctgctcctccccggcccgtgtgtga

SEQ ID NO: 3297 - DNA, 117 bp, synthetic construct
  misc_feature 1..117: note = Synthetic
  source 1..117: mol_type = other DNA
ctgcgcctcttcggtatatttcagccgccacgcttcggtatcgctctgctgctgcgcatttttgtcctgttgagtctgctgctcagcctcgactcggtccgcactagcctgaggtaa

SEQ ID NO: 3298 - DNA, 39 bp, synthetic construct
  source 1..39: mol_type = other DNA
  misc_feature 1..39: note = Synthetic
attttcccgtctttcagtgccttgttcagttcttcctga

SEQ ID NO: 3299 - DNA, 78 bp, synthetic construct
  misc_feature 1..78: note = Synthetic
  source 1..78: mol_type = other DNA
atcgctctgctgctgcgcatttttgtcctgttgagtctgctgctcagcctcgactcggtccgcactagcctgaggtaa

SEQ ID NO: 3300 - DNA, 30 bp, synthetic construct
  source 1..30: mol_type = other DNA
  misc_feature 1..30: note = Synthetic
ctgcgcctcttcggtatatttcagccgtga

SEQ ID NO: 3301 - DNA, 72 bp, synthetic construct
  misc_feature 1..72: note = Synthetic
  source 1..72: mol_type = other DNA
ctgctgctgcgcatttttgtcctgttgagtctgctgctcagcctcgactcggtccgcactagcctgaggtaa

SEQ ID NO: 3302 - DNA, 147 bp, synthetic construct
  misc_feature 1..147: note = Synthetic
  source 1..147: mol_type = other DNA
atcaccaccgtcagtgaaaacgtgcctgctctcacagatcacgggacgctaccgctgcgcagcagtatccgcggagtccagcgagtgaccgtcactgacgcccgtcgccgcacctgtccctacgcgactcggtccgcactagcctga

SEQ ID NO: 3303 - DNA, 69 bp, synthetic construct
  source 1..69: mol_type = other DNA
  misc_feature 1..69: note = Synthetic
atgctcattataaaaaacttaggagcaaagcataacgcctcgcactcccaacatggcagaaatttatga

SEQ ID NO: 3304 - DNA, 189 bp, synthetic construct
  misc_feature 1..189: note = Synthetic
  source 1..189: mol_type = other DNA
ttgctggttaagataaagggggtaccatggtcgatgaacaagtggcggtggaacacggcaccgtcagccacacaatcagccgggaggaagatggcgtggtccacgagcggcgtgtcttggccagcggggagagggtggaagtcttttataaggctccggccccacgcgactcggtccgcactagcctga

SEQ ID NO: 3305 - DNA, 24 bp, synthetic construct
  source 1..24: mol_type = other DNA
  misc_feature 1..24: note = Synthetic
acggccacttgctggttaagataa

SEQ ID NO: 3306 - DNA, 156 bp, synthetic construct
  misc_feature 1..156: note = Synthetic
  source 1..156: mol_type = other DNA
atgaacaagtggcggtggaacacggcaccgtcagccacacaatcagccgggaggaagatggcgtggtccacgagcggcgtgtcttggccagcggggagagggtggaagtcttttataaggctccggccccacgcgactcggtccgcactagcctga

SEQ ID NO: 3307 - DNA, 216 bp, synthetic construct
  misc_feature 1..216: note = Synthetic
  source 1..216: mol_type = other DNA
aggcgacgagcactgagtgacgaggttagcaagtggttccggacaggcttgggggccgaactggaggtggcactaacatctaggtatgaggtagagggctgcaaaagtatcctcatagccatgaccaccttggcgagggacattaaggcgtttaagaaattgagaggacctgttatacacctctacggcgactcggtccgcactagcctgaggtaa

SEQ ID NO: 3308 - DNA, 123 bp, synthetic construct
  misc_feature 1..123: note = Synthetic
  source 1..123: mol_type = other DNA
atgatcactgactgtgtggccaatcctcaaatgaagcaggtgtttgagcaacgattggcaaaggccagcaccgaggatgctctgaatgatatcaagcgagacatcataagaagcgccatatga

SEQ ID NO: 3309 - DNA, 75 bp, synthetic construct
  source 1..75: mol_type = other DNA
  misc_feature 1..75: note = Synthetic
atgtggcagatctcgatgatggttacgccagactatcaaatatgctgcttgaggcttattcgggcgcagatctga

SEQ ID NO: 3310 - DNA, 177 bp, synthetic construct
  source 1..177: mol_type = other DNA
  misc_feature 1..177: note = Synthetic
atgctgcttgaggcttattcgggcgcagatctgaccaagcgacagtttaaagtgctgcttgccattctgcgtaaaacctatgggtggaataaaccaatggacagaatcaccgattctcaacttagcgagattacaaagttacctgtcaacgactcggtccgcactagcctgaggtaa

SEQ ID NO: 3311 - DNA, 177 bp, synthetic construct
  misc_feature 1..177: note = Synthetic
  source 1..177: mol_type = other DNA
atgctgcttgaggcttattcgggcgcagatctgaccaagcgacagtttaaagtgctgcttgccattctgcgtaaaacctatgggtggaataaaccaatggacagaatcaccgattctcaacttagcgagattacaaagttacgcctcaacgactcggtccgcactagcctgaggtaa

SEQ ID NO: 3312 - DNA, 57 bp, synthetic construct
  misc_feature 1..57: note = Synthetic
  source 1..57: mol_type = other DNA
atggttacgccagactatcaaatatgctgcttgaggcttattcgggcgcagatctga

SEQ ID NO: 3313 - DNA, 168 bp, synthetic construct
  misc_feature 1..168: note = Synthetic
  source 1..168: mol_type = other DNA
atgaaacggagtgtcatttttgttttgctgattttttgcgccctacctgtgctttgctcccaaacctcagcgcctcccaaaagacatatttcctgcagattcactcaaatatggaacattcccagctgctacaacaaacacgactcggtccgcactagcctgaggtaa

SEQ ID NO: 3314 - DNA, 186 bp, synthetic construct
  misc_feature 1..186: note = Synthetic
  source 1..186: mol_type = other DNA
aagaccgcgatccgcccgctctcggacacgctcatccagtgctgcacgcgctcctcgacggccgcacggaactcgtcttcgtccgcgcacgagtacgccatggtcatcatgacgctgaagccgtccacaaacacggcggggaagcgctcgtcgccgccaggctcgactcggtccgcactagcctga

SEQ ID NO: 3315 - DNA, 111 bp, synthetic construct
  source 1..111: mol_type = other DNA
  misc_feature 1..111: note = Synthetic
aagtccgccactcgtcaccaccggtgttgtaccctcaggttccgtcgccggtgtcgcgcccgttgccgccgcagtcgaaacaccagctgctcctccccggcccgtgtgtga

SEQ ID NO: 3316 - DNA, 111 bp, synthetic construct
  source 1..111: mol_type = other DNA
  misc_feature 1..111: note = Synthetic
atatccgccactcgtcaccaccggtgttgtaccctcaggttccgtcgccggtgtcgcgcccgttgccgccgcagtcgaaacaccagctgctcctccccggcccgtgtgtga

SEQ ID NO: 3317 - DNA, 69 bp, synthetic construct
  source 1..69: mol_type = other DNA
  misc_feature 1..69: note = Synthetic
atgtccgccgacttgttgtccaccaagtacacgcgagtggtgtcgtactgcggagccagctccgagtaa

SEQ ID NO: 3318 - DNA, 198 bp, synthetic construct
  source 1..198: mol_type = other DNA
  misc_feature 1..198: note = Synthetic
atgaaaaaaacatgtaacaccactggcaagatgaagatcattcggaaaattgttaagagctgtaaggatgatgagatgcaaaagcccaacccagtctctgcccctcctgacgacgatgacctatggcttccccctcctgaatatgtcccgctgtcagagatgactgggaacgactcggtccgcactagcctgaggtaa

SEQ ID NO: 3319 - DNA, 96 bp, synthetic construct
  misc_feature 1..96: note = Synthetic
  source 1..96: mol_type = other DNA
atgatgagatgcaaaagcccaacccagtctctgcccctcctgacgacgatgacctatggcttccccctcctgaatatgtcccgctgtcagagatga

SEQ ID NO: 3320 - DNA, 180 bp, synthetic construct
  source 1..180: mol_type = other DNA
  misc_feature 1..180: note = Synthetic
acgtcggttgttatggccgcgagaacgcgcagcctggtcgaacgcagacgcgtgttgatggcaggggtacgaagccatacgcgcttctacaaggcgctggccgaagaggtgcgggagtttcacgccaccaagatctgcggcacgctgttgaccgactcggtccgcactagcctgaggtaa

SEQ ID NO: 3321 - DNA, 111 bp, synthetic construct
  misc_feature 1..111: note = Synthetic
  source 1..111: mol_type = other DNA
atgcccgccactcgtcaccaccggtgttgtaccctcaggttccgtcgccggtgtcgcgcccgttgccgccgcagtcgaaacaccagctgctcctccccggcccgtgtgtga

SEQ ID NO: 3322 - DNA, 111 bp, synthetic construct
  misc_feature 1..111: note = Synthetic
  source 1..111: mol_type = other DNA
atgtccaccactcgtcaccaccggtgttgtaccctcaggttccgtcgccggtgtcgcgcccgttgccgccgcagtcgaaacaccagctgctcctccccggcccgtgtgtga

SEQ ID NO: 3323 - DNA, 111 bp, synthetic construct
  source 1..111: mol_type = other DNA
  misc_feature 1..111: note = Synthetic
atgtccgacactcgtcaccaccggtgttgtaccctcaggttccgtcgccggtgtcgcgcccgttgccgccgcagtcgaaacaccagctgctcctccccggcccgtgtgtga

SEQ ID NO: 3324 - DNA, 111 bp, synthetic construct
  misc_feature 1..111: note = Synthetic
  source 1..111: mol_type = other DNA
atgtccgcaactcgtcaccaccggtgttgtaccctcaggttccgtcgccggtgtcgcgcccgttgccgccgcagtcgaaacaccagctgctcctccccggcccgtgtgtga

SEQ ID NO: 3325 - DNA, 111 bp, synthetic construct
  source 1..111: mol_type = other DNA
  misc_feature 1..111: note = Synthetic
atgtccgccaatcgtcaccaccggtgttgtaccctcaggttccgtcgccggtgtcgcgcccgttgccgccgcagtcgaaacaccagctgctcctccccggcccgtgtgtga

SEQ ID NO: 3326 - DNA, 111 bp, synthetic construct
  source 1..111: mol_type = other DNA
  misc_feature 1..111: note = Synthetic
atgtccgccacgcgtcaccaccggtgttgtaccctcaggttccgtcgccggtgtcgcgcccgttgccgccgcagtcgaaacaccagctgctcctccccggcccgtgtgtga

SEQ ID NO: 3327 - DNA, 111 bp, synthetic construct
  misc_feature 1..111: note = Synthetic
  source 1..111: mol_type = other DNA
atgtccgcctctcgtcaccaccggtgttgtaccctcaggttccgtcgccggtgtcgcgcccgttgccgccgcagtcgaaacaccagctgctcctccccggcccgtgtgtga

SEQ ID NO: 3328 - DNA, 111 bp, synthetic construct
  source 1..111: mol_type = other DNA
  misc_feature 1..111: note = Synthetic
atgtcggccactcgtcaccaccggtgttgtaccctcaggttccgtcgccggtgtcgcgcccgttgccgccgcagtcgaaacaccagctgctcctccccggcccgtgtgtga

SEQ ID NO: 3329 - DNA, 111 bp, synthetic construct
  source 1..111: mol_type = other DNA
  misc_feature 1..111: note = Synthetic
atgttcgccactcgtcaccaccggtgttgtaccctcaggttccgtcgccggtgtcgcgcccgttgccgccgcagtcgaaacaccagctgctcctccccggcccgtgtgtga

SEQ ID NO: 3330 - DNA, 111 bp, synthetic construct
  misc_feature 1..111: note = Synthetic
  source 1..111: mol_type = other DNA
gtgtccgccactcgtcaccaccggtgttgtaccctcaggttccgtcgccggtgtcgcgcccgttgccgccgcagtcgaaacaccagctgctcctccccggcccgtgtgtga

SEQ ID NO: 3331 - DNA, 135 bp, synthetic construct
  source 1..135: mol_type = other DNA
  misc_feature 1..135: note = Synthetic
acgagaataatgatgaatggaggccgactcaagaagtcacacatcaggaggtacatctcagtgagttctaaccatcagtctcggccgaactcgtttgctgaattcctaaacaagacatactcgagtgattcttaa

SEQ ID NO: 3332 - DNA, 15 bp, synthetic construct
  misc_feature 1..15: note = Synthetic
  source 1..15: mol_type = other DNA
atgctttgcttataa

SEQ ID NO: 3333 - DNA, 39 bp, synthetic construct
  misc_feature 1..39: note = Synthetic
  source 1..39: mol_type = other DNA
ttgcagatgggcacgttggacgaccgttcttgctcttga

SEQ ID NO: 3334 - DNA, 36 bp, synthetic construct
  source 1..36: mol_type = other DNA
  misc_feature 1..36: note = Synthetic
ctgaacataactaacctacgactcggtccgcactag

SEQ ID NO: 3335 - DNA, 195 bp, synthetic construct
  misc_feature 1..195: note = Synthetic
  source 1..195: mol_type = other DNA
gtgagccgtaattatcatctgcgcgggcgtattctgcaggtgccgtcgaactataacccgcagacgcggcaatacagcggtatctgggacggaacgtttaaaccggcatacagcaacaacatggcctggtgtctgtgggatatgctgacccatccgcgctacggcatcgactcggtccgcactagcctgaggtaa

SEQ ID NO: 3336 - DNA, 195 bp, synthetic construct
  misc_feature 1..195: note = Synthetic
  source 1..195: mol_type = other DNA
gtgagccgtaattatcatctgcgcgggcgtattctgcaggtgccgtcgaactataacccgcagacgcggcaatacagcggtatctgggacggaacgtttaaaccggcatacagcaacaacgccgcctggtgtctgtgggatatgctgacccatccgcgctacggcatcgactcggtccgcactagcctgaggtaa

SEQ ID NO: 3337 - DNA, 156 bp, synthetic construct
  source 1..156: mol_type = other DNA
  misc_feature 1..156: note = Synthetic
acgcgcagcctggtcgaacgcagacgcgtgttgatggcaggggtacgaagccatacgcgcttctacaaggcgctggccgaagaggtgcgggagtttcacgccaccaagatctgcggcacgctgttgaccgactcggtccgcactagcctgaggtaa

SEQ ID NO: 3338 - DNA, 201 bp, synthetic construct
  misc_feature 1..201: note = Synthetic
  source 1..201: mol_type = other DNA
gtgcacaaaccaattcacgccccctactcaggaatggcattggtacctatccctgaataccagttggaaactggaattccgggcatcccagactggctcttcaaccttgtcgcgtcatacttgcccgagttgcctagtttgcaggacgtgttcaatagaattgcctttggaatcgactcggtccgcactagcctgaggtaa

SEQ ID NO: 3339 - DNA, 45 bp, synthetic construct
  misc_feature 1..45: note = Synthetic
  source 1..45: mol_type = other DNA
ctggctcttcaaccttgtcgcgtcatacttgcccgagttgcctag

SEQ ID NO: 3340 - DNA, 201 bp, synthetic construct
  misc_feature 1..201: note = Synthetic
  source 1..201: mol_type = other DNA
gtgcacaaaccaattcacgccccctactcaggagccgcattggtacctatccctgaataccagttggaaactggaattccgggcatcccagactggctcttcaaccttgtcgcgtcatacttgcccgagttgcctagtttgcaggacgtgttcaatagaattgcctttggaatcgactcggtccgcactagcctgaggtaa

SEQ ID NO: 3341 - DNA, 144 bp, synthetic construct
  misc_feature 1..144: note = Synthetic
  source 1..144: mol_type = other DNA
agggctacctcccatcgcgacggtgacagtggatccatgagagaggcaccgcacgctgcatggctaaataccgtgaatcccctgacgtcgtctttcgtcccgaacgcgtcatgttgggggcgaggcgtaaaccgtcgaggttga

SEQ ID NO: 3342 - DNA, 129 bp, synthetic construct
  misc_feature 1..129: note = Synthetic
  source 1..129: mol_type = other DNA
atggctaaataccgtgaatcccctgacgtcgtctttcgtcccgaacgcgtcatgttgggggcgaggcgtaaaccgtcgaggttgaaaaaccgcgtatctgcgacccgtccggactacgttgttttttag

SEQ ID NO: 3343 - DNA, 63 bp, synthetic construct
  misc_feature 1..63: note = Synthetic
  source 1..63: mol_type = other DNA
ctgacgtcgtctttcgtcccgaacgcgtcatgttgggggcgaggcgtaaaccgtcgaggttga

SEQ ID NO: 3344 - DNA, 21 bp, synthetic construct
  misc_feature 1..21: note = Synthetic
  source 1..21: mol_type = other DNA
acggtgacagtggatccatga

SEQ ID NO: 3345 - DNA, 78 bp, synthetic construct
  misc_feature 1..78: note = Synthetic
  source 1..78: mol_type = other DNA
atgttgggggcgaggcgtaaaccgtcgaggttgaaaaaccgcgtatctgcgacccgtccggactacgttgttttttag

SEQ ID NO: 3346 - DNA, 144 bp, synthetic construct
  misc_feature 1..144: note = Synthetic
  source 1..144: mol_type = other DNA
agggctacctcccatcgcgacggtgacagtggatccatgagagaggcgccgcaccctgcatggctaaataccgtgaatcccctgacgtcgtctttcgtcccgaacgcgtcatgttgggggcgaggcgtaaaccgtcgaggttga

SEQ ID NO: 3347 - DNA, 144 bp, synthetic construct
  source 1..144: mol_type = other DNA
  misc_feature 1..144: note = Synthetic
agggctacctcccatcgcgacggtgacagtggatccatgagagaggcgccgcacgcagcatggctaaataccgtgaatcccctgacgtcgtctttcgtcccgaacgcgtcatgttgggggcgaggcgtaaaccgtcgaggttga

SEQ ID NO: 3348 - DNA, 75 bp, synthetic construct
  source 1..75: mol_type = other DNA
  misc_feature 1..75: note = Synthetic
ttgggggcgaggcgtaaaccgtcgaggttgaaaaaccgcgtatctgcgacccgtccggactacgttgttttttag

SEQ ID NO: 3349 - DNA, 195 bp, synthetic construct
  source 1..195: mol_type = other DNA
  misc_feature 1..195: note = Synthetic
gtgagccgtaattatcatctgcgcgggcgtattctgcaggtgccgtcgaactataacccgcagacgcggcagcccagcggtatctgggacggaacgtttaaaccggcatacagcaacaacatggcctggtgtctgtgggatatgctgacccatccgcgctacggcatcgactcggtccgcactagcctgaggtaa

SEQ ID NO: 3350 - DNA, 123 bp, synthetic construct
  source 1..123: mol_type = other DNA
  misc_feature 1..123: note = Synthetic
atcagtttaatgcagtcgtgtcccgccatgaatccaattactttgtgtgtattattatccaatccaatgaacaaatatccaccctctgtgttggccgactcggtccgcactagcctgaggtaa

SEQ ID NO: 3351 - DNA, 15 bp, synthetic construct
  source 1..15: mol_type = other DNA
  misc_feature 1..15: note = Synthetic
atgcatgcgctctag

SEQ ID NO: 3352 - DNA, 18 bp, synthetic construct
  source 1..18: mol_type = other DNA
  misc_feature 1..18: note = Synthetic
gtgacagtggatccatga

SEQ ID NO: 3353 - DNA, 195 bp, synthetic construct
  source 1..195: mol_type = other DNA
  misc_feature 1..195: note = Synthetic
atcaaagtcacaacactccacacagacgcccctccagccccgagcccagtccacgatccgtcaagcttttacgggtcctccctatttaacgaggacaccgcatctcgcaaggggacaagtgaagagatccatctacttggaatcaggtggaataccgttctgattgtcgactcggtccgcactagcctgaggtaa

SEQ ID NO: 3354 - DNA, 63 bp, synthetic construct
  misc_feature 1..63: note = Synthetic
  source 1..63: mol_type = other DNA
ttggtgggcatgtgttggaattgctcccaccctcaattttcgcttgccttcttcccttgttaa

SEQ ID NO: 3355 - DNA, 54 bp, synthetic construct
  source 1..54: mol_type = other DNA
  misc_feature 1..54: note = Synthetic
atgtgttggaattgctcccaccctcaattttcgcttgccttcttcccttgttaa

SEQ ID NO: 3356 - DNA, 93 bp, synthetic construct
  misc_feature 1..93: note = Synthetic
  source 1..93: mol_type = other DNA
ttggcacttcattgcaccctgtgctgtggaactgtcagctatcctttgctggttatactgaatctgctgttaattcgactcggtccgcactag

SEQ ID NO: 3357 - DNA, 204 bp, synthetic construct
  source 1..204: mol_type = other DNA
  misc_feature 1..204: note = Synthetic
atggattacgtgtctctgcttaatcaaatttggcagaagtaccttaattcaccgtatactacttgtttgtatatccctaaacccacagctaagtatacacctttagttggcacttcattgcaccctgtgctgtggaactgtcagctatcctttgctggttatactgaatctgctgttaattcgactcggtccgcactagcctga

SEQ ID NO: 3358 - DNA, 150 bp, synthetic construct
  source 1..150: mol_type = other DNA
  misc_feature 1..150: note = Synthetic
atgatcggggattcagtaacattcacgccggaagtgaattcaaacagggttctggcgtcgttctcgtactgttttccccaggccagtgctttagcgttaacttccggagccacaccggtgcaaacctcgactcggtccgcactagcctga

SEQ ID NO: 3359 - DNA, 66 bp, synthetic construct
  misc_feature 1..66: note = Synthetic
  source 1..66: mol_type = other DNA
aggccgttgccgtcactgcataaaccatcgggagagcaggcggtacgcatactttcgtcgcgatag

SEQ ID NO: 3360 - DNA, 147 bp, synthetic construct
  source 1..147: mol_type = other DNA
  misc_feature 1..147: note = Synthetic
atcggggattcagtaacattcacgccggaagtgaattcaaacagggttctggcgtcgttctcgtactgttttccccaggccagtgctttagcgttaacttccggagccacaccggtgcaaacctcgactcggtccgcactagcctga

SEQ ID NO: 3361 - DNA, 219 bp, synthetic construct
  source 1..219: mol_type = other DNA
  misc_feature 1..219: note = Synthetic
atgcgcctggtccgaggccttatccggcatgagcatcacgacctcttgaatctcttccaggaaatggtgccggatgagatagcccggatagacctggatgacctgtcagtggcggatgatttatcacgcatgcgtgtgatgatgacctacctacagtctttggcatcactatttaatttggggcctcgcttggccacgactcggtccgcactagcctga

SEQ ID NO: 3362 - DNA, 27 bp, synthetic construct
  misc_feature 1..27: note = Synthetic
  source 1..27: mol_type = other DNA
atcgtaagcatcgtggcggtggtgtga

SEQ ID NO: 3363 - DNA, 189 bp, synthetic construct
  source 1..189: mol_type = other DNA
  misc_feature 1..189: note = Synthetic
aagcatcgtggcggtggtgtgatggagtggaacacactagtattaggtcttttggttttatcggtagtggcaagttccaacaatacgtcgactgctagcacaccgcgtccctctagttctactcacgcctcaacaaccgtgaaggcaacgactgttgcgaccgactcggtccgcactagcctgaggtaa

SEQ ID NO: 3364 - DNA, 189 bp, synthetic construct
  source 1..189: mol_type = other DNA
  misc_feature 1..189: note = Synthetic
aagcatcgtggcggtggtgtggccgagtggaacacactagtattaggtcttttggttttatcggtagtggcaagttccaacaatacgtcgactgctagcacaccgcgtccctctagttctactcacgcctcaacaaccgtgaaggcaacgactgttgcgaccgactcggtccgcactagcctgaggtaa

SEQ ID NO: 3365 - DNA, 168 bp, synthetic construct
  source 1..168: mol_type = other DNA
  misc_feature 1..168: note = Synthetic
atgattccggccgcgctacctcaccccacgatgaagcgccagggggatcgcgatatcgtggtcaccggtgttcggaaccagttcgcgaccgatctggagccgggggggtcggtatcgtgcatgcgctcgtccctgtcgttcgactcggtccgcactagcctgaggtaa

SEQ ID NO: 3366 - DNA, 165 bp, synthetic construct
  source 1..165: mol_type = other DNA
  misc_feature 1..165: note = Synthetic
attccggccgcgctacctcaccccacgatgaagcgccagggggatcgcgatatcgtggtcaccggtgttcggaaccagttcgcgaccgatctggagccgggggggtcggtatcgtgcatgcgctcgtccctgtcgttcgactcggtccgcactagcctgaggtaa

SEQ ID NO: 3367 - DNA, 144 bp, synthetic construct
  source 1..144: mol_type = other DNA
  misc_feature 1..144: note = Synthetic
agggctacctcccatcgcgacggtgacagtggatccatgagagaggcgccgcacgctgcatggctgaataccgtgaatcccctgacgtcgtctttcgtcccgaacgcgtcatgttgggggcgaggcgtaaaccgtcgaggttga

SEQ ID NO: 3368 - DNA, 144 bp, synthetic construct
  misc_feature 1..144: note = Synthetic
  source 1..144: mol_type = other DNA
agggctacctcccatcgcgacggtgacagtggatccatgagagaggcgccgcacgctgcattgctaaataccgtgaatcccctgacgtcgtctttcgtcccgaacgcgtcatgttgggggcgaggcgtaaaccgtcgaggttga

SEQ ID NO: 3369 - DNA, 72 bp, synthetic construct
  misc_feature 1..72: note = Synthetic
  source 1..72: mol_type = other DNA
gtgaatcccctgacgtcgtctttcgtcccgaacgcgtcatgttgggggcgaggcgtaaaccgtcgaggttga

SEQ ID NO: 3370 - DNA, 39 bp, synthetic construct
  misc_feature 1..39: note = Synthetic
  source 1..39: mol_type = other DNA
atgtatagtacaatctgtattgagagatatatctattaa

SEQ ID NO: 3371 - DNA, 222 bp, synthetic construct
  source 1..222: mol_type = other DNA
  misc_feature 1..222: note = Synthetic
ataaaaacaagactccgtactgtgatcttagctccaaccagggttgtcgctgctgaaatggaggaagcccttagagggcttccagtgcgttatatgacaacagcagtcaatgtcacccactctggaacagaaatcgtcgacttaatgtgccatgccaccttcacttcacgtctactacagccaatcagagtccccaactcgactcggtccgcactagcctga

SEQ ID NO: 3372 - DNA, 222 bp, synthetic construct
  source 1..222: mol_type = other DNA
  misc_feature 1..222: note = Synthetic
ataaaaacaagactccgtagcctgatcttagctccaaccagggttgtcgctgctgaaatggaggaagcccttagagggcttccagtgcgttatatgacaacagcagtcaatgtcacccactctggaacagaaatcgtcgacttaatgtgccatgccaccttcacttcacgtctactacagccaatcagagtccccaactcgactcggtccgcactagcctga

SEQ ID NO: 3373 - DNA, 39 bp, synthetic construct
  misc_feature 1..39: note = Synthetic
  source 1..39: mol_type = other DNA
atggagctggtaaacattctggacgttatgacgaactag

SEQ ID NO: 3374 - DNA, 39 bp, synthetic construct
  source 1..39: mol_type = other DNA
  misc_feature 1..39: note = Synthetic
atggagctggtgaacattctggacgttatgatgaactag

SEQ ID NO: 3375 - DNA, 219 bp, synthetic construct
  misc_feature 1..219: note = Synthetic
  source 1..219: mol_type = other DNA
atgcgcctggtccgaggccttatccggcatgagcattacgacctcttgaatctcttccaggaaatggtgccggatgagatagcccggatagacctggatgacctgtcagtggcggatgatttatcacgcatgcgtgtgatgatgacctacctacagtctttggcatcactatttaatttggggcctcgcttggccacgactcggtccgcactagcctga

SEQ ID NO: 3376 - DNA, 204 bp, synthetic construct
  source 1..204: mol_type = other DNA
  misc_feature 1..204: note = Synthetic
ctgtctccacctttgagaaacactcatcctcaggccatgcagtggaattccacaaccttccaccaaactctgcaagatcccagagtgagaggcctgtatttccctgctggtggctccagttcaggaacagtaaaccctgttctgactactgcctctcccttatcgtcaatcttctccgactcggtccgcactagcctgaggtaa

SEQ ID NO: 3377 - DNA, 204 bp, synthetic construct
  source 1..204: mol_type = other DNA
  misc_feature 1..204: note = Synthetic
ctgtctccacctttgagaaacactcatcctcaggccgcccagtggaattccacaaccttccaccaaactctgcaagatcccagagtgagaggcctgtatttccctgctggtggctccagttcaggaacagtaaaccctgttctgactactgcctctcccttatcgtcaatcttctccgactcggtccgcactagcctgaggtaa

SEQ ID NO: 3378 - DNA, 18 bp, synthetic construct
  misc_feature 1..18: note = Synthetic
  source 1..18: mol_type = other DNA
atgcaatgtaaatcatga

SEQ ID NO: 3379 - DNA, 33 bp, synthetic construct
  source 1..33: mol_type = other DNA
  misc_feature 1..33: note = Synthetic
atgatgaagaattctgtgacatgctgcgactaa

SEQ ID NO: 3380 - DNA, 174 bp, synthetic construct
  misc_feature 1..174: note = Synthetic
  source 1..174: mol_type = other DNA
atgctgcgactaattgactacaacaaggctgctttgagtaagttcaaagaggacgtagaatctgccttgcacttattcaaaacaacagccaattctttgatttcagatcaactactgatgaggaaccacttgagagatctgatgggggtgccatatcgactcggtccgcactag

SEQ ID NO: 3381 - DNA, 57 bp, synthetic construct
  misc_feature 1..57: note = Synthetic
  source 1..57: mol_type = other DNA
atgaggaaccacttgagagatctgatgggggtgccatatcgactcggtccgcactag

SEQ ID NO: 3382 - DNA, 33 bp, synthetic construct
  source 1..33: mol_type = other DNA
  misc_feature 1..33: note = Synthetic
atgcaatgtaaatcatggccaagaattctgtga

SEQ ID NO: 3383 - DNA, 33 bp, synthetic construct
  source 1..33: mol_type = other DNA
  misc_feature 1..33: note = Synthetic
atggccaagaattctgtgacatgctgcgactaa

SEQ ID NO: 3384 - DNA, 108 bp, synthetic construct
  misc_feature 1..108: note = Synthetic
  source 1..108: mol_type = other DNA
atgtttttccctttcggaacgaacagccctacgatactaaggatgcatttcgaagatttcccagtaagaattgcagcacgcgcttttaggcaatatgcaatcaagtaa

SEQ ID NO: 3385 - DNA, 27 bp, synthetic construct
  misc_feature 1..27: note = Synthetic
  source 1..27: mol_type = other DNA
ctgcgcaagctagacgtaactatataa

SEQ ID NO: 3386 - DNA, 114 bp, synthetic construct
  misc_feature 1..114: note = Synthetic
  source 1..114: mol_type = other DNA
atgtcgtgcccgactctgtgcgacaaagacagaagctcaccaaactcttcgtctctgttctccaagcaagaacactggagtgatttgccatttccgtctccaacatataattag

SEQ ID NO: 3387 - DNA, 78 bp, synthetic construct
  source 1..78: mol_type = other DNA
  misc_feature 1..78: note = Synthetic
atgatcctgtacagcgatagacaagcaatgaggaacaaaaaagatagacacgactcggtccgcactagcctgaggtaa

SEQ ID NO: 3388 - DNA, 168 bp, synthetic construct
  source 1..168: mol_type = other DNA
  misc_feature 1..168: note = Synthetic
atgtctaaggaatgtggcttaacgacgatgctgcgctgcaaagaaaaattaattgcagcttcgaaagatttaaagttttttgaaaaaacagttcaagaaataatgaaggatggcgtgtccattcaacacataatgtgtatcgactcggtccgcactagcctgaggtaa

SEQ ID NO: 3389 - DNA, 159 bp, synthetic construct
  misc_feature 1..159: note = Synthetic
  source 1..159: mol_type = other DNA
aagcttcatatgagagaggacgcccacgagctgccagacagcattcaagggatggacacgaccaccatgttcgagcacgatcatcatccagagagaattatcgaggtgagtaccgtcaatcaaggagcgcctcacacgactcggtccgcactagcctga

SEQ ID NO: 3390 - DNA, 165 bp, synthetic construct
  source 1..165: mol_type = other DNA
  misc_feature 1..165: note = Synthetic
ttgacagaagagcagtcagaaaacctgtcagaatctacagtagcagaggtggagcctcagagaactctgtacaagattgtagtaccgtgtggaggctgtgattcccggctgaaaatctacgtttctgctacacagtttggaacgactcggtccgcactagcctga

SEQ ID NO: 3391 - DNA, 45 bp, synthetic construct
  misc_feature 1..45: note = Synthetic
  source 1..45: mol_type = other DNA
atgctgtcaacgtgggtgaggacgactcggtccgcactagcctga

SEQ ID NO: 3392 - DNA, 45 bp, synthetic construct
  misc_feature 1..45: note = Synthetic
  source 1..45: mol_type = other DNA
atgatcatcaaacgaactgttaatattgatagttatataacgtga

SEQ ID NO: 3393 - DNA, 144 bp, synthetic construct
  source 1..144: mol_type = other DNA
  misc_feature 1..144: note = Synthetic
agggctacctcccatcgcgacggtgacagtggatccatgagagaggcgccgcacgctgcatggataaataccgtgaatcccctgacgtcgtctttcgtcccgaacgcgtcatgttgggggcgaggcgtaaaccgtcgaggttga

SEQ ID NO: 3394 - DNA, 30 bp, synthetic construct
  source 1..30: mol_type = other DNA
  misc_feature 1..30: note = Synthetic
atgaagtcgccagattacttcagactctga

SEQ ID NO: 3395 - DNA, 60 bp, synthetic construct
  source 1..60: mol_type = other DNA
  misc_feature 1..60: note = Synthetic
ttgcactcgaaaacagtctacatgtccgacctcgactcggtccgcactagcctgaggtaa

SEQ ID NO: 3396 - DNA, 24 bp, synthetic construct
  source 1..24: mol_type = other DNA
  misc_feature 1..24: note = Synthetic
atgagattttcaatccggagttaa

SEQ ID NO: 3397 - DNA, 24 bp, synthetic construct
  source 1..24: mol_type = other DNA
  misc_feature 1..24: note = Synthetic
atgaaattttcaattcggatttaa

SEQ ID NO: 3398 - DNA, 57 bp, synthetic construct
  misc_feature 1..57: note = Synthetic
  source 1..57: mol_type = other DNA
atgaaaacgccaatgtacccatggccgacgaatggttcgattgcgcgattaggttag

SEQ ID NO: 3399 - DNA, 84 bp, synthetic construct
  source 1..84: mol_type = other DNA
  misc_feature 1..84: note = Synthetic
atgaaatacagcaaagatatactaatgtctatccatccaatagcggtaccatgcactggcatcttgcgattacatggacggtaa

SEQ ID NO: 3400 - DNA, 84 bp, synthetic construct
  source 1..84: mol_type = other DNA
  misc_feature 1..84: note = Synthetic
atgaaatacagcaaagatatactaatgtctatccatccaatagcggtaccgcccactggcatcttgcgattacatggacggtaa

SEQ ID NO: 3401 - DNA, 63 bp, synthetic construct
  source 1..63: mol_type = other DNA
  misc_feature 1..63: note = Synthetic
atgttaccgataaatatttctggactgcctatggaattacatcctcgactaatatccccgtaa

SEQ ID NO: 3402 - DNA, 84 bp, synthetic construct
  source 1..84: mol_type = other DNA
  misc_feature 1..84: note = Synthetic
aagtatattcaaaaaatgagttatataaatggcgaacattataaatttatggaacggaattgtaccaacggttcaagatgttaa

SEQ ID NO: 3403 - DNA, 84 bp, synthetic construct
  source 1..84: mol_type = other DNA
  misc_feature 1..84: note = Synthetic
aagtatattcaaaaaatgagttatataagccgcgaacattataaatttatggaacggaattgtaccaacggttcaagatgttaa

SEQ ID NO: 3404 - DNA, 51 bp, synthetic construct
  source 1..51: mol_type = other DNA
  misc_feature 1..51: note = Synthetic
atggagttagaaaacgagccagtcgactcggtccgcactagcctgaggtaa

SEQ ID NO: 3405 - DNA, 111 bp, synthetic construct
  misc_feature 1..111: note = Synthetic
  source 1..111: mol_type = other DNA
atgttggtattcccctcagtgtccagcaccggcgtactgttcagcagcacgctttttaagccatccaccggaccttcaatcggcccttcgctgcgactcggtccgcactag

SEQ ID NO: 3406 - DNA, 123 bp, synthetic construct
  misc_feature 1..123: note = Synthetic
  source 1..123: mol_type = other DNA
gtgacaccggatatgttggtattcccctcagtgtccagcaccggcgtactgttcagcagcacgctttttaagccatccaccggaccttcaatcggcccttcgctgcgactcggtccgcactag

SEQ ID NO: 3407 - DNA, 168 bp, synthetic construct
  source 1..168: mol_type = other DNA
  misc_feature 1..168: note = Synthetic
atgcctttctacaaaagatggagacgctggcgctggcgccgcagaccccgacggctttggagaaggagatttagacgccctctttacagaagattttggagaagaaaatacagggtaagaaaaagaaaacttaaatacttcgactcggtccgcactagcctgaggtaa

SEQ ID NO: 3408 - DNA, 216 bp, synthetic construct
  misc_feature 1..216: note = Synthetic
  source 1..216: mol_type = other DNA
atgacaattttagatgaggtagaaattttgcatattttcagacccaccgccgaatcatttgaaggacagggggactctatacagtcacccgacaatgagcggggagatgatgtacagactaccggtgagcatgatcaggaccctgggccggggcctccatccagtggggcttctgagggattggtacccgactcggtccgcactagcctgaggtaa

SEQ ID NO: 3409 - DNA, 117 bp, synthetic construct
  misc_feature 1..117: note = Synthetic
  source 1..117: mol_type = other DNA
atgagcggggagatgatgtacagactaccggtgagcatgatcaggaccctgggccggggcctccatccagtggggcttctgagggattggtacccgactcggtccgcactagcctga

SEQ ID NO: 3410 - DNA, 117 bp, synthetic construct
  misc_feature 1..117: note = Synthetic
  source 1..117: mol_type = other DNA
atgcgcggggagatgatgtacagaatactggtgagcatattcaggaccccgggccggggccttcaaccggcggggcttctgagggattggtgcacgactcggtccgcactagcctga

SEQ ID NO: 3411 - DNA, 162 bp, synthetic construct
  misc_feature 1..162: note = Synthetic
  source 1..162: mol_type = other DNA
atgtcgtcggacgacgaaaacgacagcggcgacgaaggctggggcgactctagcgactccggcatcgaggacgacgacggcggtgtcggccaggccgccgaggaagaagaggaggaagagcgcgacgtcctcggcgcagcggcccagatgctcggagactga

SEQ ID NO: 3412 - DNA, 15 bp, synthetic construct
  misc_feature 1..15: note = Synthetic
  source 1..15: mol_type = other DNA
gtggtgaaaacataa

SEQ ID NO: 3413 - DNA, 174 bp, synthetic construct
  misc_feature 1..174: note = Synthetic
  source 1..174: mol_type = other DNA
agggagatggacagctcggaagggtgcactgatatggacgagcccagccccgggttcatcctcaacatgacatcggatgccaaagtcaggagcgtagtggaacagattgacaggttgtcaaatatcactacctcgcccccggagatcgactcggtccgcactagcctgaggtaa

SEQ ID NO: 3414 - DNA, 75 bp, synthetic construct
  source 1..75: mol_type = other DNA
  misc_feature 1..75: note = Synthetic
ctgacctctgacataagaatacttgccttgcaggatctcaaagagggaggccgacagctcggaagggtgcactga

SEQ ID NO: 3415 - DNA, 183 bp, synthetic construct
  misc_feature 1..183: note = Synthetic
  source 1..183: mol_type = other DNA
atctcaaagagggaggccgacagctcggaagggtgcactgatatggacgagcccagccccgggttcatcctcaacatgacatcggatgccaaagtcaggagcgtagtggaacagattgacaggttgtcaaatatcactacctcgcccccggagatcgactcggtccgcactagcctgaggtaa

SEQ ID NO: 3416 - DNA, 168 bp, synthetic construct
  misc_feature 1..168: note = Synthetic
  source 1..168: mol_type = other DNA
atgtttgtcattaaacgaaatggatacaaggaaaatgtcatgtttgataaaatcacgtctcgtattagaaaattgtgctatggcttaaacacggatcatatagatcctattaaaatagctatgaaggttattcaaggaatcgactcggtccgcactagcctgaggtaa

SEQ ID NO: 3417 - DNA, 60 bp, synthetic construct
  misc_feature 1..60: note = Synthetic
  source 1..60: mol_type = other DNA
attaaaatagctatgaaggttattcaaggaatcgactcggtccgcactagcctgaggtaa

SEQ ID NO: 3418 - DNA, 168 bp, synthetic construct
  misc_feature 1..168: note = Synthetic
  source 1..168: mol_type = other DNA
atggagcttagctacgccaccaccatgcactaccgggacgttgtgttttacgtcacaacggaccgaaaccgggcctactttgtgtgcggggggtgtgtttattccgtggggcggccgtgtgcctcgcagcccggggagatcgactcggtccgcactagcctgaggtaa

SEQ ID NO: 3419 - DNA, 195 bp, synthetic construct
  source 1..195: mol_type = other DNA
  misc_feature 1..195: note = Synthetic
ctgggccgtgttacgtcgccgcccgcggccgagcttagctacgccaccaccatgcactaccgggacgttgtgttttacgtcacaacggaccgaaaccgggcctactttgtgtgcggggggtgtgtttattccgtggggcggccgtgtgcctcgcagcccggggagatcgactcggtccgcactagcctgaggtaa

SEQ ID NO: 3420 - DNA, 42 bp, synthetic construct
  misc_feature 1..42: note = Synthetic
  source 1..42: mol_type = other DNA
aagatagagacgatcgactcggtccgcactagcctgaggtaa

SEQ ID NO: 3421 - DNA, 66 bp, synthetic construct
  source 1..66: mol_type = other DNA
  misc_feature 1..66: note = Synthetic
atgtcgatacactatactgtgataaagatagagacgatcgactcggtccgcactagcctgaggtaa

SEQ ID NO: 3422 - DNA, 168 bp, synthetic construct
  source 1..168: mol_type = other DNA
  misc_feature 1..168: note = Synthetic
atgccgcaacaactatctcctattaatatagaaactaaaaaagcaatttctaacgcgcgattgaagccgttagacatacattataatgagtcgaaaccaaccactatccagaacactggaaaactagtaaggattaatttcgactcggtccgcactagcctgaggtaa

SEQ ID NO: 3423 - DNA, 57 bp, synthetic construct
  misc_feature 1..57: note = Synthetic
  source 1..57: mol_type = other DNA
ttgaaatataagaaactattcaatcaagcaagaacgactcggtccgcactagcctga

SEQ ID NO: 3424 - DNA, 222 bp, synthetic construct
  misc_feature 1..222: note = Synthetic
  source 1..222: mol_type = other DNA
atcacatcaggattcctaggaccccttctcgtgttacaggcggggtttttcttgttgacaagaatcctcacaataccgcagagtctagactcgtggtggacttctctcaattttctagggggaactaccgtgtgtcttggccaaaattcgcagtccccaacctccaatcactcaccaacctcttgtcctccaacgcctccgactcggtccgcactagcctga

SEQ ID NO: 3425 - DNA, 21 bp, synthetic construct
  misc_feature 1..21: note = Synthetic
  source 1..21: mol_type = other DNA
ctgacgaaattaacaatatag

SEQ ID NO: 3426 - DNA, 27 bp, synthetic construct
  misc_feature 1..27: note = Synthetic
  source 1..27: mol_type = other DNA
atggggcaaatgccgaaacatacgtga

SEQ ID NO: 3427 - DNA, 60 bp, synthetic construct
  source 1..60: mol_type = other DNA
  misc_feature 1..60: note = Synthetic
attccagtccatcccccttcaataaaaccggcaatggctccaaatagacctctggattga

SEQ ID NO: 3428 - DNA, 150 bp, synthetic construct
  misc_feature 1..150: note = Synthetic
  source 1..150: mol_type = other DNA
atggacggaatgttccttagtcctgtaaccatcctcaatttggcactcctgacgtattttgggcactctcctattgtgactgggtgtatattctggaaagggagactgctgtttatagctcccaggggtgttcgactcggtccgcactag

SEQ ID NO: 3429 - DNA, 33 bp, synthetic construct
  source 1..33: mol_type = other DNA
  misc_feature 1..33: note = Synthetic
atggcacgcgcactacatgggctcttacactaa

SEQ ID NO: 3430 - DNA, 54 bp, synthetic construct
  source 1..54: mol_type = other DNA
  misc_feature 1..54: note = Synthetic
atcctgaacatgaagactgacgtttccggacacgcaacacatgaaattaagtaa

SEQ ID NO: 3431 - DNA, 126 bp, synthetic construct
  misc_feature 1..126: note = Synthetic
  source 1..126: mol_type = other DNA
atggtcctcgagcccagcgttttgctcatttggttgcttttggatttgaagaaagccttcaaattcctcggggggagtctcgtagcccaagttctgctcaaccggtgcgtcttggggtatgagtag

SEQ ID NO: 3432 - DNA, 216 bp, synthetic construct
  source 1..216: mol_type = other DNA
  misc_feature 1..216: note = Synthetic
atcgtgtgctacatcgtcatcatgatgtaccgccggtcgtgcgtctcggcgcccgccgttccgcgcaacaaggacctgctccccccgggcgcatcctcgttcgaggacaagatgacggacgaccaggtgcgcgccttccacgcgctggttacctcgtcgtccggcgacaaccccgcaccggcgccgaccgcggcgactcggtccgcactagcctga

SEQ ID NO: 3433 - DNA, 18 bp, synthetic construct
  misc_feature 1..18: note = Synthetic
  source 1..18: mol_type = other DNA
atgtatgtaaatcactag

SEQ ID NO: 3434 - DNA, 84 bp, synthetic construct
  source 1..84: mol_type = other DNA
  misc_feature 1..84: note = Synthetic
aggtcagaatacaaacacgccaatttgggagaccttggtcatgcaactgggctatgcactacgactcggtccgcactagcctga

SEQ ID NO: 3435 - DNA, 213 bp, synthetic construct
  misc_feature 1..213: note = Synthetic
  source 1..213: mol_type = other DNA
atgatggacgacgttcaagtaaacggagacctaatgccctcacccgatcctatccccgaagaggtggcgcagtgctccccggaagacatgtcaatcatgctagaccaattcctcgaaaatattcaactcaagtccgagctccagttgctgacctccgaagaaatggacgaactcctaaccgaactcgaagcgactcggtccgcactagcctga

SEQ ID NO: 3436 - DNA, 144 bp, synthetic construct
  misc_feature 1..144: note = Synthetic
  source 1..144: mol_type = other DNA
ctgctgcgcgcgtacccgcacatcgccgcggaggacccgggcttccacgcgctgctctcggagctcacggtctcgtgctcgcgcgggacctgcgaccgcttccggctgcgcgtgtcctcgccgactcggtccgcactagcctga

SEQ ID NO: 3437 - DNA, 114 bp, synthetic construct
  misc_feature 1..114: note = Synthetic
  source 1..114: mol_type = other DNA
atctacgaaagcagcaaaatcaagcattatttaagactcgtatacgtccgagagctaaatcagatatcagaagtgtttaatttaacccaaacgactcggtccgcactagcctga

SEQ ID NO: 3438 - DNA, 213 bp, synthetic construct
  misc_feature 1..213: note = Synthetic
  source 1..213: mol_type = other DNA
atgccggttatcacggcggtggcagcggatttggagggcagttgcggtcgtggaacccaccgagtgaaagtgtggatgcagccctgttgcccaactttacccgtggcaatgcccgcgcagacgatctggtacgcaataacggctatgccgccaacgccatccagctgcatcaggatcatatcgtccgactcggtccgcactagcctgaggtaa

SEQ ID NO: 3439 - DNA, 213 bp, synthetic construct
  misc_feature 1..213: note = Synthetic
  source 1..213: mol_type = other DNA
atgccggttatcacggcggtggcagcggatttggagggcagttgcggtcgtggaacccaccgagtgaaagtgtggatgcagccctgttgcccaactttacccgtggcaatgcccgcgcagacgatctggtacgcaataacggctatgccgccaacgccatccagctgcatcgccatcatatcgtccgactcggtccgcactagcctgaggtaa

SEQ ID NO: 3440 - DNA, 84 bp, synthetic construct
  source 1..84: mol_type = other DNA
  misc_feature 1..84: note = Synthetic
atgattatcttcttgagacataactcccattttttggtattcacccacacgtttttcgaaaaaattagtttttccttccaatga

SEQ ID NO: 3441 - DNA, 117 bp, synthetic construct
  misc_feature 1..117: note = Synthetic
  source 1..117: mol_type = other DNA
atgaaaaaaacgtcctgtcggaaaggaacaacacctctcttcagagagatcatttcaaggccattgatcccctggaggtttatgatgaccctgtggacccggtcgaaccggagatag

SEQ ID NO: 3442 - DNA, 60 bp, synthetic construct
  source 1..60: mol_type = other DNA
  misc_feature 1..60: note = Synthetic
ctgacgatggcgtggtatccacgctcgttcaataatctcctgagacacttgaataaataa

SEQ ID NO: 3443 - DNA, 165 bp, synthetic construct
  misc_feature 1..165: note = Synthetic
  source 1..165: mol_type = other DNA
acgagcaggcgcgcacccgacggcggtttgaatttagacgattttatgcgccgccagcgcggtcgccacctggatctgccctatccgcgcggctacacgttgtttgtctgcgacgtggaggagaccatcctcacccccgactcggtccgcactagcctgaggtaa

SEQ ID NO: 3444 - DNA, 93 bp, synthetic construct
  source 1..93: mol_type = other DNA
  misc_feature 1..93: note = Synthetic
atgaagccgcggcggcgcgttataagcaccgtggggtcatcgaccgacgaggcgcggcggccacgagcaggcgcgcacccgacggcggtttga

SEQ ID NO: 3445 - DNA, 159 bp, synthetic construct
  misc_feature 1..159: note = Synthetic
  source 1..159: mol_type = other DNA
aggcgcgcacccgacggcggtttgaatttagacgattttatgcgccgccagcgcggtcgccacctggatctgccctatccgcgcggctacacgttgtttgtctgcgacgtggaggagaccatcctcacccccgactcggtccgcactagcctgaggtaa

SEQ ID NO: 3446 - DNA, 69 bp, synthetic construct
  source 1..69: mol_type = other DNA
  misc_feature 1..69: note = Synthetic
aggaccacgttcaacgccgccggttcgctggcgccacacgccgactcggtccgcactagcctgaggtaa

SEQ ID NO: 3447 - DNA, 18 bp, synthetic construct
  misc_feature 1..18: note = Synthetic
  source 1..18: mol_type = other DNA
atgatgagcccaaattaa

SEQ ID NO: 3448 - DNA, 39 bp, synthetic construct
  source 1..39: mol_type = other DNA
  misc_feature 1..39: note = Synthetic
attaagaaaaacgactcggtccgcactagcctgaggtaa

SEQ ID NO: 3449 - DNA, 45 bp, synthetic construct
  source 1..45: mol_type = other DNA
  misc_feature 1..45: note = Synthetic
ttgaaagcaacaggaaaaacaataaacaaactatccatctgttaa

SEQ ID NO: 3450 - DNA, 63 bp, synthetic construct
  source 1..63: mol_type = other DNA
  misc_feature 1..63: note = Synthetic
ttgccagcagacgtattgaagaaaaccatcaaaaacacatcgactcggtccgcactagcctga

SEQ ID NO: 3451 - DNA, 18 bp, synthetic construct
  source 1..18: mol_type = other DNA
  misc_feature 1..18: note = Synthetic
atgatcaaccacgtctga

SEQ ID NO: 3452 - DNA, 75 bp, synthetic construct
  source 1..75: mol_type = other DNA
  misc_feature 1..75: note = Synthetic
atggtagtaataaaggatctaaaacttatacatctggtggcggtgaaatgtggggaggatcgtcctgtggtgtaa

SEQ ID NO: 3453 - DNA, 162 bp, synthetic construct
  misc_feature 1..162: note = Synthetic
  source 1..162: mol_type = other DNA
ctgcgcccccaagacccgtcggaggccccgccgatcccaaagaaaaagaccaccaacaccatgggcccacttcccagggtttggacagagtcttcttttcggatacccagtctacgtgtttggagactgtgtacaaggcgactgcgactcggtccgcactag

SEQ ID NO: 3454 - DNA, 168 bp, synthetic construct
  source 1..168: mol_type = other DNA
  misc_feature 1..168: note = Synthetic
ctgccggctgctcagacgttacgcggctcgctgctgatctacgtaggactggtgaccatgtttaaaatcacgctgatcgtgctcagtcccaacctctggcgcctgccctggacgaccgtctttgccgccttcagatcctcgtattgcgaaggtggcggtggctcgtag

SEQ ID NO: 3455 - DNA, 186 bp, synthetic construct
  misc_feature 1..186: note = Synthetic
  source 1..186: mol_type = other DNA
acgcacctaaccgcgaaagcctttccttatccgcaattgacttttccacctatgtatcaacccaatcctatggcatacagagacccgaaccctcctaggcgcaggtggaggccatttaggcccccacttgcagcacaaatagaggacttgaggaggtccgactcggtccgcactagcctgaggtaa

SEQ ID NO: 3456 - DNA, 165 bp, synthetic construct
  source 1..165: mol_type = other DNA
  misc_feature 1..165: note = Synthetic
atggcaaaaacaatctcctcattgaacagggtttgtgctgagatggttgcaaaatatgatcttctggtgatgacaaccggtcgggcaacagcaaccgctgcggcaactgaggcttattgggccgaacatggtcaaccaccacctggacgactcggtccgcactag

SEQ ID NO: 3457 - DNA, 204 bp, synthetic construct
  source 1..204: mol_type = other DNA
  misc_feature 1..204: note = Synthetic
attacgagtcttgagaatggtctaaagccagtttatgatatggcaaaaacaatctcctcattgaacagggtttgtgctgagatggttgcaaaatatgatcttctggtgatgacaaccggtcgggcaacagcaaccgctgcggcaactgaggcttgccgggccgaacatggtcaaccaccacctggacgactcggtccgcactag

SEQ ID NO: 3458 - DNA, 180 bp, synthetic construct
  source 1..180: mol_type = other DNA
  misc_feature 1..180: note = Synthetic
aagccagtttatgatatggcaaaaacaatctcctcattgaacagggtttgtgctgagatggttgcaaaatatgatcttctggtgatgacaaccggtcgggcaacagcaaccgctgcggcaactgaggcttattgggccgaacatggtcaaccaccacctggacgactcggtccgcactag

SEQ ID NO: 3459 - DNA, 156 bp, synthetic construct
  source 1..156: mol_type = other DNA
  misc_feature 1..156: note = Synthetic
atatccagccccgaagcgcaggatctgtcgggaatccgtagccatactcgaccgctgtcggcgccccgttgtcccacgtcgccggttcgtgccatctctcgggaaacgccagtttctataaaatcggcgccgatgtcccgctctatgtctatctga

SEQ ID NO: 3460 - DNA, 57 bp, synthetic construct
  source 1..57: mol_type = other DNA
  misc_feature 1..57: note = Synthetic
attataagactcaaagacgtctttgtcgaattgtgtgaaagaaaaattttcttgtga

SEQ ID NO: 3461 - DNA, 27 bp, synthetic construct
  source 1..27: mol_type = other DNA
  misc_feature 1..27: note = Synthetic
atgacgactcggtccgcactagcctga

SEQ ID NO: 3462 - DNA, 210 bp, synthetic construct
  misc_feature 1..210: note = Synthetic
  source 1..210: mol_type = other DNA
gtgcagagcatcgcgcgccatcttccgacacataaatcgacgatgtctgtggaattctccccccagcaactgcagaacttcctggcgcgcgcgcgcgtgttttgtccgcaggacgcggcgcgcgtggcgcgcgcgcgctacactgtgctcacgtactcgggggccacacccgtgcgcgtgcacgactcggtccgcactagcctgaggtaa

SEQ ID NO: 3463 - DNA, 171 bp, synthetic construct
  source 1..171: mol_type = other DNA
  misc_feature 1..171: note = Synthetic
acggcctctgtggaattctccccccagcaactgcagaacttcctggcgcgcgcgcgcgtgttttgtccgcaggacgcggcgcgcgtggcgcgcgcgcgctacactgtgctcacgtactcgggggccacacccgtgcgcgtgcacgactcggtccgcactagcctgaggtaa

SEQ ID NO: 3464 - DNA, 171 bp, synthetic construct
  source 1..171: mol_type = other DNA
  misc_feature 1..171: note = Synthetic
ctgctgggtgtttatgcctactttatagagcataagcagcgcaacacccttatctggttgccgacggatggtgatgccgagaactttatgaaaacccacgttgagccgactattcgtgatattccgtcgctgctggcgctggccccgtcgactcggtccgcactagcctga

SEQ ID NO: 3465 - DNA, 171 bp, synthetic construct
  misc_feature 1..171: note = Synthetic
  source 1..171: mol_type = other DNA
ctggccggtgtttatgcctactttatagagcataagcagcgcaacacccttatctggttgccgacggatggtgatgccgagaactttatgaaaacccacgttgagccgactattcgtgatattccgtcgctgctggcgctggccccgtcgactcggtccgcactagcctga

SEQ ID NO: 3466 - DNA, 222 bp, synthetic construct
  source 1..222: mol_type = other DNA
  misc_feature 1..222: note = Synthetic
atctcccgggaagcgacgatgtgtcctcatgatggttcgggcgtatcaagtgtatcttatacttgtcgtactgttttagggaatgcgacggtgcttcaaagtgaaccctccacgttttatatttggcgaacggcttcgggcccgactcgcactgcgacgcgggaacgtgaagctgtgacgatctcccgaccccacgactcggtccgcactagcctgaggtaa

SEQ ID NO: 3467 - DNA, 189 bp, synthetic construct
  source 1..189: mol_type = other DNA
  misc_feature 1..189: note = Synthetic
attccattagagataaccagaatggctaaagccacaggccggtacaacttggtaacaccaaaacgggagctagagcaaggagttgtgtttagcgacctatgcaacttcctagtgactccaactgtgcaaggatggaaggtttactgggctggacttgagttcgactcggtccgcactagcctgaggtaa

SEQ ID NO: 3468 - DNA, 60 bp, synthetic construct
  misc_feature 1..60: note = Synthetic
  source 1..60: mol_type = other DNA
atgcaacttcctagtgactccaactgtgcaaggatggaaggtttactgggctggacttga

SEQ ID NO: 3469 - DNA, 222 bp, synthetic construct
  source 1..222: mol_type = other DNA
  misc_feature 1..222: note = Synthetic
attaccgacatcatgaacgctatcgacgcaatcaaagcactgccaatctgtgaacttgacaagcgtcaaggtatgcttatcgacttactggtcgagatggtcaacagcgagacgtgtgatggcgagctaaccgaactaaatcaggcacttgagcatcaagattggtggactaccttgaagtgtctcacggctgacgcagcgactcggtccgcactagcctga

SEQ ID NO: 3470 - DNA, 186 bp, synthetic construct
  misc_feature 1..186: note = Synthetic
  source 1..186: mol_type = other DNA
acgcacctaaccgcgaaaatgtttccttatccgcaattgacttttccacctatgtatcaacccaatcctatggcatacagagacccgaaccctcctaggcgcaggtggaggccatttaggcccccacttgcagcacaaatagaggacttgaggaggtccgactcggtccgcactagcctgaggtaa

SEQ ID NO: 3471 - DNA, 78 bp, synthetic construct
  misc_feature 1..78: note = Synthetic
  source 1..78: mol_type = other DNA
aagaccgtgaatcccctgacgtcgtctttcgtcccgaacgcgtcatgttgggggcgaggcgtaaaccgtcgaggttga

SEQ ID NO: 3472 - DNA, 144 bp, synthetic construct
  source 1..144: mol_type = other DNA
  misc_feature 1..144: note = Synthetic
agggctacctcccatcgcgacggtgacagtggatccatgagagaggcgccgcacgctgcatggctaaataccgtgaatcccctgacgtcgtctttcgtcccgaacgcgtcatgttgggggcgaggcgtaaaccgtcgaggttga

SEQ ID NO: 3473 - DNA, 144 bp, synthetic construct
  misc_feature 1..144: note = Synthetic
  source 1..144: mol_type = other DNA
agggctacctcccatcgcgacggtgacagtggatccatgagagaggcgccgcacgctgcatggctaaattccgtgaatcccctgacgtcgtctttcgtcccgaacgcgtcatgttgggggcgaggcgtaaaccgtcgaggttga

SEQ ID NO: 3474 - DNA, 144 bp, synthetic construct
  misc_feature 1..144: note = Synthetic
  source 1..144: mol_type = other DNA
agggctacctcccatcgcgacggtgacagtggatccatgagagaggcgccgcacgctgcatggctaattaccgtgaatcccctgacgtcgtctttcgtcccgaacgcgtcatgttgggggcgaggcgtaaaccgtcgaggttga

SEQ ID NO: 3475 - DNA, 144 bp, synthetic construct
  misc_feature 1..144: note = Synthetic
  source 1..144: mol_type = other DNA
agggctacctcccatcgcgacggtgacagtggatccatgagagaggcgccgcacgctgcatggctacataccgtgaatcccctgacgtcgtctttcgtcccgaacgcgtcatgttgggggcgaggcgtaaaccgtcgaggttga

SEQ ID NO: 3476 - DNA, 159 bp, synthetic construct
  misc_feature 1..159: note = Synthetic
  source 1..159: mol_type = other DNA
acgacgacgaccgcggaactcacgacggagtttgactacgatgaagacgcgactccttgtgttttcaccgacgtgcttaatcagtcaaagccagttacgttgtttctgtacggcgttgtctttctcttcggcgactcggtccgcactagcctgaggtaa

SEQ ID NO: 3477 - DNA, 216 bp, synthetic construct
  misc_feature 1..216: note = Synthetic
  source 1..216: mol_type = other DNA
atgacaattttagatgaggtagaaattttgcatattttcagacccaccatggaatcatttgaaggacagggggactctagacagtcacccgacaatgagcggggagataatgtacagactaccggcgagcatgatcaggaccctgggccggggcctccatccagtggggcttctgagagattggtacccgactcggtccgcactagcctgaggtaa

SEQ ID NO: 3478 - DNA, 105 bp, synthetic construct
  source 1..105: mol_type = other DNA
  misc_feature 1..105: note = Synthetic
ataatgtacagactaccggcgagcatgatcaggaccctgggccggggcctccatccagtggggcttctgagagattggtacccgactcggtccgcactagcctga

SEQ ID NO: 3479 - DNA, 216 bp, synthetic construct
  misc_feature 1..216: note = Synthetic
  source 1..216: mol_type = other DNA
atgacaattttagatgaggtagaaattttgcatattttcagacccaccatggaatcatttgaaggacagggggactctatacagtcacccgacaatgagcggggagatgatgtacagactaccggtgagcatgatcaggaccctgggccggggcctccatccagtggggcttctgagggattggtacccgactcggtccgcactagcctgaggtaa

SEQ ID NO: 3480 - DNA, 216 bp, synthetic construct
  source 1..216: mol_type = other DNA
  misc_feature 1..216: note = Synthetic
atgacaattttagatgaggtagaaattttgcatattttcagacccaccgccgaatcatttgaaggacagggggactctagacagtcacccgacaatgagcggggagataatgtacagactaccggcgagcatgatcaggaccctgggccggggcctccatccagtggggcttctgagagattggtacccgactcggtccgcactagcctgaggtaa

SEQ ID NO: 3481 - DNA, 117 bp, synthetic construct
  source 1..117: mol_type = other DNA
  misc_feature 1..117: note = Synthetic
atgagcggggagataatgtacagactaccggcgagcatgatcaggaccctgggccggggcctccatccagtggggcttctgagagattggtacccgactcggtccgcactagcctga

SEQ ID NO: 3482 - DNA, 27 bp, synthetic construct
  misc_feature 1..27: note = Synthetic
  source 1..27: mol_type = other DNA
atgccgccgatatctttaaagaactaa

SEQ ID NO: 3483 - DNA, 177 bp, synthetic construct
  source 1..177: mol_type = other DNA
  misc_feature 1..177: note = Synthetic
ttgccaatcaaggttagcaaaatttataaaaaagggaatataagcacattgcaagggggaatgatcaacatccagccccttaagaaatcaatcgatcacccaataagcagcgagaggaatcaccagccaagagaccatcactacaaagggacaatcaaccgactcggtccgcactag

SEQ ID NO: 3484 - DNA, 69 bp, synthetic construct
  source 1..69: mol_type = other DNA
  misc_feature 1..69: note = Synthetic
atcaccagccaagagaccatcactacaaagggacaatcaaccgactcggtccgcactagcctgaggtaa

SEQ ID NO: 3485 - DNA, 144 bp, synthetic construct
  misc_feature 1..144: note = Synthetic
  source 1..144: mol_type = other DNA
atgtctacgttggcgccacgcttactaatatgggtccatttgtgcaagttgtatgttctgtgggaactccggaacttgtacctggaggtgaactttctttgctgctggcttctgatttgtatgattttatacaactggcattaa

SEQ ID NO: 3486 - DNA, 222 bp, synthetic construct
  source 1..222: mol_type = other DNA
  misc_feature 1..222: note = Synthetic
atgggtggattcggacttaaacaccctcctccacagattctcatcaagaacaccccggtacctgcgaatccttcgaccaccttcagtgcggcaaagtttgcttccttcatcacacagtactccacgggacaggtcagcgtggagatcgagtgggagctgcagaaggaaaacagcaaacggccgaatcccgaaattcagtcgactcggtccgcactagcctga

SEQ ID NO: 3487 - DNA, 51 bp, synthetic construct
  source 1..51: mol_type = other DNA
  misc_feature 1..51: note = Synthetic
atggtgggcacgctctgccccgtgaggcgggcgcaatcttgtacgctctag

SEQ ID NO: 3488 - DNA, 168 bp, synthetic construct
  misc_feature 1..168: note = Synthetic
  source 1..168: mol_type = other DNA
atgttactctctaccgccatattcgcctttttcttgaactgtgctccttgtctggcaaagttcccaatctacaccatcccggataagattggaccgtggagtcctattgacataaaccatctcagctgcccgaacaacttcgactcggtccgcactagcctgaggtaa

SEQ ID NO: 3489 - DNA, 45 bp, synthetic construct
  misc_feature 1..45: note = Synthetic
  source 1..45: mol_type = other DNA
atctcagctgcccgaacaacttcgactcggtccgcactagcctga

SEQ ID NO: 3490 - DNA, 150 bp, synthetic construct
  source 1..150: mol_type = other DNA
  misc_feature 1..150: note = Synthetic
atattcgcctttttcttgaactgtgctccttgtctggcaaagttcccaatctacaccatcccggataagattggaccgtggagtcctattgacataaaccatctcagctgcccgaacaacttcgactcggtccgcactagcctgaggtaa

SEQ ID NO: 3491 - DNA, 93 bp, synthetic construct
  misc_feature 1..93: note = Synthetic
  source 1..93: mol_type = other DNA
atgcagcgcctattggcgagcctagccggccttcgccaaccgccaacccccacggccgagacggccgactcggtccgcactagcctgaggtaa

SEQ ID NO: 3492 - DNA, 168 bp, synthetic construct
  misc_feature 1..168: note = Synthetic
  source 1..168: mol_type = other DNA
atggctgctgaagctgacgaagagaactgtgaagcgttatacgtggctgggtatttagccttatattcaaaggacgaaggggaattaaatattaccccagagattgtgcggtccgctttgccgcctactagtaaaatacccgactcggtccgcactagcctgaggtaa

SEQ ID NO: 3493 - DNA, 180 bp, synthetic construct
  misc_feature 1..180: note = Synthetic
  source 1..180: mol_type = other DNA
ttgtacagagatatgattgggaaacaggctactataccagatattgtgctggatctgcaagaccttgtccagcccattgacctgcattgtgacgaagacttgtcagaaaatcaggaggaggagcctgcacctcaaagaatagactacaagatcgactcggtccgcactagcctgaggtaa

SEQ ID NO: 3494 - DNA, 78 bp, synthetic construct
  source 1..78: mol_type = other DNA
  misc_feature 1..78: note = Synthetic
ttgtccagcccattgacctgcattgtgacgaagacttgtcagaaaatcaggaggaggagcctgcacctcaaagaatag

SEQ ID NO: 3495 - DNA, 222 bp, synthetic construct
  misc_feature 1..222: note = Synthetic
  source 1..222: mol_type = other DNA
attcgcgagtggagaaatgaaaattacttgggcattgtacagtcctgcagcttgatgatcgaagagtttgataataacgcttttgctttgctggtgtttgtggaagtgcgggtccaggctcttttggaggccgcgattgatagcctggaaaatcgcataatgtttgatctggctgttaaattccatcagggctccggagcgactcggtccgcactagcctga

SEQ ID NO: 3496 - DNA, 39 bp, synthetic construct
  misc_feature 1..39: note = Synthetic
  source 1..39: mol_type = other DNA
atgaaaattacttgggcattgtacagtcctgcagcttga

SEQ ID NO: 3497 - DNA, 57 bp, synthetic construct
  source 1..57: mol_type = other DNA
  misc_feature 1..57: note = Synthetic
ctggcttcctggaccctgttaccgccagcagcgagtatcaaagacatctgcggataa

SEQ ID NO: 3498 - DNA, 84 bp, synthetic construct
  misc_feature 1..84: note = Synthetic
  source 1..84: mol_type = other DNA
ctggtgaatccgggcccggccatggcaagccacaaggacgatgaagaaaagttttttcctccgactcggtccgcactagcctga

SEQ ID NO: 3499 - DNA, 72 bp, synthetic construct
  misc_feature 1..72: note = Synthetic
  source 1..72: mol_type = other DNA
atccgggcccggccatggcaagccacaaggacgatgaagaaaagttttttcctccgactcggtccgcactag

SEQ ID NO: 3500 - DNA, 60 bp, synthetic construct
  source 1..60: mol_type = other DNA
  misc_feature 1..60: note = Synthetic
gtgaatactcgtggactggagctaccaagtaccacctcaatggcagagactctctggtga

SEQ ID NO: 3501 - DNA, 78 bp, synthetic construct
  misc_feature 1..78: note = Synthetic
  source 1..78: mol_type = other DNA
ctgcggataacaacaacagtgaatactcgtggactggagctaccaagtaccacctcagccgcagagactctctggtga

SEQ ID NO: 3502 - DNA, 168 bp, synthetic construct
  source 1..168: mol_type = other DNA
  misc_feature 1..168: note = Synthetic
atgccatttcaagctgttttgtctgctcttctttcggccctcacactctgcgtcggcaagtttcccatctacacaatccctgataagttaggcccgtggagccccattgacattcatcatcttagctgcccgaacaatatcgactcggtccgcactagcctgaggtaa

SEQ ID NO: 3503 - DNA, 183 bp, synthetic construct
  source 1..183: mol_type = other DNA
  misc_feature 1..183: note = Synthetic
aagatctcaggaatcgccccatttcaagctgttttgtctgctcttctttcggccctcacactctgcgtcggcaagtttcccatctacacaatccctgataagttaggcccgtggagccccattgacattcatcatcttagctgcccgaacaatatcgactcggtccgcactagcctgaggtaa

SEQ ID NO: 3504 - DNA, 72 bp, synthetic construct
  misc_feature 1..72: note = Synthetic
  source 1..72: mol_type = other DNA
atgttgaatacaagtctgactcctatacaaaagatcttgacgatgtcaagaataataaattggacgaaataa

SEQ ID NO: 3505 - DNA, 222 bp, synthetic construct
  source 1..222: mol_type = other DNA
  misc_feature 1..222: note = Synthetic
atgttgggtctgccgccgccaccgtcagtcgcaccacctggggaaaagaaggagctaccggctcaggcggccttgtcgccgccactgaccacctggtcactaccgccgtttccgtccacgcggatacctgacagtccgccgccaccgtaccagcttcgtcacgccacgtcactagtgacggtacccacgctgctgttatcgactcggtccgcactagcctga

SEQ ID NO: 3506 - DNA, 222 bp, synthetic construct
  source 1..222: mol_type = other DNA
  misc_feature 1..222: note = Synthetic
atgcgcaacgccttcgcgcaggagagcggcgacggccagtgtctgaacgagtggctgcgcggcgacggcgcggccgcgatggccgccaagcagagccagcacatgcagcacaaggccatgttcgaggacgacctgctcaccatggaggaggccatgctcatgatctcgcggtactgcaccatcctcatctacgggcaggcgactcggtccgcactagcctga

SEQ ID NO: 3507 - DNA, 222 bp, synthetic construct
  source 1..222: mol_type = other DNA
  misc_feature 1..222: note = Synthetic
atggcgtgcgaatacctcagctaccagcgcgcggacgttgtggccgtaataaacagcatgaagtttaaaatcgagcagcgcaagatcgtgtcttttgagctcgagtccgccggctgcctgcgtgacgaccccacgctcgagaccatctacagtcacttttgccagtttgtcgctgtctttaacttcctggccgaggtcccgactcggtccgcactagcctga

SEQ ID NO: 3508 - DNA, 222 bp, synthetic construct
  misc_feature 1..222: note = Synthetic
  source 1..222: mol_type = other DNA
atgggtggattcggacttaaacaccctcctccacagattctcatcaagaacaccccggtacctgcgaatccttcgaccaccttcagtgcggcaaagtttgcttccttcatcacacagtactccacgggacaggtcagcgtggagatcgagtgggagctgcagaaggaaaacagcaaacgctggaatcccgaaattcagtcgactcggtccgcactagcctga

SEQ ID NO: 3509 - DNA, 99 bp, synthetic construct
  source 1..99: mol_type = other DNA
  misc_feature 1..99: note = Synthetic
atgcaatacgtgtacgcgctaaaccctgtgtgcatcgttttaattattcccggacactcccgcagagaagttccccgtcagggctgtggacatagttaa

SEQ ID NO: 3510 - DNA, 90 bp, synthetic construct
  misc_feature 1..90: note = Synthetic
  source 1..90: mol_type = other DNA
gtgtacgcgctaaaccctgtgtgcatcgttttaattattcccggacactcccgcagagaagttccccgtcagggctgtggacatagttaa

SEQ ID NO: 3511 - DNA, 168 bp, synthetic construct
  source 1..168: mol_type = other DNA
  misc_feature 1..168: note = Synthetic
atggcagaccgcggtctcccgtccgaggcccccgtcgtcacgacctcacccgccggtccgccctcggacggacctatgcagcgcctattggcgagcctagccggccttcgccaaccgccaacccccacggccgagacggccgactcggtccgcactagcctgaggtaa

SEQ ID NO: 3512 - DNA, 168 bp, synthetic construct
  source 1..168: mol_type = other DNA
  misc_feature 1..168: note = Synthetic
atggatcctacactttactgtgtagttgcggttgataccaaactcgggatcggaaaaaacagatgtctcccgtggcctgcattgcggggagacatgaggcgttttcgacagctgactaccgactgtgcccctggaaaacacgactcggtccgcactagcctgaggtaa

SEQ ID NO: 3513 - DNA, 96 bp, synthetic construct
  misc_feature 1..96: note = Synthetic
  source 1..96: mol_type = other DNA
atgtctcccgtggcctgcattgcggggagacatgaggcgttttcgacagctgactaccgactgtgcccctggaaaacacgactcggtccgcactag

SEQ ID NO: 3514 - DNA, 132 bp, synthetic construct
  misc_feature 1..132: note = Synthetic
  source 1..132: mol_type = other DNA
attactctatcttttacattaccgagacagagattgtttgcaatggcctcttcattatttaatgtaaatgatacttatgatttcatctattttctagttttaggttttctgccaataccggccattatataa

SEQ ID NO: 3515 - DNA, 15 bp, synthetic construct
  source 1..15: mol_type = other DNA
  misc_feature 1..15: note = Synthetic
atgattttgatgtga

SEQ ID NO: 3516 - DNA, 39 bp, synthetic construct
  misc_feature 1..39: note = Synthetic
  source 1..39: mol_type = other DNA
atgtgttgcaggaagttgaagcgactcggtccgcactag

SEQ ID NO: 3517 - DNA, 39 bp, synthetic construct
  misc_feature 1..39: note = Synthetic
  source 1..39: mol_type = other DNA
atgtgttgcgccaagttgaagcgactcggtccgcactag

SEQ ID NO: 3518 - DNA, 33 bp, synthetic construct
  source 1..33: mol_type = other DNA
  misc_feature 1..33: note = Synthetic
ttgacgttgagcgaaaacgcacgtttaccatga

SEQ ID NO: 3519 - DNA, 192 bp, synthetic construct
  misc_feature 1..192: note = Synthetic
  source 1..192: mol_type = other DNA
atgatgattcgggaaggtgtggccatgcacgcctttaacggtgaactgttcgttcaggccacctgggataccagttcgtcgcggcttttccggacacagttccggatggtcagcccgaagcgcatcagcaacccgaacaataccggcgacagccggaactgccgtgccgcgactcggtccgcactagcctga

SEQ ID NO: 3520 - DNA, 189 bp, synthetic construct
  source 1..189: mol_type = other DNA
  misc_feature 1..189: note = Synthetic
atgattcgggaaggtgtggccatgcacgcctttaacggtgaactgttcgttcaggccacctgggataccagttcgtcgcggcttttccggacacagttccggatggtcagcccgaagcgcatcagcaacccgaacaataccggcgacagccggaactgccgtgccgcgactcggtccgcactagcctga

SEQ ID NO: 3521 - DNA, 222 bp, synthetic construct
  misc_feature 1..222: note = Synthetic
  source 1..222: mol_type = other DNA
aagcctaccagatttttccacgcaaaccaaccgccaatgccgcattcatacgagatggaggacttatgcttcgacgacatgcaatatcgctggtctccctcgaacacaccctatcgaagtatgtctaggcgatataaatccgtatctcggagcgggccttcgatgcgtgtacgctccagaacgccatgccgccgcgactcggtccgcactagcctgaggtaa

SEQ ID NO: 3522 - DNA, 222 bp, synthetic construct
  source 1..222: mol_type = other DNA
  misc_feature 1..222: note = Synthetic
aagcctaccagatttttccacgcaaaccaaccgccaatgccgcattcatacgaggccgaggacttatgcttcgacgacatgcaatatcgctggtctccctcgaacacaccctatcgaagtatgtctaggcgatataaatccgtatctcggagcgggccttcgatgcgtgtacgctccagaacgccatgccgccgcgactcggtccgcactagcctgaggtaa

SEQ ID NO: 3523 - DNA, 33 bp, synthetic construct
  source 1..33: mol_type = other DNA
  misc_feature 1..33: note = Synthetic
atttatatgacaaatagaataagaaaaacttag

SEQ ID NO: 3524 - DNA, 189 bp, synthetic construct
  source 1..189: mol_type = other DNA
  misc_feature 1..189: note = Synthetic
atgcctgcctatttgtcaaatatggataaacaggagtcaactcagaattcctcagacatcttatatccagaatgtcacttgaactctccgattgtaaaaagcaagattgctcaacttcacgttttgctagatatcaatcaaccctatgatttaaaagataacgactcggtccgcactagcctgaggtaa

SEQ ID NO: 3525 - DNA, 75 bp, synthetic construct
  source 1..75: mol_type = other DNA
  misc_feature 1..75: note = Synthetic
acggaagagtattcgataaggcagatggaaaatctaaacgagatgctaaaaataatgcagctaaattggcagtag

SEQ ID NO: 3526 - DNA, 213 bp, synthetic construct
  source 1..213: mol_type = other DNA
  misc_feature 1..213: note = Synthetic
ttgccggaagttcccgcttacaacgcctcagaaaaatacccaagcatgacttcagttaattctgcagaagccagcactggtgcaggaggggggggcagtaatcctgtcaaaagcatgtggagtgagggggccacttttagtgccaactctgtgacttgtacattttctagacagtttttaattcccgactcggtccgcactagcctgaggtaa

SEQ ID NO: 3527 - DNA, 18 bp, synthetic construct
  source 1..18: mol_type = other DNA
  misc_feature 1..18: note = Synthetic
atgccctgcacatcctga

SEQ ID NO: 3528 - DNA, 84 bp, synthetic construct
  source 1..84: mol_type = other DNA
  misc_feature 1..84: note = Synthetic
atgtcaatccgcaagggtgttcctgccccctcgacgcgcctgtcgcgatcctcatggcgaggaccgcgatctccgtataggtag

SEQ ID NO: 3529 - DNA, 174 bp, synthetic construct
  misc_feature 1..174: note = Synthetic
  source 1..174: mol_type = other DNA
gtggaaatgtctatccgcctgcgtgtatgtgtggggtgtgtatatgtgcgcgtgaccgtatccctccctgcctttaacccgatgagaaataaaatcggcgaatgtacacagtcacacacaatgtgcttacgtgccgtgttactgaccgactcggtccgcactagcctgaggtaa

SEQ ID NO: 3530 - DNA, 84 bp, synthetic construct
  source 1..84: mol_type = other DNA
  misc_feature 1..84: note = Synthetic
atgtctatccgcaagggtgttcctgccccctcgacgcgcctgtcgcgatcctcatggcgaggaccgcgatctccgtataggtag

SEQ ID NO: 3531 - DNA, 39 bp, synthetic construct
  source 1..39: mol_type = other DNA
  misc_feature 1..39: note = Synthetic
atgtttaatagtcctttttttacccacacagaaagctga

SEQ ID NO: 3532 - DNA, 183 bp, synthetic construct
  source 1..183: mol_type = other DNA
  misc_feature 1..183: note = Synthetic
ctgacaagcgacgagatggacactgtcattgagctgtccaaactcctgcacgatgaagagttcaaagacaacgcttcctgtacctcgacccccacgctaaagacagcacgaatcattgagagcgcagttaccggaatcacgctcactgcatccgtcgactcggtccgcactagcctgaggtaa

SEQ ID NO: 3533 - DNA, 48 bp, synthetic construct
  misc_feature 1..48: note = Synthetic
  source 1..48: mol_type = other DNA
atgaagagttcaaagacaacgcttcctgtacctcgacccccacgctaa

SEQ ID NO: 3534 - DNA, 183 bp, synthetic construct
  misc_feature 1..183: note = Synthetic
  source 1..183: mol_type = other DNA
ctgacaagcgacgaggccgacactgtcattgagctgtccaaactcctgcacgatgaagagttcaaagacaacgcttcctgtacctcgacccccacgctaaagacagcacgaatcattgagagcgcagttaccggaatcacgctcactgcatccgtcgactcggtccgcactagcctgaggtaa

SEQ ID NO: 3535 - DNA, 90 bp, synthetic construct
  misc_feature 1..90: note = Synthetic
  source 1..90: mol_type = other DNA
acgaggccgacactgtcattgagctgtccaaactcctgcacgatgaagagttcaaagacaacgcttcctgtacctcgacccccacgctaa

SEQ ID NO: 3536 - DNA, 51 bp, synthetic construct
  misc_feature 1..51: note = Synthetic
  source 1..51: mol_type = other DNA
atgatggaaatgacgatgatcggaaatcgatggaagcaatcgccaagatga

SEQ ID NO: 3537 - DNA, 105 bp, synthetic construct
  source 1..105: mol_type = other DNA
  misc_feature 1..105: note = Synthetic
atggaagcaatcgccaagatgaggatgcttactaagatgctcagtcaacctgggaccagtgaagataattctcctgtttatagtgataaagagctactcaattaa

SEQ ID NO: 3538 - DNA, 33 bp, synthetic construct
  source 1..33: mol_type = other DNA
  misc_feature 1..33: note = Synthetic
ataaaaaactcgactcggtccgcactagcctga

SEQ ID NO: 3539 - DNA, 60 bp, synthetic construct
  source 1..60: mol_type = other DNA
  misc_feature 1..60: note = Synthetic
atgggcattataagtatagcagacttctttatggtttcgactcggtccgcactagcctga

SEQ ID NO: 3540 - DNA, 18 bp, synthetic construct
  source 1..18: mol_type = other DNA
  misc_feature 1..18: note = Synthetic
attttgttaattctgtga

SEQ ID NO: 3541 - DNA, 135 bp, synthetic construct
  misc_feature 1..135: note = Synthetic
  source 1..135: mol_type = other DNA
ttgactattgctgttaattgtgtgtatcaccgtcagccagaaggatttttccaagtcatttggggggcaattcagtcggtggccctaggtaaggctgacttgaccacctaccgactaccaatatttagggcttaa

SEQ ID NO: 3542 - DNA, 27 bp, synthetic construct
  misc_feature 1..27: note = Synthetic
  source 1..27: mol_type = other DNA
atttttatagttgtatacggaaaataa

SEQ ID NO: 3543 - DNA, 39 bp, synthetic construct
  misc_feature 1..39: note = Synthetic
  source 1..39: mol_type = other DNA
acggaaaataaggtaattcccctggcttgtcacctctag

SEQ ID NO: 3544 - DNA, 156 bp, synthetic construct
  source 1..156: mol_type = other DNA
  misc_feature 1..156: note = Synthetic
ctggaagatttgttatggcaacaaattctcagtatggatccggcggaacttctgtcggacaatgcaatctcgtccacgtgtgacgaaaacatcgcagctggacatcattttacgcaatctccgcacgtcgactcggtccgcactagcctgaggtaa

SEQ ID NO: 3545 - DNA, 54 bp, synthetic construct
  source 1..54: mol_type = other DNA
  misc_feature 1..54: note = Synthetic
ctggacatcattttacgcaatctccgcacgtcgactcggtccgcactagcctga

SEQ ID NO: 3546 - DNA, 12 bp, synthetic construct
  misc_feature 1..12: note = Synthetic
  source 1..12: mol_type = other DNA
atgataggctga

SEQ ID NO: 3547 - DNA, 114 bp, synthetic construct
  misc_feature 1..114: note = Synthetic
  source 1..114: mol_type = other DNA
ataagagacatgaaaaaccaaaaagccgtttacatccagatccaagatcaagagtggcttggaaataaggggcacttgttctttgtctcaaaggacttacaaaaacaagggtga

SEQ ID NO: 3548 - DNA, 54 bp, synthetic construct
  source 1..54: mol_type = other DNA
  misc_feature 1..54: note = Synthetic
gtgatgaagattaagaaaaagcctccttcagcgactcggtccgcactagcctga

SEQ ID NO: 3549 - DNA, 207 bp, synthetic construct
  misc_feature 1..207: note = Synthetic
  source 1..207: mol_type = other DNA
ataactgaaaaaaaaattactactattgttaatttagttatggaaccaatccttgcaaaaaatccaaatagatttgttatttttccaattcaatatcatgacatctggaatatgtataaaaaggcagaggcatcattttggacagtggaagaagtggatatatctaaagatatcaatgacgactcggtccgcactagcctgaggtaa

SEQ ID NO: 3550 - DNA, 105 bp, synthetic construct
  source 1..105: mol_type = other DNA
  misc_feature 1..105: note = Synthetic
atgacatctggaatatgtataaaaaggcagaggcatcattttggacagtggaagaagtggatatatctaaagatatcaatgacgactcggtccgcactagcctga

SEQ ID NO: 3551 - DNA, 75 bp, synthetic construct
  misc_feature 1..75: note = Synthetic
  source 1..75: mol_type = other DNA
atgatccctatgatagggtactacaacatggcagtgtcaaagcacggatacagggccttcagcttaataaagtag

SEQ ID NO: 3552 - DNA, 150 bp, synthetic construct
  misc_feature 1..150: note = Synthetic
  source 1..150: mol_type = other DNA
atggataaaactttatctagagaagaggcaaagcagctaatgcaacttttatgtttggacatgagttgctggggcaatttaccattaatgagaagacaatacttagtaaagtgcaaagaatatcatccgactcggtccgcactagcctga

SEQ ID NO: 3553 - DNA, 153 bp, synthetic construct
  misc_feature 1..153: note = Synthetic
  source 1..153: mol_type = other DNA
acgcacctcatcgcccaggccatggagatggacctctcagtgacgcacatctcccgactgcggcggctgctgaccaagctccgcgtcaacaccttcacggcggtggcgtgcctgcgagaggcgatcgactcggtccgcactagcctgaggtaa

SEQ ID NO: 3554 - DNA, 189 bp, synthetic construct
  source 1..189: mol_type = other DNA
  misc_feature 1..189: note = Synthetic
ctgactgcaccgaccccaaccatggccacgtcagaactcaacctctatatcgacaaggactcaccccaggtgagattgctagcattccccatcatcatgaaacccaaagaaaatggggttagagagctgcaaccgcaactgaggactcagtacctcggtgacgactcggtccgcactagcctgaggtaa

SEQ ID NO: 3555 - DNA, 189 bp, synthetic construct
  source 1..189: mol_type = other DNA
  misc_feature 1..189: note = Synthetic
ctgactgcaccgaccccaaccgccgccacgtcagaactcaacctctatatcgacaaggactcaccccaggtgagattgctagcattccccatcatcatgaaacccaaagaaaatggggttagagagctgcaaccgcaactgaggactcagtacctcggtgacgactcggtccgcactagcctgaggtaa

SEQ ID NO: 3556 - DNA, 84 bp, synthetic construct
  misc_feature 1..84: note = Synthetic
  source 1..84: mol_type = other DNA
atgtcaatcagcaagggtgttcctgccccctcgacgcgcctgtcgcgatcctcatggcgaggaccgcgatctccgtataggtag

SEQ ID NO: 3557 - DNA, 45 bp, synthetic construct
  misc_feature 1..45: note = Synthetic
  source 1..45: mol_type = other DNA
ttgtatacggaaaataaggtaattcccctggcttgtcacctctag

SEQ ID NO: 3558 - DNA, 168 bp, synthetic construct
  misc_feature 1..168: note = Synthetic
  source 1..168: mol_type = other DNA
atgtctgcacatccggacgatttgttttggcaacaaattctcaatatggatccgacggaacttttgtcggacgatgtaatctcgtccacgtgtgacgaaaacactgcagctggaactgatattatgcagcctttgtgcgtcgactcggtccgcactagcctgaggtaa

SEQ ID NO: 3559 - DNA, 207 bp, synthetic construct
  misc_feature 1..207: note = Synthetic
  source 1..207: mol_type = other DNA
atgtcaaattcctggtccacaattttcattgtcttccctctcagatgtcaaagaggctccgggtggaagatgacttcaaccccgtctacccctatggctacgcgcggaatcagaatatccccttcctcactcccccctttgtctcctccgatggattccaaaacttcccccctggggtcctgtccgactcggtccgcactagcctga

SEQ ID NO: 3560 - DNA, 159 bp, synthetic construct
  source 1..159: mol_type = other DNA
  misc_feature 1..159: note = Synthetic
ttgttactagcaagatctagccctgtcgcacatccagagttagtcatgggatctaggctgtttagcttcttctctcctttgaaaattaaagtgccgttgttaaatgaagacaccattaggctaaaggcttccagattaacacctggagttgtatgctga

SEQ ID NO: 3561 - DNA, 168 bp, synthetic construct
  source 1..168: mol_type = other DNA
  misc_feature 1..168: note = Synthetic
atgcagactctgctcatgctgctatccctcctatcccctgccctcgccacttctgctgactctaaatgcaaattcgcggagatatggaatttcttagattgctatcaggagaaaattgatatgccctcctattacttggtcgactcggtccgcactagcctgaggtaa

SEQ ID NO: 3562 - DNA, 54 bp, synthetic construct
  source 1..54: mol_type = other DNA
  misc_feature 1..54: note = Synthetic
atgcaaattcgcggagatatggaatttcttagattgctatcaggagaaaattga

SEQ ID NO: 3563 - DNA, 153 bp, synthetic construct
  source 1..153: mol_type = other DNA
  misc_feature 1..153: note = Synthetic
atgctgctatccctcctatcccctgccctcgccacttctgctgactctaaatgcaaattcgcggagatatggaatttcttagattgctatcaggagaaaattgatatgccctcctattacttggtcgactcggtccgcactagcctgaggtaa

SEQ ID NO: 3564 - DNA, 114 bp, synthetic construct
  source 1..114: mol_type = other DNA
  misc_feature 1..114: note = Synthetic
atggtgtgcgtttcagaggccggcgtcaagcgcaacgagctcgtgcagcgcttgaccatgattgctggcgccggctaccggctcaccggctccggcgagggcgtcccagtgtag

SEQ ID NO: 3565 - DNA, 216 bp, synthetic construct
  misc_feature 1..216: note = Synthetic
  source 1..216: mol_type = other DNA
ttggtaagcttttcaagagcgtctgtgccgtccattgccggcgtggatatgaaggtgcaggctgaaaatgcggctcgcctgggtaggcaagtgttgggtcttttacctccaccaactcaccgggtatccctcactagaggaccggagtttgccaggggggtgcgggatttactctctaaatatgcggccgactcggtccgcactagcctgaggtaa

SEQ ID NO: 3566 - DNA, 189 bp, synthetic construct
  misc_feature 1..189: note = Synthetic
  source 1..189: mol_type = other DNA
ctgtgccgtccattgccggcgtggatgccaaggtgcaggctgaaaatgcggctcgcctgggtaggcaagtgttgggtcttttacctccaccaactcaccgggtatccctcactagaggaccggagtttgccaggggggtgcgggatttactctctaaatatgcggccgactcggtccgcactagcctga

SEQ ID NO: 3567 - DNA, 219 bp, synthetic construct
  misc_feature 1..219: note = Synthetic
  source 1..219: mol_type = other DNA
ttgactaagcccagcagtccagacaaccacggcttcggctacacttcccgcatggatcaagatgccctcatttctaaagaagattctgaagttgagagggaggcgtcaggaggacgagagtcgctctcggatgttatcggattcctcgacgcagtcctatcaagtgaaccaactgacatcggaggggacagcgactcggtccgcactagcctgaggtaa

SEQ ID NO: 3568 - DNA, 186 bp, synthetic construct
  source 1..186: mol_type = other DNA
  misc_feature 1..186: note = Synthetic
acggcttcggctacacttcccgcatggatcaagatgccctcatttctaaagaagattctgaagttgagagggaggcgtcaggaggacgagagtcgctctcggatgttatcggattcctcgacgcagtcctatcaagtgaaccaactgacatcggaggggacagcgactcggtccgcactagcctga

SEQ ID NO: 3569 - DNA, 186 bp, synthetic construct
  source 1..186: mol_type = other DNA
  misc_feature 1..186: note = Synthetic
acggcttcggctacacttcccgcgccgatcaagatgccctcatttctaaagaagattctgaagttgagagggaggcgtcaggaggacgagagtcgctctcggatgttatcggattcctcgacgcagtcctatcaagtgaaccaactgacatcggaggggacagcgactcggtccgcactagcctga

SEQ ID NO: 3570 - DNA, 27 bp, synthetic construct
  source 1..27: mol_type = other DNA
  misc_feature 1..27: note = Synthetic
atgtcctggaagagaaggcaatggtga

SEQ ID NO: 3571 - DNA, 39 bp, synthetic construct
  source 1..39: mol_type = other DNA
  misc_feature 1..39: note = Synthetic
atggtgaaatttcgccaacaattgctccctcttcggtga

SEQ ID NO: 3572 - DNA, 126 bp, synthetic construct
  misc_feature 1..126: note = Synthetic
  source 1..126: mol_type = other DNA
attagagtctccagccggtcaaaaatcacactgaagttcgctttcagtatgatgtttttatccatgatcgcctggtccattctgatacaaagagggcccgactcggtccgcactagcctgaggtaa

SEQ ID NO: 3573 - DNA, 126 bp, synthetic construct
  misc_feature 1..126: note = Synthetic
  source 1..126: mol_type = other DNA
attagagtctccagccggtcaaaaatcacactgaagttcgctttcagtatgatgtttttatccatgatcgcctggtccattctgatacagccagggcccgactcggtccgcactagcctgaggtaa

SEQ ID NO: 3574 - DNA, 201 bp, synthetic construct
  source 1..201: mol_type = other DNA
  misc_feature 1..201: note = Synthetic
gtgcctcctggaagagaaggcaatggtgaaatttcgccaacaattgctccctcttcggtgaaagcccttagcaatattagagtctccagccggtcaaaaatcacactgaagttcgctttcagtatgatgtttttatccatgatcgcctggtccattctgatacaaagagggcccgactcggtccgcactagcctgaggtaa

SEQ ID NO: 3575 - DNA, 207 bp, synthetic construct
  source 1..207: mol_type = other DNA
  misc_feature 1..207: note = Synthetic
atgtcaaattcctggtccacaattttcattgtcttccctctcagatgtcaaagaggctccgggtggaagatgacttcaatcccgtctacccctatggctacgcgcggaatcaaaatatccccttccttactcccccctttgtctcctccaatggattccaaaacttcccccctggggttctgtccgactcggtccgcactagcctga

SEQ ID NO: 3576 - DNA, 207 bp, synthetic construct
  misc_feature 1..207: note = Synthetic
  source 1..207: mol_type = other DNA
atgtcaaattcctggtccacaattttcattgtcttccctctcaggcctcaaagaggctccgggtggaagatgacttcaaccccgtctacccctatggctacgcgcggaatcagaatatccccttcctcactcccccctttgtctcctccgatggattccaaaacttcccccctggggtcctgtccgactcggtccgcactagcctga

SEQ ID NO: 3577 - DNA, 207 bp, synthetic construct
  misc_feature 1..207: note = Synthetic
  source 1..207: mol_type = other DNA
atgtcaaattcctggtccacaattttcattgtcttccctctcaggcctcaaagaggctccgggtggaagatgacttcaatcccgtctacccctatggctacgcgcggaatcaaaatatccccttccttactcccccctttgtctcctccaatggattccaaaacttcccccctggggttctgtccgactcggtccgcactagcctga

SEQ ID NO: 3578 - DNA, 159 bp, synthetic construct
  source 1..159: mol_type = other DNA
  misc_feature 1..159: note = Synthetic
ttgttactagcaagatctaatgctgtcgcacatccagagttagtcatgggatctaggctgtttagcttcttctctcctttgaaaattaaagtgccgttgttaaatgaagacaccattaggctaaaggcttccagattaacacctggagttgtatgctga

SEQ ID NO: 3579 - DNA, 24 bp, synthetic construct
  misc_feature 1..24: note = Synthetic
  source 1..24: mol_type = other DNA
atgctgtcgcacatccagagttag

SEQ ID NO: 3580 - DNA, 45 bp, synthetic construct
  misc_feature 1..45: note = Synthetic
  source 1..45: mol_type = other DNA
acggtagccgtatacccacaatccggaatgttaccacaagcgtaa

SEQ ID NO: 3581 - DNA, 66 bp, synthetic construct
  source 1..66: mol_type = other DNA
  misc_feature 1..66: note = Synthetic
atgttgaattactatgttgcagacgttgccgactcgtgccgtgcgactcggtccgcactagcctga

SEQ ID NO: 3582 - DNA, 105 bp, synthetic construct
  misc_feature 1..105: note = Synthetic
  source 1..105: mol_type = other DNA
ttgtggttcttgcagatgccgccctcacctgccgcctccgtttcccggtgccgggattccgaggaagaatgcaccgtaggaggggcatggccggccacggcctga

SEQ ID NO: 3583 - DNA, 150 bp, synthetic construct
  misc_feature 1..150: note = Synthetic
  source 1..150: mol_type = other DNA
atgacattcggcgatatccctctagtggaatatggaactgtggtaaataaagaggctatacacgaatactttagaaatattaatattgattcttacacgatgaaatatctactaaaaaaggaagggagatgccatcaattatctcgatga

SEQ ID NO: 3584 - DNA, 39 bp, synthetic construct
  misc_feature 1..39: note = Synthetic
  source 1..39: mol_type = other DNA
atgtttaatagtcttttttttacccacacagaaaactga

SEQ ID NO: 3585 - DNA, 183 bp, synthetic construct
  source 1..183: mol_type = other DNA
  misc_feature 1..183: note = Synthetic
ctgacaagcgacgagatggacactgtcattgagctgtccaaacttctgttcaaaggcaatgcttcctgtacctcgacacccacgctaaagacagcacgaatcatggagagcgcagttaccggaatcacgctcaccacatctatccccatgatcatcgactcggtccgcactagcctgaggtaa

SEQ ID NO: 3586 - DNA, 30 bp, synthetic construct
  source 1..30: mol_type = other DNA
  misc_feature 1..30: note = Synthetic
atgcttcctgtacctcgacacccacgctaa

SEQ ID NO: 3587 - DNA, 24 bp, synthetic construct
  misc_feature 1..24: note = Synthetic
  source 1..24: mol_type = other DNA
ctgctacatacacttcttccgtga

SEQ ID NO: 3588 - DNA, 45 bp, synthetic construct
  misc_feature 1..45: note = Synthetic
  source 1..45: mol_type = other DNA
atgggattgatgtcacagacctcttcgctacacaaccgggcttga

SEQ ID NO: 3589 - DNA, 108 bp, synthetic construct
  misc_feature 1..108: note = Synthetic
  source 1..108: mol_type = other DNA
acgggttatcaacgttcagtagttcacgaaatacgcgggaggcgcgcgatcgtgtccatggccaatacccggagattgtggatctccagccgttttatgctctcttaa

SEQ ID NO: 3590 - DNA, 54 bp, synthetic construct
  misc_feature 1..54: note = Synthetic
  source 1..54: mol_type = other DNA
atgggtacatggccgtgtggaacgtcaatgcagacagtgctgatttccagatag

SEQ ID NO: 3591 - DNA, 108 bp, synthetic construct
  misc_feature 1..108: note = Synthetic
  source 1..108: mol_type = other DNA
atggctacttcgtcaccaatggggccatcggcacgcgcatggtcatctcagaagacaccaccttcagtttcaacggcatgtacaccgactcggtccgcactagcctga

SEQ ID NO: 3592 - DNA, 27 bp, synthetic construct
  source 1..27: mol_type = other DNA
  misc_feature 1..27: note = Synthetic
gtggcgcagctgctcaggctcatctga

SEQ ID NO: 3593 - DNA, 168 bp, synthetic construct
  misc_feature 1..168: note = Synthetic
  source 1..168: mol_type = other DNA
atgcgggctttgctacttctcatgcttctactattgctagctcccctggtcgccccctttcccctcaaatcccccacccagtcccccaaagaggttcgaaactgtaaattccaagaaccctggaaattcctcaaatgctacgactcggtccgcactagcctgaggtaa

SEQ ID NO: 3594 - DNA, 159 bp, synthetic construct
  source 1..159: mol_type = other DNA
  misc_feature 1..159: note = Synthetic
ttgctacttctcatgcttctactattgctagctcccctggtcgccccctttcccctcaaatcccccacccagtcccccaaagaggttcgaaactgtaaattccaagaaccctggaaattcctcaaatgctacgactcggtccgcactagcctgaggtaa

SEQ ID NO: 3595 - DNA, 48 bp, synthetic construct
  source 1..48: mol_type = other DNA
  misc_feature 1..48: note = Synthetic
atgccatttttcagcagagtcgaggtcagcagcaagagctcaaagtaa

SEQ ID NO: 3596 - DNA, 78 bp, synthetic construct
  misc_feature 1..78: note = Synthetic
  source 1..78: mol_type = other DNA
ctggtcggccgtttaacaataatccggctgttgatcatggggtctagaggggtcggggtgcatcgaggacacgcctaa

SEQ ID NO: 3597 - DNA, 24 bp, synthetic construct
  source 1..24: mol_type = other DNA
  misc_feature 1..24: note = Synthetic
atgattaagaaaaacttaggatga

SEQ ID NO: 3598 - DNA, 96 bp, synthetic construct
  source 1..96: mol_type = other DNA
  misc_feature 1..96: note = Synthetic
atgaaaggactaatcaatcctccgaaacagccagcatcaccaactccacaatctacacattcccagaatcctctttctccgagaatggcaacatag

SEQ ID NO: 3599 - DNA, 222 bp, synthetic construct
  misc_feature 1..222: note = Synthetic
  source 1..222: mol_type = other DNA
ttgataagtacgatttgctcgacaacgcacacaacgcatcacgacctagtcagaatgaatggctcagctactggcaactcagctagtcttcccgctcctcagttttccgaatgtgtttttttaccgaaagatacattttgctccttactgaatgctacagctggggcccaaaataaaaacgtaacgccagctgccgactcggtccgcactagcctgaggtaa

SEQ ID NO: 3600 - DNA, 222 bp, synthetic construct
  misc_feature 1..222: note = Synthetic
  source 1..222: mol_type = other DNA
ttgataagtacgatttgctcgacaacgcacacaacgcatcacgacctagtcagagccaatggctcagctactggcaactcagctagtcttcccgctcctcagttttccgaatgtgtttttttaccgaaagatacattttgctccttactgaatgctacagctggggcccaaaataaaaacgtaacgccagctgccgactcggtccgcactagcctgaggtaa

SEQ ID NO: 3601 - DNA, 93 bp, synthetic construct
  misc_feature 1..93: note = Synthetic
  source 1..93: mol_type = other DNA
atggctcagctactggcaactcagctagtcttcccgctcctcagttttccgaatgtgtttttttaccgaaagatacattttgctccttactga

SEQ ID NO: 3602 - DNA, 66 bp, synthetic construct
  source 1..66: mol_type = other DNA
  misc_feature 1..66: note = Synthetic
atgtacatgagctcgctgcgcgcgtccacgttgacagagacttcctcgctgaattccgagaagtag

SEQ ID NO: 3603 - DNA, 81 bp, synthetic construct
  source 1..81: mol_type = other DNA
  misc_feature 1..81: note = Synthetic
atgcgcacgctcattttatgtgtccggcattctttgaagaagttgccgagcttgcaccagaaagtactgttgcgggcgtag

SEQ ID NO: 3604 - DNA, 204 bp, synthetic construct
  misc_feature 1..204: note = Synthetic
  source 1..204: mol_type = other DNA
atgcttgcttccggtgccggccgccggcgcctgtttccgctcgcgctgcttcccgctgagcgcagcacacttgtttttttttctttctctaggagctccgtgctgcggcaaccgcgcccgcgcgctttttgccgctcacagcttcgcgagcccggatcagccccgcgccagcagtccgccgcgactcggtccgcactagcctga

SEQ ID NO: 3605 - DNA, 183 bp, synthetic construct
  source 1..183: mol_type = other DNA
  misc_feature 1..183: note = Synthetic
atttataacgtacaagccgataaaactactttatcagtaaacgcgtgtaatttagaatacgttagagaaaaggctatagtaggcgtacaagcagccaagacatcaacacttatattctttgttattatattggcaattagtgcgctattactctgcgactcggtccgcactagcctgaggtaa

SEQ ID NO: 3606 - DNA, 183 bp, synthetic construct
  source 1..183: mol_type = other DNA
  misc_feature 1..183: note = Synthetic
atttataacgtacaagccgataaaactactttatcggtaaacgcgtgtaatttagaatacgttagagaaaaggctatagtaggcgtacaagcagccaaaacatcaacacttatattctttgttattatattggcaattagtgcgctattactctgcgactcggtccgcactagcctgaggtaa

SEQ ID NO: 3607 - DNA, 45 bp, synthetic construct
  source 1..45: mol_type = other DNA
  misc_feature 1..45: note = Synthetic
ttgttgtccatcttgccttttctgagtactgatgtgtcctgttga

SEQ ID NO: 3608 - DNA, 114 bp, synthetic construct
  misc_feature 1..114: note = Synthetic
  source 1..114: mol_type = other DNA
atgtgtcctgttgacagtatccatggtgtatcctgttcctgtcccatggctgtaaggagggtctccggtataagggaaagttgtgcttatagcattttgtgctggcacttttaa

SEQ ID NO: 3609 - DNA, 33 bp, synthetic construct
  source 1..33: mol_type = other DNA
  misc_feature 1..33: note = Synthetic
atggtgtatcctgttcctgtcccatggctgtaa

SEQ ID NO: 3610 - DNA, 168 bp, synthetic construct
  source 1..168: mol_type = other DNA
  misc_feature 1..168: note = Synthetic
atgaacttcatcatcaccacccgagacttctccaacgacgattcagtcctgcgagccgccgagatgcgtgacaacgtggcaggctcgatttccaaagcgtacaagggcacggtacgcgccgaaggcaagaagaagctgctcgactcggtccgcactagcctgaggtaa

SEQ ID NO: 3611 - DNA, 156 bp, synthetic construct
  source 1..156: mol_type = other DNA
  misc_feature 1..156: note = Synthetic
atcaccacccgagacttctccaacgacgattcagtcctgcgagccgccgagatgcgtgacaacgtggcaggctcgatttccaaagcgtacaagggcacggtacgcgccgaaggcaagaagaagctgctcgactcggtccgcactagcctgaggtaa

SEQ ID NO: 3612 - DNA, 105 bp, synthetic construct
  source 1..105: mol_type = other DNA
  misc_feature 1..105: note = Synthetic
atgtcatgccgtccggccccagaagggtgggaatggtgggcgttttcatacataaaatcctgcaggtcccctgcgtcgctgtcgactcggtccgcactagcctga

SEQ ID NO: 3613 - DNA, 105 bp, synthetic construct
  misc_feature 1..105: note = Synthetic
  source 1..105: mol_type = other DNA
atgtcatgccgtccggccccagaagggtgggaatggtgggcgttttcatacataaaatcctgcgcctcccctgcgtcgctgtcgactcggtccgcactagcctga

SEQ ID NO: 3614 - DNA, 186 bp, synthetic construct
  source 1..186: mol_type = other DNA
  misc_feature 1..186: note = Synthetic
gtgacgctggagctcgcgcagcacgagaagaccgcgaggcacagcctcgcgtcaagcaagaagcgcaaagccctgagcatgatgcgcttccgagccttcatgagcaaggtgagggcactgcgcccgctcttcgagagcagcgagctcgaggacatttgcgacgccatgcgctgcgtctcactgtga

SEQ ID NO: 3615 - DNA, 111 bp, synthetic construct
  misc_feature 1..111: note = Synthetic
  source 1..111: mol_type = other DNA
atggcccattgtatcacccacggcccctgcctctacacagtatattggtatacatggtacacattattatttgtggccattatattatcgactcggtccgcactagcctga

SEQ ID NO: 3616 - DNA, 12 bp, synthetic construct
  misc_feature 1..12: note = Synthetic
  source 1..12: mol_type = other DNA
atgctggactga

SEQ ID NO: 3617 - DNA, 90 bp, synthetic construct
  misc_feature 1..90: note = Synthetic
  source 1..90: mol_type = other DNA
atggccacagcgtgtgtcctttcttcctctctttcttcctcggcgcggcagaatgagaagagcggtgagagtcacgccggcggcgtatga

SEQ ID NO: 3618 - DNA, 156 bp, synthetic construct
  source 1..156: mol_type = other DNA
  misc_feature 1..156: note = Synthetic
gtgagagtcacgccggcggcgtatgagggtccgcccccttcttacgaaagcgtgatgggatcagcgaacgtgccggccacgctggaggcgccttacgttcctcccagatacctgggacctacggagggcgactcggtccgcactagcctgaggtaa

SEQ ID NO: 3619 - DNA, 90 bp, synthetic construct
  misc_feature 1..90: note = Synthetic
  source 1..90: mol_type = other DNA
atggccacagcgtgtgtcctttcttcctctctttcttcctcggcgcggcagagccagaagagcggtgagagtcacgccggcggcgtatga

SEQ ID NO: 3620 - DNA, 165 bp, synthetic construct
  source 1..165: mol_type = other DNA
  misc_feature 1..165: note = Synthetic
ttgtttgtttgttttttaataaactgttattacttaacaatgcgacacaaacgttctgcaaaacgcacaaaacgtgcatcggctacccaactttataaaacatgcaaacaggcaggtacatgtccacctgacattatacctaaggttcgactcggtccgcactag

SEQ ID NO: 3621 - DNA, 216 bp, synthetic construct
  source 1..216: mol_type = other DNA
  misc_feature 1..216: note = Synthetic
ataacttactattttttcttttttattttcatatataatttttttttttgtttgtttgtttgttttttaataaactgttattacttaacaatgcgacacaaacgttctgcaaaacgcacaaaacgtgcatcggctacccaactttataaaacatgcaaacgcccaggtacatgtccacctgacattatacctaaggttcgactcggtccgcactag

SEQ ID NO: 3622 - DNA, 168 bp, synthetic construct
  source 1..168: mol_type = other DNA
  misc_feature 1..168: note = Synthetic
atgagcaagatctttgtcaacccgagtgcaattcgagctggcttagctgaccttgagatggcggaagagacggttgacttagtcaacaaaaacatcgaggacaaccaagctcatctccaaggggagccgattgaggttgacgactcggtccgcactagcctgaggtaa

SEQ ID NO: 3623 - DNA, 159 bp, synthetic construct
  misc_feature 1..159: note = Synthetic
  source 1..159: mol_type = other DNA
atctttgtcaacccgagtgcaattcgagctggcttagctgaccttgagatggcggaagagacggttgacttagtcaacaaaaacatcgaggacaaccaagctcatctccaaggggagccgattgaggttgacgactcggtccgcactagcctgaggtaa

SEQ ID NO: 3624 - DNA, 48 bp, synthetic construct
  misc_feature 1..48: note = Synthetic
  source 1..48: mol_type = other DNA
atgcgcttcctcttcggcgtgattacgcggctcgagtgggaaaactga

SEQ ID NO: 3625 - DNA, 183 bp, synthetic construct
  misc_feature 1..183: note = Synthetic
  source 1..183: mol_type = other DNA
ctgcaaaaagctaaaatggacaaagtgctgaatagggaggaatccatggagcttatggatttattaggccttgataggtctgcatgggggaacattcctgtcatgagaaaagcttatctgaaaaaatgcaaagaactccaccctgataaaggtggcgactcggtccgcactagcctgaggtaa

SEQ ID NO: 3626 - DNA, 183 bp, synthetic construct
  misc_feature 1..183: note = Synthetic
  source 1..183: mol_type = other DNA
ctgcaaaaagctaaagccgacaaagtgctgaatagggaggaatccatggagcttatggatttattaggccttgataggtctgcatgggggaacattcctgtcatgagaaaagcttatctgaaaaaatgcaaagaactccaccctgataaaggtggcgactcggtccgcactagcctgaggtaa

SEQ ID NO: 3627 - DNA, 48 bp, synthetic construct
  source 1..48: mol_type = other DNA
  misc_feature 1..48: note = Synthetic
atgccatttttcagcagagtcgaggtcagcagcaagagcttaaagtaa

SEQ ID NO: 3628 - DNA, 141 bp, synthetic construct
  misc_feature 1..141: note = Synthetic
  source 1..141: mol_type = other DNA
atcggtctctgcgctcgctcacccgcagttgcttgtaccacaaaaacgaagatcagctgcagcgcactcttgaagacgccgaggctttgttccacaagtactgcgcgcttactcgactcggtccgcactagcctgaggtaa

SEQ ID NO: 3629 - DNA, 195 bp, synthetic construct
  misc_feature 1..195: note = Synthetic
  source 1..195: mol_type = other DNA
ataaaaaacttgggaggcgcaaacggtatgttttccataataaatccgagtgatgatttctggactaaggacaaatatatcatgttgactatcaaaggccccatggagtgggaggcagaaatccctggaatatctacggattttttctgtaaattctctaacgtgtccgactcggtccgcactagcctgaggtaa

SEQ ID NO: 3630 - DNA, 36 bp, synthetic construct
  misc_feature 1..36: note = Synthetic
  source 1..36: mol_type = other DNA
atgatttctggactaaggacaaatatatcatgttga

SEQ ID NO: 3631 - DNA, 195 bp, synthetic construct
  misc_feature 1..195: note = Synthetic
  source 1..195: mol_type = other DNA
ataaaaaacttgggaggcgcaaacggtgccttttccataataaatccgagtgatgatttctggactaaggacaaatatatcatgttgactatcaaaggccccatggagtgggaggcagaaatccctggaatatctacggattttttctgtaaattctctaacgtgtccgactcggtccgcactagcctgaggtaa

SEQ ID NO: 3632 - DNA, 189 bp, synthetic construct
  misc_feature 1..189: note = Synthetic
  source 1..189: mol_type = other DNA
atcttggaaggcacaaacggtatgttttccataataaatccaagtgatgatttttggactaaggacaaatatatcatgttgactatcaaaggccccgtggagtgggaggcagaaatccctggaatatctacggattttttttgcaaattctctaacgtgcccgactcggtccgcactagcctgaggtaa

SEQ ID NO: 3633 - DNA, 189 bp, synthetic construct
  misc_feature 1..189: note = Synthetic
  source 1..189: mol_type = other DNA
atcttggaaggcacaaacggtgccttttccataataaatccaagtgatgatttttggactaaggacaaatatatcatgttgactatcaaaggccccgtggagtgggaggcagaaatccctggaatatctacggattttttttgcaaattctctaacgtgcccgactcggtccgcactagcctgaggtaa

SEQ ID NO: 3634 - DNA, 216 bp, synthetic construct
  misc_feature 1..216: note = Synthetic
  source 1..216: mol_type = other DNA
atatctcctcttccatcaccaaaaaagttaatagcgttaactatcaaacaaactgctgaagtggtaggtcatactccatcaatttcaaaaagagcttatatggcaacgactattttagaaatggtaaaggataaaaattttttagatgtagtatctaaaactacgttcgatgaattcctatctatagtcgtagatcaccgactcggtccgcactag

SEQ ID NO: 3635 - DNA, 186 bp, synthetic construct
  misc_feature 1..186: note = Synthetic
  source 1..186: mol_type = other DNA
atagcgttaactatcaaacaaactgctgaagtggtaggtcatactccatcaatttcaaaaagagcttatatggcaacgactattttagaaatggtaaaggataaaaattttttagatgtagtatctaaaactacgttcgatgaattcctatctatagtcgtagatcaccgactcggtccgcactag

SEQ ID NO: 3636 - DNA, 78 bp, synthetic construct
  misc_feature 1..78: note = Synthetic
  source 1..78: mol_type = other DNA
atactgccccgcaagcgcgaccgggggagatcatggcatccggcaagcaccatcagcccggggggacgcggagcctga

SEQ ID NO: 3637 - DNA, 168 bp, synthetic construct
  misc_feature 1..168: note = Synthetic
  source 1..168: mol_type = other DNA
atggcatccggcaagcaccatcagcccggggggacgcggagcctgaccatgcaaaaagtaagcctgcgcgtgaccccccgcctggtgctggaagttaaccgccataacgccatctgcgtggccaccaacgtccctgagttcgactcggtccgcactagcctgaggtaa

SEQ ID NO: 3638 - DNA, 171 bp, synthetic construct
  misc_feature 1..171: note = Synthetic
  source 1..171: mol_type = other DNA
atcgccgcatccggcaagcaccatcagcccggggggacgcggagcctgaccatgcaaaaagtaagcctgcgcgtgaccccccgcctggtgctggaagttaaccgccataacgccatctgcgtggccaccaacgtccctgagttcgactcggtccgcactagcctgaggtaa

SEQ ID NO: 3639 - DNA, 78 bp, synthetic construct
  source 1..78: mol_type = other DNA
  misc_feature 1..78: note = Synthetic
atactgccccgcgagcgcgaccgggggagatcatggcatccggcaagcaccatcagcccggggggacacggagcctga

SEQ ID NO: 3640 - DNA, 168 bp, synthetic construct
  misc_feature 1..168: note = Synthetic
  source 1..168: mol_type = other DNA
atggcatccggcaagcaccatcagcccggggggacacggagcctgaccatgcaaaaagtaagcctgcgcgtgaccccccgcctggtgctggaagttaaccgccataacgccatctgcgtggccaccaacgtccctgagttcgactcggtccgcactagcctgaggtaa

SEQ ID NO: 3641 - DNA, 78 bp, synthetic construct
  misc_feature 1..78: note = Synthetic
  source 1..78: mol_type = other DNA
atactgccccgcgagcgcgaccgggggagatcatggcatccggcaagcaccatcagcccggggggacgcggagcctga

SEQ ID NO: 3642 - DNA, 171 bp, synthetic construct
  source 1..171: mol_type = other DNA
  misc_feature 1..171: note = Synthetic
atcgccgcatccggcaagcaccatcagcccggggggacacggagcctgaccatgcaaaaagtaagcctgcgcgtgaccccccgcctggtgctggaagttaaccgccataacgccatctgcgtggccaccaacgtccctgagttcgactcggtccgcactagcctgaggtaa

SEQ ID NO: 3643 - DNA, 54 bp, synthetic construct
  misc_feature 1..54: note = Synthetic
  source 1..54: mol_type = other DNA
gtggtgaagaccacgcccgtgaccgtctcggactgcacgagcgccagctcgtaa

SEQ ID NO: 3644 - DNA, 132 bp, synthetic construct
  misc_feature 1..132: note = Synthetic
  source 1..132: mol_type = other DNA
atggtgcgcggcaccacgcggtacatggacagcagcgaacgcgggaacttgaccttggcgccggcgacgaccagcaggaagtcttcgcgcgagacgctgccggcgcagacggcgcgactcggtccgcactag

SEQ ID NO: 3645 - DNA, 42 bp, synthetic construct
  misc_feature 1..42: note = Synthetic
  source 1..42: mol_type = other DNA
ttgaatcaattgtttgctccgactcggtccgcactagcctga

SEQ ID NO: 3646 - DNA, 111 bp, synthetic construct
  misc_feature 1..111: note = Synthetic
  source 1..111: mol_type = other DNA
atgcatcttacacaaccagccatatttgtcccacactttatcttcatactccctcgaagcttccctggtcatttcaacatcgataagcttaatgtccttcctattttgtga

SEQ ID NO: 3647 - DNA, 132 bp, synthetic construct
  misc_feature 1..132: note = Synthetic
  source 1..132: mol_type = other DNA
atcgtgtcaaggacggtgactgcagaaaggatccgccgaaaggaacagtctgttagtctgtcagctattatgtctggtggcgcgcgcggcagcaacgagtactgctcagactacactgccctccaccgttaa

SEQ ID NO: 3648 - DNA, 45 bp, synthetic construct
  misc_feature 1..45: note = Synthetic
  source 1..45: mol_type = other DNA
atgagcaacatgacagaaaacgaaagattgcttcattttttctaa

SEQ ID NO: 3649 - DNA, 36 bp, synthetic construct
  misc_feature 1..36: note = Synthetic
  source 1..36: mol_type = other DNA
atgacagaaaacgaaagattgcttcattttttctaa

SEQ ID NO: 3650 - DNA, 24 bp, synthetic construct
  source 1..24: mol_type = other DNA
  misc_feature 1..24: note = Synthetic
atgattcctattgtcttatattaa

SEQ ID NO: 3651 - DNA, 102 bp, synthetic construct
  source 1..102: mol_type = other DNA
  misc_feature 1..102: note = Synthetic
atgcatgagccacaggcattgctaatgtacctcatagacacacctaaatttagcacgtcccaaaccatgacatcacagaggaggctggtgccttggctttaa

SEQ ID NO: 3652 - DNA, 102 bp, synthetic construct
  misc_feature 1..102: note = Synthetic
  source 1..102: mol_type = other DNA
atgcatgagccacaggcattgctaatgtgcctcagagacacacctaaatttagcacgtcccaaaccatgacatcacagaggaggctggtgccttggctttaa

SEQ ID NO: 3653 - DNA, 42 bp, synthetic construct
  misc_feature 1..42: note = Synthetic
  source 1..42: mol_type = other DNA
ctggacgtactcgcgcatagtgatgacaatacgggttgctag

SEQ ID NO: 3654 - DNA, 30 bp, synthetic construct
  misc_feature 1..30: note = Synthetic
  source 1..30: mol_type = other DNA
atgacaatacgggttgctaggaattcgtga

SEQ ID NO: 3655 - DNA, 189 bp, synthetic construct
  source 1..189: mol_type = other DNA
  misc_feature 1..189: note = Synthetic
atgcgggccgctcgaaggctggccgcgggtattgtcactgtgccccccaggtccaggcgacgagcggccgccgcagcagccgcggccattagtgctatgactcagggtcgcaggggcaacgtgtactgggtgcgcgactcggttagcggcctgcgcgtgcccgtgcgcacccgccccccgcgcaactag

SEQ ID NO: 3656 - DNA, 168 bp, synthetic construct
  misc_feature 1..168: note = Synthetic
  source 1..168: mol_type = other DNA
atggataaaactactttatcagtaaacgcatgcaatttagaatacgttagagaaaaggctatagtaggcgtacaagcagccaagacatcaacacttatattttttgttattatattggcaattagtgcgctattactctgcgactcggtccgcactagcctgaggtaa

SEQ ID NO: 3657 - DNA, 168 bp, synthetic construct
  source 1..168: mol_type = other DNA
  misc_feature 1..168: note = Synthetic
atggataaaactactttatcagtaaacgcgtgtaatttagaatacgttagagaaaaggctatagtaggcgtacaagcagccaagacatcaacacttatattctttgttattatattggcaattagtgcgctattactctgcgactcggtccgcactagcctgaggtaa

SEQ ID NO: 3658 - DNA, 168 bp, synthetic construct
  misc_feature 1..168: note = Synthetic
  source 1..168: mol_type = other DNA
atggataaaactactttatcggtaaacgcgtgtaatttagaatacgttagagaaaaggctatagtaggcgtacaagcagccaaaacatcaacacttatattctttgttattatattggcaattagtgcgctattactctgcgactcggtccgcactagcctgaggtaa

SEQ ID NO: 3659 - DNA, 168 bp, synthetic construct
  misc_feature 1..168: note = Synthetic
  source 1..168: mol_type = other DNA
atggataaaactactttatcggtaaacgcgtgtaatttagaatacgttagagaaaaggctatagttggcgtacaagcagccaagacatcaacacttatattctttgttattatcttggcgattagtgcgctattactctgcgactcggtccgcactagcctgaggtaa

SEQ ID NO: 3660 - DNA, 183 bp, synthetic construct
  misc_feature 1..183: note = Synthetic
  source 1..183: mol_type = other DNA
atttataacgtacaagccgataaaactactttatcagtaaacgcatgcaatttagaatacgttagagaaaaggctatagtaggcgtacaagcagccaagacatcaacacttatattttttgttattatattggcaattagtgcgctattactctgcgactcggtccgcactagcctgaggtaa

SEQ ID NO: 3661 - DNA, 132 bp, synthetic construct
  source 1..132: mol_type = other DNA
  misc_feature 1..132: note = Synthetic
atcgtgtcaaggacggtgactgcagaaaggatccatggaaaggaacagtctgttagtctgtcagctattatgtctggtggcgcgcgcggcagcaacgagtactgctcagactacactgccctccaccgttaa

SEQ ID NO: 3662 - DNA, 168 bp, synthetic construct
  source 1..168: mol_type = other DNA
  misc_feature 1..168: note = Synthetic
atggaaaggaacagtctgttagtctgtcagctattatgtctggtggcgcgcgcggcagcaacgagtactgctcagactacactgccctccaccgttaacagcaccgcaacaggagttacctctgactctcaacagaacaccgactcggtccgcactagcctgaggtaa

SEQ ID NO: 3663 - DNA, 153 bp, synthetic construct
  misc_feature 1..153: note = Synthetic
  source 1..153: mol_type = other DNA
atgggagacgacttccaagcattgagggcgttgcaagttcccggcgctcagactacgctgcttaagcaagtagaagaatttgcccacgggtcagcgcttcgggagctcatgagttctcgaaattctacattttcgcaaaatcgctctcgatag

SEQ ID NO: 3664 - DNA, 39 bp, synthetic construct
  source 1..39: mol_type = other DNA
  misc_feature 1..39: note = Synthetic
atgactgaacgcttagtcacactgcgagtaacaccgtaa

SEQ ID NO: 3665 - DNA, 30 bp, synthetic construct
  misc_feature 1..30: note = Synthetic
  source 1..30: mol_type = other DNA
aagccagccattgaccagccagtgccttag

SEQ ID NO: 3666 - DNA, 12 bp, synthetic construct
  misc_feature 1..12: note = Synthetic
  source 1..12: mol_type = other DNA
ttggacccgtaa

SEQ ID NO: 3667 - DNA, 24 bp, synthetic construct
  source 1..24: mol_type = other DNA
  misc_feature 1..24: note = Synthetic
atgtattgcgccaaatataaataa

SEQ ID NO: 3668 - DNA, 159 bp, synthetic construct
  source 1..159: mol_type = other DNA
  misc_feature 1..159: note = Synthetic
acggaactcttttccccggagatgacgatcttgcaattccagcaactgaatttttctctacaaaggctgctaaaaatccagagactaaacgcgaagcaattgttaaagcctatggagacgacaatgaggaaactctcgactcggtccgcactagcctga

SEQ ID NO: 3669 - DNA, 138 bp, synthetic construct
  misc_feature 1..138: note = Synthetic
  source 1..138: mol_type = other DNA
atgacgatcttgcaattccagcaactgaatttttctctacaaaggctgctaaaaatccagagactaaacgcgaagcaattgttaaagcctatggagacgacaatgaggaaactctcgactcggtccgcactagcctga

SEQ ID NO: 3670 - DNA, 168 bp, synthetic construct
  misc_feature 1..168: note = Synthetic
  source 1..168: mol_type = other DNA
atggagatgaatttgttacagaaactatgcgtagtgtgttcgaaatgcaacgaatacgccatggagctggagtgtctaaagtactgcgatccgaacgtgttactggcggagtccacgccgttcaagagaaacgcggcggccgactcggtccgcactagcctgaggtaa

SEQ ID NO: 3671 - DNA, 195 bp, synthetic construct
  misc_feature 1..195: note = Synthetic
  source 1..195: mol_type = other DNA
atacccctatatctctgggagttgctgctcgtcccacaggttgcgtcggggccgggcgatcgcctcacgccggtgggcttgcttgcggcaaaaggggccagccggtcggtgatgtgtctcaccgttcgagaacgaacattccatgtcggactgatgcaattcacggtagtgtttactcgactcggtccgcactag

SEQ ID NO: 3672 - DNA, 39 bp, synthetic construct
  source 1..39: mol_type = other DNA
  misc_feature 1..39: note = Synthetic
aagttgcgaaaaaccaggtcacgaaaaatttattactag

SEQ ID NO: 3673 - DNA, 66 bp, synthetic construct
  source 1..66: mol_type = other DNA
  misc_feature 1..66: note = Synthetic
acgaaaaatttattactagcttcacggcctacggcagaactgtccaacaggccgttagcaagttag

SEQ ID NO: 3674 - DNA, 90 bp, synthetic construct
  misc_feature 1..90: note = Synthetic
  source 1..90: mol_type = other DNA
ctgttgattttattctttttagggccacgcagctcgaaagaaatgtttaatttattccttacagacacagtacgactcggtccgcactag

SEQ ID NO: 3675 - DNA, 33 bp, synthetic construct
  misc_feature 1..33: note = Synthetic
  source 1..33: mol_type = other DNA
atgctgttccgcccttccgtaggccccaggtaa

SEQ ID NO: 3676 - DNA, 63 bp, synthetic construct
  source 1..63: mol_type = other DNA
  misc_feature 1..63: note = Synthetic
atgtgtcttccatatttaagttcctggtgttttgtatacaactttatggaacgccaaaactaa

SEQ ID NO: 3677 - DNA, 159 bp, synthetic construct
  source 1..159: mol_type = other DNA
  misc_feature 1..159: note = Synthetic
atgtcaacgaccgaccttgaggcatacttcaaagactgtttgtttaaagactgggaggagttgggggaggagattaggttaaaggtctttgtactaggaggctgtaggcataaattggtctgcgcaccagcaccatgcaactttttcacctctgcctaa

SEQ ID NO: 3678 - DNA, 45 bp, synthetic construct
  misc_feature 1..45: note = Synthetic
  source 1..45: mol_type = other DNA
atgcaactttttcacctctgcctaatccgactcggtccgcactag

SEQ ID NO: 3679 - DNA, 180 bp, synthetic construct
  misc_feature 1..180: note = Synthetic
  source 1..180: mol_type = other DNA
atggacaagttggatctagtcaatgatggcctcgatattattgactttattcagaagaaccaaaaagaaatacaaaagacatacggacgatcaagcatccaacaaccaagtaccaaagacaggacaagagcatgggaggacttcttgcagagcaccagtggacgactcggtccgcactag

SEQ ID NO: 3680 - DNA, 165 bp, synthetic construct
  source 1..165: mol_type = other DNA
  misc_feature 1..165: note = Synthetic
atggcctcgatattattgactttattcagaagaaccaaaaagaaatacaaaagacatacggacgatcaagcatccaacaaccaagtaccaaagacaggacaagagcatgggaggacttcttgcagagcaccagtggacgactcggtccgcactagcctgaggtaa

SEQ ID NO: 3681 - DNA, 180 bp, synthetic construct
  source 1..180: mol_type = other DNA
  misc_feature 1..180: note = Synthetic
atggacaagttggatctagtcagccatggcctcgatattattgactttattcagaagaaccaaaaagaaatacaaaagacatacggacgatcaagcatccaacaaccaagtaccaaagacaggacaagagcatgggaggacttcttgcagagcaccagtggacgactcggtccgcactag

SEQ ID NO: 3682 - DNA, 198 bp, synthetic construct
  misc_feature 1..198: note = Synthetic
  source 1..198: mol_type = other DNA
ttgtctgcaaaactccctctaccattcacaatggggaaagcccagtccaaacaaaaccacatagcccaaggctctgagcccaggacggagctgatacctgacgcctcaggctatgggcctgagttctgcaaaagctgctggtttgagagaaggggtcttgtcaaatgttacgactcggtccgcactagcctgaggtaa

SEQ ID NO: 3683 - DNA, 93 bp, synthetic construct
  misc_feature 1..93: note = Synthetic
  source 1..93: mol_type = other DNA
acgcctcaggctatgggcctgagttctgcaaaagctgctggtttgagagaaggggtcttgtcaaatgttacgactcggtccgcactagcctga

SEQ ID NO: 3684 - DNA, 162 bp, synthetic construct
  source 1..162: mol_type = other DNA
  misc_feature 1..162: note = Synthetic
atgaatttgttacagaaactatgcgtagtgtgttcgaaatgcaacgaatacgccatggagctggagtgtctaaagtactgcgatccgaacgtgttactggcggagtccacgccgttcaagagaaacgcggcggccgactcggtccgcactagcctgaggtaa

SEQ ID NO: 3685 - DNA, 24 bp, synthetic construct
  misc_feature 1..24: note = Synthetic
  source 1..24: mol_type = other DNA
atgtgttgcaccaaatataaataa

SEQ ID NO: 3686 - DNA, 159 bp, synthetic construct
  misc_feature 1..159: note = Synthetic
  source 1..159: mol_type = other DNA
acggaactcttttccccggagatgacgatcttgcaattccagcgactgaatttttctctacaaaggctgctaagaagccagaggctaaacgcgaagcaattgttaaagctgagggagatgacaatgaagaaactctcgactcggtccgcactagcctga

SEQ ID NO: 3687 - DNA, 138 bp, synthetic construct
  source 1..138: mol_type = other DNA
  misc_feature 1..138: note = Synthetic
atgacgatcttgcaattccagcgactgaatttttctctacaaaggctgctaagaagccagaggctaaacgcgaagcaattgttaaagctgagggagatgacaatgaagaaactctcgactcggtccgcactagcctga

SEQ ID NO: 3688 - DNA, 114 bp, synthetic construct
  source 1..114: mol_type = other DNA
  misc_feature 1..114: note = Synthetic
ctgaatttttctctacaaaggctgctaaaaagccagaggctaaacgcgaagcaattgttaaagccgatggagacaataatgaggaaactctcgactcggtccgcactagcctga

SEQ ID NO: 3689 - DNA, 165 bp, synthetic construct
  misc_feature 1..165: note = Synthetic
  source 1..165: mol_type = other DNA
atgcctcacggagaacgtatgtacggagtgaacgcaggaggggttgcggagataatcttttacaacgtattcggttggtggtaccaagcgctcttcaatgttgcgatggggatcttccaatatttgatccacaacgcccccccgactcggtccgcactagcctga

SEQ ID NO: 3690 - DNA, 48 bp, synthetic construct
  misc_feature 1..48: note = Synthetic
  source 1..48: mol_type = other DNA
ctggctacggcaggtccatacacacaggcaggcaggcaggacttgtga

SEQ ID NO: 3691 - DNA, 75 bp, synthetic construct
  misc_feature 1..75: note = Synthetic
  source 1..75: mol_type = other DNA
atgagtgcagaccgtgctagaaaagtgagatcttcgaactcagcattccctgggtcccggctctctctcacttga

SEQ ID NO: 3692 - DNA, 30 bp, synthetic construct
  source 1..30: mol_type = other DNA
  misc_feature 1..30: note = Synthetic
atgccagtgcagaccgtgctagaaaagtga

SEQ ID NO: 3693 - DNA, 51 bp, synthetic construct
  source 1..51: mol_type = other DNA
  misc_feature 1..51: note = Synthetic
gtgagatcttcgaactcagcattccctgggtcccggctctctctcacttga

SEQ ID NO: 3694 - DNA, 216 bp, synthetic construct
  source 1..216: mol_type = other DNA
  misc_feature 1..216: note = Synthetic
aggaactcaacccgtccacactctccgtcgaagcagcccccccgagacatgccgcccaagggaaccgccaagcagctgatcgctcggcagagagcgaagaagcaagagctgctccagcagcaggtggaggacgaggaagagatgtgggacagccaggcagaggaggtgtcagaggacgaggaggagatcgactcggtccgcactagcctgaggtaa

SEQ ID NO: 3695 - DNA, 108 bp, synthetic construct
  source 1..108: mol_type = other DNA
  misc_feature 1..108: note = Synthetic
aagagctgctccagcagcaggtggaggacgaggaagagatgtgggacagccaggcagaggaggtgtcagaggacgaggaggagatcgactcggtccgcactagcctga

SEQ ID NO: 3696 - DNA, 165 bp, synthetic construct
  source 1..165: mol_type = other DNA
  misc_feature 1..165: note = Synthetic
aagccgacggaactcttttccctggagatgatgatcttgcaattccagcaactgaatttttctctacaaaggctgctaaaaagccagaggctaaacgcgaagcaattgttaaagccgatggagacaataatgaggaaactctcgactcggtccgcactagcctga

SEQ ID NO: 3697 - DNA, 24 bp, synthetic construct
  misc_feature 1..24: note = Synthetic
  source 1..24: mol_type = other DNA
atgtgttgtaccaaatataaataa

SEQ ID NO: 3698 - DNA, 174 bp, synthetic construct
  source 1..174: mol_type = other DNA
  misc_feature 1..174: note = Synthetic
ctgtactttaaatggacggaactcttttccccggagatgacgatcttgcaattccagcaactgaatttttttctacaaaggctgctaaaaagccagaggctaaacgcgaagcaattgttaaagccgatgaagacgacaatgaggaaactctcgactcggtccgcactagcctga

SEQ ID NO: 3699 - DNA, 57 bp, synthetic construct
  misc_feature 1..57: note = Synthetic
  source 1..57: mol_type = other DNA
gtgtcagtttctaaaatctgtactttaagccgacggaactcttttccccggagatga

SEQ ID NO: 3700 - DNA, 174 bp, synthetic construct
  misc_feature 1..174: note = Synthetic
  source 1..174: mol_type = other DNA
ctgtactttaagccgacggaactcttttccccggagatgacgatcttgcaattccagcaactgaatttttttctacaaaggctgctaaaaagccagaggctaaacgcgaagcaattgttaaagccgatgaagacgacaatgaggaaactctcgactcggtccgcactagcctga

SEQ ID NO: 3701 - DNA, 174 bp, synthetic construct
  source 1..174: mol_type = other DNA
  misc_feature 1..174: note = Synthetic
ctggcctatgcttcacaacacgggcccgttgtgtttgacaccgtacgccaaattgccataaagactgcccaaggagagggactggtgcttgttaacaccaattacgaccaggctctcgccacctacaatgcttggttcataggtggtacagcgactcggtccgcactagcctga

SEQ ID NO: 3702 - DNA, 108 bp, synthetic construct
  source 1..108: mol_type = other DNA
  misc_feature 1..108: note = Synthetic
ctgctccagcagcaggtggaggacgaggaagagatgtgggacagccaggcagaggaggtgtcagaggacgaggaggagatcgactcggtccgcactagcctgaggtaa

SEQ ID NO: 3703 - DNA, 90 bp, synthetic construct
  misc_feature 1..90: note = Synthetic
  source 1..90: mol_type = other DNA
atattccgggggagtgcatcaatgacagcactggtcaagcccggttgtgtagcgaagaggtctgtgacatcacgactcggtccgcactag

SEQ ID NO: 3704 - DNA, 18 bp, synthetic construct
  source 1..18: mol_type = other DNA
  misc_feature 1..18: note = Synthetic
atgtcatcggacccctga

SEQ ID NO: 3705 - DNA, 21 bp, synthetic construct
  misc_feature 1..21: note = Synthetic
  source 1..21: mol_type = other DNA
atggtgtttaacaaagtttga

SEQ ID NO: 3706 - DNA, 180 bp, synthetic construct
  misc_feature 1..180: note = Synthetic
  source 1..180: mol_type = other DNA
ttgagacaggcaaagagtatgtgtactggtattggccaaactttaccttctgaagacatagttaaactatatccttggctcggcaaatacctaaccggaacatggtctgacaaaggtggcgtatttggatcttcaggaagcacttcagaagtctggacgactcggtccgcactagcctga

SEQ ID NO: 3707 - DNA, 96 bp, synthetic construct
  misc_feature 1..96: note = Synthetic
  source 1..96: mol_type = other DNA
atgcgggcatgtccctggagtgcgaccacatccacattccgaagcagtcgttgtcgtgcgcggtctgcagctccgactcggtccgcactagcctga

SEQ ID NO: 3708 - DNA, 168 bp, synthetic construct
  source 1..168: mol_type = other DNA
  misc_feature 1..168: note = Synthetic
atggaatcgcccgcgtgcgcgtcagatttttttaacgcaaagttcgacctggtcccgggctacgacaatgcgggcatgtccctggagtgcgaccacatccacattccgaagcagtcgttgtcgtgcgcggtctgcagctccgactcggtccgcactagcctgaggtaa

SEQ ID NO: 3709 - DNA, 84 bp, synthetic construct
  misc_feature 1..84: note = Synthetic
  source 1..84: mol_type = other DNA
ctgacactgtctccgcactacaagttatggctggctaggggattgtggtggatccaatattcgactcggtccgcactagcctga

SEQ ID NO: 3710 - DNA, 186 bp, synthetic construct
  source 1..186: mol_type = other DNA
  misc_feature 1..186: note = Synthetic
attaacatagcgggcacaatggtgcaggcaccgtctgtatacgtctgcggcttcgtggagcgcccggacgccccacccaaggacgcctgccttcacctggatcccctcaccgtcaagagccagctccctctgaagaagcccttgccactcacggtggacgactcggtccgcactagcctgaggtaa

SEQ ID NO: 3711 - DNA, 51 bp, synthetic construct
  source 1..51: mol_type = other DNA
  misc_feature 1..51: note = Synthetic
acgcctgccttcacctggatcccctcaccgtcaagagccagctccctctga

SEQ ID NO: 3712 - DNA, 90 bp, synthetic construct
  misc_feature 1..90: note = Synthetic
  source 1..90: mol_type = other DNA
ctggatcccctcaccgtcaagagccagctccctctgaagaagcccttgccactcacggtggacgactcggtccgcactagcctgaggtaa

SEQ ID NO: 3713 - DNA, 27 bp, synthetic construct
  misc_feature 1..27: note = Synthetic
  source 1..27: mol_type = other DNA
atgggttgtttggagagtacaggataa

SEQ ID NO: 3714 - DNA, 123 bp, synthetic construct
  misc_feature 1..123: note = Synthetic
  source 1..123: mol_type = other DNA
atggagcatccgggagactgcttgcctagcaaaatcatatgcgcaaatgtggcagctcctttatttccacagaagggacctccgactgatggccaatgccatttgttcatctgtgccagttga

SEQ ID NO: 3715 - DNA, 213 bp, synthetic construct
  source 1..213: mol_type = other DNA
  misc_feature 1..213: note = Synthetic
gtggttccctgccgccaccaaggccaactgattggccgggcccgcgtctctccaggggcgggatggagcatccgggagactgcttgcctagcaaaatcatatgcgcaaatgtggcagctcctttatttccacagaagggacctccgactgatggccaatgccatttgttcatctgtgccagttgactgggttccacgactcggtccgcactag

SEQ ID NO: 3716 - DNA, 63 bp, synthetic construct
  source 1..63: mol_type = other DNA
  misc_feature 1..63: note = Synthetic
atgtgtcttccatatttaagttcctggtgttttgtatacaactttatggaacatgaaaactaa

SEQ ID NO: 3717 - DNA, 27 bp, synthetic construct
  source 1..27: mol_type = other DNA
  misc_feature 1..27: note = Synthetic
atggctgttggtatggaatggagataa

SEQ ID NO: 3718 - DNA, 168 bp, synthetic construct
  misc_feature 1..168: note = Synthetic
  source 1..168: mol_type = other DNA
aggcccaggaaagaaccagaaagcaacttagtaaggtcaatggtgactgcaggatcaactgatcacatggatcacttctcccttggagtgcttgtgattctgctcatggtgcaggaagggctgaagaagagagccaccacaaagatcatccgactcggtccgcactag

SEQ ID NO: 3719 - DNA, 204 bp, synthetic construct
  source 1..204: mol_type = other DNA
  misc_feature 1..204: note = Synthetic
atggttctgcgccagctgtcacgacaagcttcagtgaaagttggtaaaacctggactggaacaaaaaaaagagctcagaggatttttatttttattttagagcttttgctggaattttgtagaggtgaagacagtgtagacgggaaaaacaaaagtaccactgctttacctgctgtcgactcggtccgcactagcctgaggtaa

SEQ ID NO: 3720 - DNA, 12 bp, synthetic construct
  source 1..12: mol_type = other DNA
  misc_feature 1..12: note = Synthetic
acgacgttgtaa

SEQ ID NO: 3721 - DNA, 102 bp, synthetic construct
  source 1..102: mol_type = other DNA
  misc_feature 1..102: note = Synthetic
acggccagtgaatccgtaatcatggtcgccgctgtttcctgtgtgaaattgttatccgctcacaattccacacattatacgagccggaagcataaagtgtaa

SEQ ID NO: 3722 - DNA, 33 bp, synthetic construct
  misc_feature 1..33: note = Synthetic
  source 1..33: mol_type = other DNA
atgagcttagaagaagttttagtgatcatgtaa

SEQ ID NO: 3723 - DNA, 33 bp, synthetic construct
  misc_feature 1..33: note = Synthetic
  source 1..33: mol_type = other DNA
atgataaccacgactcggtccgcactagcctga

SEQ ID NO: 3724 - DNA, 195 bp, synthetic construct
  misc_feature 1..195: note = Synthetic
  source 1..195: mol_type = other DNA
acgctggccaacctgagcaccattctctactacacgcgctacgacccggtgctctgtttcctggttttctacgtgccggggctttccgcgaccacgaagatcacgcccggcgtggagttcctcatggagaagctatcgctcgcgcccgagaacgtggtgctgctgtacgactcggtccgcactagcctgaggtaa

SEQ ID NO: 3725 - DNA, 69 bp, synthetic construct
  misc_feature 1..69: note = Synthetic
  source 1..69: mol_type = other DNA
ctgagagggcttatgcatacgaccaggaagtggcagggtcccttggcggcgccatcgttgtcatgctga

SEQ ID NO: 3726 - DNA, 66 bp, synthetic construct
  source 1..66: mol_type = other DNA
  misc_feature 1..66: note = Synthetic
atgcccatcagtcgatgtcctcggccaccgacccgcctagccaatcgtcgcaggacctccccttga

SEQ ID NO: 3727 - DNA, 141 bp, synthetic construct
  source 1..141: mol_type = other DNA
  misc_feature 1..141: note = Synthetic
ctgccccccactatttcatacatcaaagtgctcctagatttgctaaaacaaagtctgcaatccttaaaggcgaaccagtctggcaaaagcgacagtggaatcagcagaatagatctgtcgactcggtccgcactagcctga

SEQ ID NO: 3728 - DNA, 66 bp, synthetic construct
  misc_feature 1..66: note = Synthetic
  source 1..66: mol_type = other DNA
atgcccatcagtcggcctcctcggccaccgacccgcctagccaatcgtcgcaggacctccccttga

SEQ ID NO: 3729 - DNA, 75 bp, synthetic construct
  source 1..75: mol_type = other DNA
  misc_feature 1..75: note = Synthetic
atagctgtttcctgtgtgaaattgttatccgctcacaattccacacattatacgagccggaagcataaagtgtaa

SEQ ID NO: 3730 - DNA, 18 bp, synthetic construct
  misc_feature 1..18: note = Synthetic
  source 1..18: mol_type = other DNA
acgatgccgccaacgtaa

SEQ ID NO: 3731 - DNA, 54 bp, synthetic construct
  misc_feature 1..54: note = Synthetic
  source 1..54: mol_type = other DNA
atgccgcaaacgtcatttttagtatcctatgtagaagtcccagtgaacatttaa

SEQ ID NO: 3732 - DNA, 168 bp, synthetic construct
  source 1..168: mol_type = other DNA
  misc_feature 1..168: note = Synthetic
aggcccaggaaagaaccagaaagcaacttagtaaggtcaatggtgactgcaggatcaactgatcacatggatcacttctcccttggagtgcttgtgattctgctcatggtgcaggaagggctgaagaagagaatgaccacaaagatcatccgactcggtccgcactag

SEQ ID NO: 3733 - DNA, 81 bp, synthetic construct
  source 1..81: mol_type = other DNA
  misc_feature 1..81: note = Synthetic
atgtgtattgcagacctgtctatgctcaccgatcatctcttacatttccgtggagccgtcggcgaatccaaaggcgtctag

SEQ ID NO: 3734 - DNA, 39 bp, synthetic construct
  source 1..39: mol_type = other DNA
  misc_feature 1..39: note = Synthetic
ctgacacacaggacaatgatgatgacctgggggacttaa

SEQ ID NO: 3735 - DNA, 60 bp, synthetic construct
  source 1..60: mol_type = other DNA
  misc_feature 1..60: note = Synthetic
aggagaatgaacaaaccggaacccagaaagccaaccacagcacgactcggtccgcactag

SEQ ID NO: 3736 - DNA, 171 bp, synthetic construct
  misc_feature 1..171: note = Synthetic
  source 1..171: mol_type = other DNA
atggcttgcaaacacggatacccagacgtgtgccctatttgcacagccgttgacgctactcccgactttgaatatttgctcatggcagacggagaatggttccctacggaccttctttgtgtggacttggacgatgacgtcttctggccttcgcgactcggtccgcactag

SEQ ID NO: 3737 - DNA, 132 bp, synthetic construct
  source 1..132: mol_type = other DNA
  misc_feature 1..132: note = Synthetic
ttgacgctactcccgactttgaatatttgctcatggcagacggagaatggttccctacggaccttctttgtgtggacttggacgatgacgtcttctggccttcgcgactcggtccgcactagcctgaggtaa

SEQ ID NO: 3738 - DNA, 171 bp, synthetic construct
  misc_feature 1..171: note = Synthetic
  source 1..171: mol_type = other DNA
atggcttgcaaacgccgatacccagacgtgtgccctatttgcacagccgttgacgctactcccgactttgaatatttgctcatggcagacggagaatggttccctacggaccttctttgtgtggacttggacgatgacgtcttctggccttcgcgactcggtccgcactag

SEQ ID NO: 3739 - DNA, 30 bp, synthetic construct
  source 1..30: mol_type = other DNA
  misc_feature 1..30: note = Synthetic
ttggcgacggaggaacccccaggaccgtag

SEQ ID NO: 3740 - DNA, 96 bp, synthetic construct
  misc_feature 1..96: note = Synthetic
  source 1..96: mol_type = other DNA
ctggctgccatcaaaaccccaccctcgcagcggcatacgccccctccgcgtcccgcacccgagaccccggccccgactcggtccgcactagcctga

SEQ ID NO: 3741 - DNA, 60 bp, synthetic construct
  source 1..60: mol_type = other DNA
  misc_feature 1..60: note = Synthetic
acgttaacacagagagctctagtagtggtctttccttttgtgaaaccatggacttcttga

SEQ ID NO: 3742 - DNA, 87 bp, synthetic construct
  source 1..87: mol_type = other DNA
  misc_feature 1..87: note = Synthetic
atgtgtccaaccctaggttcaacatttctgattattttgagattgtgcggcagcctggtgatgggaactgcttctatcacagcatag

SEQ ID NO: 3743 - DNA, 42 bp, synthetic construct
  source 1..42: mol_type = other DNA
  misc_feature 1..42: note = Synthetic
atggatcctgtcacttcaagatttatgcttgccgacacgtag

SEQ ID NO: 3744 - DNA, 216 bp, synthetic construct
  source 1..216: mol_type = other DNA
  misc_feature 1..216: note = Synthetic
atccgcgctttctcgcaggccgggcgccgccttcgtggacgggacaccatgtcttgggccctgaaaacgacggacatgtttctggattcttcgcggtgcacacaccggacgtatggcgatgtctgcgcggagatccataaaagggaacgggaggaccgagaggcggccagaactgcggtgaccgaccccgactcggtccgcactagcctgaggtaa

SEQ ID NO: 3745 - DNA, 72 bp, synthetic construct
  source 1..72: mol_type = other DNA
  misc_feature 1..72: note = Synthetic
atcccaacatccgcgctttctcgcaggccgggcgccgccttcgtggacgggacaccgcctcttgggccctga

SEQ ID NO: 3746 - DNA, 216 bp, synthetic construct
  source 1..216: mol_type = other DNA
  misc_feature 1..216: note = Synthetic
atccgcgctttctcgcaggccgggcgccgccttcgtggacgggacaccgcctcttgggccctgaaaacgacggacatgtttctggattcttcgcggtgcacacaccggacgtatggcgatgtctgcgcggagatccataaaagggaacgggaggaccgagaggcggccagaactgcggtgaccgaccccgactcggtccgcactagcctgaggtaa

SEQ ID NO: 3747 - DNA, 168 bp, synthetic construct
  misc_feature 1..168: note = Synthetic
  source 1..168: mol_type = other DNA
atgtccaatccacagacgaccatcgcgtatagcctatgccacgccagggcctcgctgaccagcgcactgcccgacgccgcgcaggtggtgcatgtttttgagtacggcacccgcgcgatcatggtacggggccgggagcgcgactcggtccgcactagcctgaggtaa

SEQ ID NO: 3748 - DNA, 153 bp, synthetic construct
  source 1..153: mol_type = other DNA
  misc_feature 1..153: note = Synthetic
acgaccatcgcgtatagcctatgccacgccagggcctcgctgaccagcgcactgcccgacgccgcgcaggtggtgcatgtttttgagtacggcacccgcgcgatcatggtacggggccgggagcgcgactcggtccgcactagcctgaggtaa

SEQ ID NO: 3749 - DNA, 168 bp, synthetic construct
  source 1..168: mol_type = other DNA
  misc_feature 1..168: note = Synthetic
atggattccgcggccccagccctctcccccgctctgacggcccttacgggccagagcgcgacggcggacctggcgatccagattccaaagtgccccgaccccgagaggtacttctacacctcccagtgtcccgacattaacgactcggtccgcactagcctgaggtaa

SEQ ID NO: 3750 - DNA, 21 bp, synthetic construct
  source 1..21: mol_type = other DNA
  misc_feature 1..21: note = Synthetic
atgttcacttcgcgatgttga

SEQ ID NO: 3751 - DNA, 174 bp, synthetic construct
  misc_feature 1..174: note = Synthetic
  source 1..174: mol_type = other DNA
aggaggatgtccaagcgcaaattcaaggaagagatgctccaggtcatcgcgcctgagatctacggccccgcggtggtgaaggaggaaagaaagccccgcaaaatcaagcgggtcaaaaaggacaaaaaggaagaagatgacgatctcgactcggtccgcactagcctgaggtaa

SEQ ID NO: 3752 - DNA, 42 bp, synthetic construct
  misc_feature 1..42: note = Synthetic
  source 1..42: mol_type = other DNA
aggaagaagatgacgatctcgactcggtccgcactagcctga

SEQ ID NO: 3753 - DNA, 150 bp, synthetic construct
  source 1..150: mol_type = other DNA
  misc_feature 1..150: note = Synthetic
aaggaagagatgctccaggtcatcgcgcctgagatctacggccccgcggtggtgaaggaggaaagaaagccccgcaaaatcaagcgggtcaaaaaggacaaaaaggaagaagatgacgatctcgactcggtccgcactagcctgaggtaa

SEQ ID NO: 3754 - DNA, 168 bp, synthetic construct
  misc_feature 1..168: note = Synthetic
  source 1..168: mol_type = other DNA
atggcgaccgtgcactactcccgccgacctgggaccccgccggtcaccctcacgtcgtcccccagcatggatgacgttgcgacccccatcccctacctacccacatacgccgaggccgtggcagacgcgccccccccttacgactcggtccgcactagcctgaggtaa

SEQ ID NO: 3755 - DNA, 159 bp, synthetic construct
  source 1..159: mol_type = other DNA
  misc_feature 1..159: note = Synthetic
gtgcactactcccgccgacctgggaccccgccggtcaccctcacgtcgtcccccagcatggatgacgttgcgacccccatcccctacctacccacatacgccgaggccgtggcagacgcgccccccccttacgactcggtccgcactagcctgaggtaa

SEQ ID NO: 3756 - DNA, 45 bp, synthetic construct
  misc_feature 1..45: note = Synthetic
  source 1..45: mol_type = other DNA
ctgctagccctaggggagaaagcaaaccgactcggtccgcactag

SEQ ID NO: 3757 - DNA, 45 bp, synthetic construct
  source 1..45: mol_type = other DNA
  misc_feature 1..45: note = Synthetic
atgttactacaagggaattcttacgggatgggacgaggaatctag

SEQ ID NO: 3758 - DNA, 36 bp, synthetic construct
  misc_feature 1..36: note = Synthetic
  source 1..36: mol_type = other DNA
atgttgccattgacgactcggtccgcactagcctga

SEQ ID NO: 3759 - DNA, 168 bp, synthetic construct
  misc_feature 1..168: note = Synthetic
  source 1..168: mol_type = other DNA
atgaccaatctgctttcgttggtcgaccaggaggacctggccttctgcgccgggtttccgtccttcgacgagaccatgctcgtgatcgcaggggcgcgagtgcgcttcccgcgctcgctgctctcgctcttcaacgtggtcgactcggtccgcactagcctgaggtaa

SEQ ID NO: 3760 - DNA, 159 bp, synthetic construct
  misc_feature 1..159: note = Synthetic
  source 1..159: mol_type = other DNA
ctgctttcgttggtcgaccaggaggacctggccttctgcgccgggtttccgtccttcgacgagaccatgctcgtgatcgcaggggcgcgagtgcgcttcccgcgctcgctgctctcgctcttcaacgtggtcgactcggtccgcactagcctgaggtaa

SEQ ID NO: 3761 - DNA, 24 bp, synthetic construct
  misc_feature 1..24: note = Synthetic
  source 1..24: mol_type = other DNA
atgcgtagaagaaaagggtggtga

SEQ ID NO: 3762 - DNA, 42 bp, synthetic construct
  source 1..42: mol_type = other DNA
  misc_feature 1..42: note = Synthetic
atgccaaaaattccgttctcgactcggtccgcactagcctga

SEQ ID NO: 3763 - DNA, 123 bp, synthetic construct
  source 1..123: mol_type = other DNA
  misc_feature 1..123: note = Synthetic
acgggccagagcgcgacggcggacctggcgatccagattccaaagtgccccgaccccgagaggtacttctacacctcccagtgtcccgacattaacgactcggtccgcactagcctgaggtaa

SEQ ID NO: 3764 - DNA, 168 bp, synthetic construct
  misc_feature 1..168: note = Synthetic
  source 1..168: mol_type = other DNA
atggaatccgcggccccagccctctcccccgctctgacggcccttacgggccagagcgcgacggcggacctggcgatccagattccaaagtgccccgaccccgagaggtacttctacacctcccagtgtcccgacattaacgactcggtccgcactagcctgaggtaa

SEQ ID NO: 3765 - DNA, 168 bp, synthetic construct
  misc_feature 1..168: note = Synthetic
  source 1..168: mol_type = other DNA
atggatgccgcggccccagccctctcccccgctctgacggcccttacgggccagagcgcgacggcggacctggcgatccagattccaaagtgccccgaccccgagaggtacttctacacctcccagtgtcccgacattaacgactcggtccgcactagcctgaggtaa

SEQ ID NO: 3766 - DNA, 168 bp, synthetic construct
  source 1..168: mol_type = other DNA
  misc_feature 1..168: note = Synthetic
atggattacgcggccccagccctctcccccgctctgacggcccttacgggccagagcgcgacggcggacctggcgatccagattccaaagtgccccgaccccgagaggtacttctacacctcccagtgtcccgacattaacgactcggtccgcactagcctgaggtaa

SEQ ID NO: 3767 - DNA, 168 bp, synthetic construct
  misc_feature 1..168: note = Synthetic
  source 1..168: mol_type = other DNA
atggattccgctgccccagccctctcccccgctctgacggcccttacgggccagagcgcgacggcggacctggcgatccagattccaaagtgccccgaccccgagaggtacttctacacctcccagtgtcccgacattaacgactcggtccgcactagcctgaggtaa

SEQ ID NO: 3768 - DNA, 27 bp, synthetic construct
  misc_feature 1..27: note = Synthetic
  source 1..27: mol_type = other DNA
acggcgactcggtccgcactagcctga

SEQ ID NO: 3769 - DNA, 39 bp, synthetic construct
  source 1..39: mol_type = other DNA
  misc_feature 1..39: note = Synthetic
ctgccgccgctttcgctgctttgcccgggaactcattga

SEQ ID NO: 3770 - DNA, 54 bp, synthetic construct
  misc_feature 1..54: note = Synthetic
  source 1..54: mol_type = other DNA
aggatcaccctcaaggtccggcccacggagtcgactcggtccgcactagcctga

SEQ ID NO: 3771 - DNA, 168 bp, synthetic construct
  source 1..168: mol_type = other DNA
  misc_feature 1..168: note = Synthetic
atggattcctcggccccagccctctcccccgctctgacggcccttacgggccagagcgcgacggcggacctggcgatccagattccaaagtgccccgaccccgagaggtacttctacacctcccagtgtcccgacattaacgactcggtccgcactagcctgaggtaa

SEQ ID NO: 3772 - DNA, 168 bp, synthetic construct
  source 1..168: mol_type = other DNA
  misc_feature 1..168: note = Synthetic
atggcttccgcggccccagccctctcccccgctctgacggcccttacgggccagagcgcgacggcggacctggcgatccagattccaaagtgccccgaccccgagaggtacttctacacctcccagtgtcccgacattaacgactcggtccgcactagcctgaggtaa

SEQ ID NO: 3773 - DNA, 15 bp, synthetic construct
  misc_feature 1..15: note = Synthetic
  source 1..15: mol_type = other DNA
atgttgatttcctga

SEQ ID NO: 3774 - DNA, 84 bp, synthetic construct
  source 1..84: mol_type = other DNA
  misc_feature 1..84: note = Synthetic
atcatcaaagccatgaacaaagcagccgcgctggatgaactgataccggggttgctgagtgaatatatcgaacagtcaggttaa

SEQ ID NO: 3775 - DNA, 84 bp, synthetic construct
  misc_feature 1..84: note = Synthetic
  source 1..84: mol_type = other DNA
atcatcaaagccgccaacaaagcagccgcgctggatgaactgataccggggttgctgagtgaatatatcgaacagtcaggttaa

SEQ ID NO: 3776 - DNA, 15 bp, synthetic construct
  misc_feature 1..15: note = Synthetic
  source 1..15: mol_type = other DNA
atgaagagcttttaa

SEQ ID NO: 3777 - DNA, 12 bp, synthetic construct
  source 1..12: mol_type = other DNA
  misc_feature 1..12: note = Synthetic
aagcacaagtag

SEQ ID NO: 3778 - DNA, 57 bp, synthetic construct
  source 1..57: mol_type = other DNA
  misc_feature 1..57: note = Synthetic
atgacggcaataaaaagacagaataaaacgcacgggtgttgggtcgtttgttcataa

SEQ ID NO: 3779 - DNA, 180 bp, synthetic construct
  misc_feature 1..180: note = Synthetic
  source 1..180: mol_type = other DNA
gtgttgggtcgtttgttcataaacgcggggttcggtcccagggctggcactctgtcgataccccaccgagaccccattgggaccaatacgcccgcgtttcttccttttccccaccccaacccccaagttcgggtgaaggcccagggctcgcagccaacgactcggtccgcactagcctga

SEQ ID NO: 3780 - DNA, 21 bp, synthetic construct
  source 1..21: mol_type = other DNA
  misc_feature 1..21: note = Synthetic
ctggagtggctttcgaactaa

SEQ ID NO: 3781 - DNA, 168 bp, synthetic construct
  source 1..168: mol_type = other DNA
  misc_feature 1..168: note = Synthetic
atgtattccgcggccccagccctctcccccgctctgacggcccttacgggccagagcgcgacggcggacctggcgatccagattccaaagtgccccgaccccgagaggtacttctacacctcccagtgtcccgacattaacgactcggtccgcactagcctgaggtaa

SEQ ID NO: 3782 - DNA, 168 bp, synthetic construct
  misc_feature 1..168: note = Synthetic
  source 1..168: mol_type = other DNA
attgattccgcggccccagccctctcccccgctctgacggcccttacgggccagagcgcgacggcggacctggcgatccagattccaaagtgccccgaccccgagaggtacttctacacctcccagtgtcccgacattaacgactcggtccgcactagcctgaggtaa

SEQ ID NO: 3783 - DNA, 168 bp, synthetic construct
  source 1..168: mol_type = other DNA
  misc_feature 1..168: note = Synthetic
ctggattccgcggccccagccctctcccccgctctgacggcccttacgggccagagcgcgacggcggacctggcgatccagattccaaagtgccccgaccccgagaggtacttctacacctcccagtgtcccgacattaacgactcggtccgcactagcctgaggtaa

SEQ ID NO: 3784 - DNA, 120 bp, synthetic construct
  source 1..120: mol_type = other DNA
  misc_feature 1..120: note = Synthetic
gtgggggccgtcaggcgcttcaggaacacgtcgttcatgaatatctggttgccctgcgccacaaacatcggcgtttcattcccgtgccccgggtcaacgactcggtccgcactagcctga

SEQ ID NO: 3785 - DNA, 204 bp, synthetic construct
  misc_feature 1..204: note = Synthetic
  source 1..204: mol_type = other DNA
ctgccactgatatccgcatttttagcggtcagctttccgtccggtgtcagggaaaaggccggaggattgccgccgctggtaatggtgggggccgtcaggcgcttcaggaacacgtcgttcatgaatatctggttgccctgcgccacaaacatcggcgtttcattcccgtttgccgggtcaacgactcggtccgcactagcctga

SEQ ID NO: 3786 - DNA, 72 bp, synthetic construct
  misc_feature 1..72: note = Synthetic
  source 1..72: mol_type = other DNA
ctgagagagttgcagcaagcggtccacgctggtttgccccagcaggcgaaaatcctgtttgatggtggttaa

SEQ ID NO: 3787 - DNA, 87 bp, synthetic construct
  source 1..87: mol_type = other DNA
  misc_feature 1..87: note = Synthetic
acggcgggatataacatgagctgtcttcggtatcgtcgtatcccactaccgagatatccgcaccaacgcgcagcccggactcggtaa

SEQ ID NO: 3788 - DNA, 24 bp, synthetic construct
  misc_feature 1..24: note = Synthetic
  source 1..24: mol_type = other DNA
atgggacccacagaccgcccgtga

SEQ ID NO: 3789 - DNA, 24 bp, synthetic construct
  source 1..24: mol_type = other DNA
  misc_feature 1..24: note = Synthetic
attgggggctcgtccgggatttga

SEQ ID NO: 3790 - DNA, 210 bp, synthetic construct
  misc_feature 1..210: note = Synthetic
  source 1..210: mol_type = other DNA
ttgggggctcgtccgggatttgaattcctccattctcacattatgggacaaatccacgggctttccccaactccaatacccaaagcccccagggggctatcaacccaccactggcttaactttctccaggctgcttaccgcttgcagcctaggccctccgatttcgacttccagcagctacgcgactcggtccgcactagcctgaggtaa

SEQ ID NO: 3791 - DNA, 15 bp, synthetic construct
  misc_feature 1..15: note = Synthetic
  source 1..15: mol_type = other DNA
ctgccgggtccctag

SEQ ID NO: 3792 - DNA, 153 bp, synthetic construct
  misc_feature 1..153: note = Synthetic
  source 1..153: mol_type = other DNA
atggtgccaatgggcgcgggtccccctagccccggcggggatccggatgggtacgatggcggaaacaactcccaatatccatctgcttctggctcttctgggaacacccccaccccaccgaacgacgactcggtccgcactagcctgaggtaa

SEQ ID NO: 3793 - DNA, 21 bp, synthetic construct
  source 1..21: mol_type = other DNA
  misc_feature 1..21: note = Synthetic
atgtacagcttgattcaataa

SEQ ID NO: 3794 - DNA, 132 bp, synthetic construct
  source 1..132: mol_type = other DNA
  misc_feature 1..132: note = Synthetic
ttgcctggtttccggcaccagaagcggtgccggaaagctggctggagtgcgatcttcctgaggccgatactgtcgtcgtcccctcaaactggcagatgcacggttacgatgcgccgactcggtccgcactag

SEQ ID NO: 3795 - DNA, 132 bp, synthetic construct
  misc_feature 1..132: note = Synthetic
  source 1..132: mol_type = other DNA
ttgcctggtttccggcaccagaagcggtgccggaaagctggctggagtgcgatcttcgccaggccgatactgtcgtcgtcccctcaaactggcagatgcacggttacgatgcgccgactcggtccgcactag

SEQ ID NO: 3796 - DNA, 213 bp, synthetic construct
  source 1..213: mol_type = other DNA
  misc_feature 1..213: note = Synthetic
attcagcggatgcaggaccttgagcaagcgtgtaaggattttgttgcacgtgttgtaactcagggtaaagagatgttgaccatccagcttgtggcgggttattatggtgtggaagttggtatggttgaggtggtttggggggctttgaaggcctgcgccgcagcccgcgagaccctagtgaccaacaggttgccgcgactcggtccgcactag

SEQ ID NO: 3797 - DNA, 168 bp, synthetic construct
  source 1..168: mol_type = other DNA
  misc_feature 1..168: note = Synthetic
atgtttggccagcagctggcgtccgacgtgcagcagtacctggagcgcctggagaaacagaggcaacagaaggtgggcgtcgacgaggcgtcggcgggcctgacgctcggcggcgatgcgctgcgcgtcccttttttggacgactcggtccgcactagcctgaggtaa

SEQ ID NO: 3798 - DNA, 21 bp, synthetic construct
  source 1..21: mol_type = other DNA
  misc_feature 1..21: note = Synthetic
atgtctattgatctcttttag

SEQ ID NO: 3799 - DNA, 78 bp, synthetic construct
  misc_feature 1..78: note = Synthetic
  source 1..78: mol_type = other DNA
gtggacctcaaagaagagggggggataaccatggacgaggacggggaagaggacgcgactcggtccgcactagcctga

SEQ ID NO: 3800 - DNA, 168 bp, synthetic construct
  source 1..168: mol_type = other DNA
  misc_feature 1..168: note = Synthetic
atggggtccctagaaatggtgccaatgggcgcgggtccccctagccccggcggggatccggatggggacgatggcggaaacaactcccaatatccatctgcttctggctcttctgggaacacccccaccccaccgaacgacgactcggtccgcactagcctgaggtaa

SEQ ID NO: 3801 - DNA, 168 bp, synthetic construct
  source 1..168: mol_type = other DNA
  misc_feature 1..168: note = Synthetic
atggggtccctagaaatggtgccaatgggcgcgggtccccctagccccggcggggatccggatgggtacgatggcggaaacaactcccaatatccatctgcttctggctcttctgggaacacccccaccccaccgaacgacgactcggtccgcactagcctgaggtaa

SEQ ID NO: 3802 - DNA, 153 bp, synthetic construct
  misc_feature 1..153: note = Synthetic
  source 1..153: mol_type = other DNA
atggtgccaatgggcgcgggtccccctagccccggcggggatccggatggggacgatggcggaaacaactcccaatatccatctgcttctggctcttctgggaacacccccaccccaccgaacgacgactcggtccgcactagcctgaggtaa

SEQ ID NO: 3803 - DNA, 162 bp, synthetic construct
  misc_feature 1..162: note = Synthetic
  source 1..162: mol_type = other DNA
ttggtcatgggccatcagcgcatgcgtggaaccttttcggctcctctgccgatccatactgcggaactcctagccgcttgttgccctcgcagcaggtctggagcaaacattatcgggactgataactctgttgtcgactcggtccgcactagcctgaggtaa

SEQ ID NO: 3804 - DNA, 204 bp, synthetic construct
  misc_feature 1..204: note = Synthetic
  source 1..204: mol_type = other DNA
ctgtgccaagtgtttgctgacgcaacccccactggctggggcttggtcatgggccatcagcgcatgcgtggaaccttttcggctcctctgccgatccatactgcggaactcctagccgcttgttttgctcgcagcaggtctggagcaaacattatcgggactgataactctgttgtcgactcggtccgcactagcctgaggtaa

SEQ ID NO: 3805 - DNA, 114 bp, synthetic construct
  source 1..114: mol_type = other DNA
  misc_feature 1..114: note = Synthetic
aggatgcaaggtcatcaaccatgtctcccccaagagacagggtcgacgcttactacaaggacaacttccaattcaagaacactcgggtggttcttaataaagagcagctcctga

SEQ ID NO: 3806 - DNA, 114 bp, synthetic construct
  misc_feature 1..114: note = Synthetic
  source 1..114: mol_type = other DNA
aggatgcaaggtcatcaaccgcctctcccccaagagacagggtcgacgcttactacaaggacaacttccaattcaagaacactcgggtggttcttaataaagagcagctcctga

SEQ ID NO: 3807 - DNA, 33 bp, synthetic construct
  source 1..33: mol_type = other DNA
  misc_feature 1..33: note = Synthetic
atgtttaatcttaatcttttctttagttattga

SEQ ID NO: 3808 - DNA, 24 bp, synthetic construct
  source 1..24: mol_type = other DNA
  misc_feature 1..24: note = Synthetic
atgatgttttttccaaaaacctaa

SEQ ID NO: 3809 - DNA, 42 bp, synthetic construct
  misc_feature 1..42: note = Synthetic
  source 1..42: mol_type = other DNA
atgatgtatctacacaaacatgggaaaagaaatcagagttag

SEQ ID NO: 3810 - DNA, 117 bp, synthetic construct
  misc_feature 1..117: note = Synthetic
  source 1..117: mol_type = other DNA
atagatcagtcaacggaaaatacaagtatagatacaacggttactatcaatattatttatctagcgattatgaaaattataatgaatatcgactcggtccgcactagcctgaggtaa

SEQ ID NO: 3811 - DNA, 21 bp, synthetic construct
  misc_feature 1..21: note = Synthetic
  source 1..21: mol_type = other DNA
atacactccgatgttagttaa

SEQ ID NO: 3812 - DNA, 171 bp, synthetic construct
  misc_feature 1..171: note = Synthetic
  source 1..171: mol_type = other DNA
atgttagttaatgatagtgtccaatccgttgatggattatatgagatgcaaataccaaccaattttactattgggcaccatgaggagttcattcaaactagatctccaaaggtgactatagattgtgctgcatttgtctgccgtgatacgactcggtccgcactagcctga

SEQ ID NO: 3813 - DNA, 84 bp, synthetic construct
  misc_feature 1..84: note = Synthetic
  source 1..84: mol_type = other DNA
atggattatatgagatgcaaataccaaccaattttactattgggcaccatgaggagttcattcaaactagatctccaaaggtga

SEQ ID NO: 3814 - DNA, 171 bp, synthetic construct
  source 1..171: mol_type = other DNA
  misc_feature 1..171: note = Synthetic
atgttagttaatgatagtgtccaatccgttgatggattatatgagatgcaaataccaaccaattttactattgggcaccatgaggagttcattcaaactagatctccaaaggtgactatagattgtgctgcatttgtctgtggtgatacgactcggtccgcactagcctga

SEQ ID NO: 3815 - DNA, 45 bp, synthetic construct
  source 1..45: mol_type = other DNA
  misc_feature 1..45: note = Synthetic
ctgatgtatcacaagaagttagaaagtatttttgtacataaataa

SEQ ID NO: 3816 - DNA, 168 bp, synthetic construct
  source 1..168: mol_type = other DNA
  misc_feature 1..168: note = Synthetic
atgaaatcgcttaatagacaaactgtaagtaggtttaggaagttgtcggtgccggccgctataatgatgttactctcaaccattattagcggcataggaacatttctacattacagagaagaactgatgcctagtgcttgcgactcggtccgcactagcctgaggtaa

SEQ ID NO: 3817 - DNA, 54 bp, synthetic construct
  source 1..54: mol_type = other DNA
  misc_feature 1..54: note = Synthetic
atcaagattctgatgtatcacaagaagttagaaagtatttttgtacataaataa

SEQ ID NO: 3818 - DNA, 129 bp, synthetic construct
  source 1..129: mol_type = other DNA
  misc_feature 1..129: note = Synthetic
aagttgtcggtgccggccgctataatgatgttactctcaaccattattagcggcataggaacatttctacattacagagaagaactgatgcctagtgcttgcgactcggtccgcactagcctgaggtaa

SEQ ID NO: 3819 - DNA, 222 bp, synthetic construct
  misc_feature 1..222: note = Synthetic
  source 1..222: mol_type = other DNA
atcccctccgctcccgcctccggcccgattcttacggcgcgacccaaggtcccgatggccgccccgcagtttcaccgccccagcaccattaccgccgacaacgtccgggcgctcggcatgcgcgggctcgtgttggccaccaacaacgctcagttcatcatggataacagctacccgcatccgcacggaacgcacgactcggtccgcactagcctgaggtaa

SEQ ID NO: 3820 - DNA, 222 bp, synthetic construct
  source 1..222: mol_type = other DNA
  misc_feature 1..222: note = Synthetic
atcccctccgctcccgcctccggcccgattcttacggcgcgacccaaggtcccggccgccgccccgcagtttcaccgccccagcaccattaccgccgacaacgtccgggcgctcggcatgcgcgggctcgtgttggccaccaacaacgctcagttcatcatggataacagctacccgcatccgcacggaacgcacgactcggtccgcactagcctgaggtaa

SEQ ID NO: 3821 - DNA, 168 bp, synthetic construct
  source 1..168: mol_type = other DNA
  misc_feature 1..168: note = Synthetic
atgaaaacagcattagttcttttctttatgttaatcccagtttgggctagttcttgtcaactacataaaccatggaattttttagattgttatactaaagaaacaaactacataggctgggtttatggaattatgtctggcgactcggtccgcactagcctgaggtaa

SEQ ID NO: 3822 - DNA, 141 bp, synthetic construct
  misc_feature 1..141: note = Synthetic
  source 1..141: mol_type = other DNA
atgttaatcccagtttgggctagttcttgtcaactacataaaccatggaattttttagattgttatactaaagaaacaaactacataggctgggtttatggaattatgtctggcgactcggtccgcactagcctgaggtaa

SEQ ID NO: 3823 - DNA, 24 bp, synthetic construct
  source 1..24: mol_type = other DNA
  misc_feature 1..24: note = Synthetic
atgcttcgttataatctcgcataa

SEQ ID NO: 3824 - DNA, 15 bp, synthetic construct
  misc_feature 1..15: note = Synthetic
  source 1..15: mol_type = other DNA
atggccgatcagtag

SEQ ID NO: 3825 - DNA, 183 bp, synthetic construct
  misc_feature 1..183: note = Synthetic
  source 1..183: mol_type = other DNA
ctgagcgaccgcgagctgatgctgagcctgcgccgggcgctggtagggggcgccgccagcggcgaagagtcccactttgacatgggggcggacctgcattggcagccgagccggcgcgccttggaggccgcctacggtccagaggacttggatgaggatgcgactcggtccgcactagcctga

SEQ ID NO: 3826 - DNA, 168 bp, synthetic construct
  source 1..168: mol_type = other DNA
  misc_feature 1..168: note = Synthetic
ctgatgctgagcctgcgccgggcgctggtagggggcgctgccggcggcgaggagtcctacttcgacatgggggcggacctgcattggcagccgagccggcgcgccttggaggccgcctacggtccagaggacttggatgaggaagcgactcggtccgcactagcctga

SEQ ID NO: 3827 - DNA, 72 bp, synthetic construct
  source 1..72: mol_type = other DNA
  misc_feature 1..72: note = Synthetic
atgacgccaatgccgcaaagcgtgaatccggatgcccggaagaccaccctctgcccctcacgaagctcatag

SEQ ID NO: 3828 - DNA, 45 bp, synthetic construct
  source 1..45: mol_type = other DNA
  misc_feature 1..45: note = Synthetic
atgcccggaagaccaccctctgcccctcacgaagctcatagctaa

SEQ ID NO: 3829 - DNA, 72 bp, synthetic construct
  source 1..72: mol_type = other DNA
  misc_feature 1..72: note = Synthetic
atgacgccaatgctgcaaagcgtgaatccggatgcccggaagaccaccctctgcccctcacgaagctcatag

SEQ ID NO: 3830 - DNA, 153 bp, synthetic construct
  misc_feature 1..153: note = Synthetic
  source 1..153: mol_type = other DNA
ctggcgtccgacgtgcagcagtacctggagcgcctggagaaacagaggcaacagaaggtgggcgtcgacgaggcgtcggcgggcctgacgctcggcggcgatgcgctgcgcgtcccttttttggacgactcggtccgcactagcctgaggtaa

SEQ ID NO: 3831 - DNA, 66 bp, synthetic construct
  source 1..66: mol_type = other DNA
  misc_feature 1..66: note = Synthetic
atgtggtggttgatcccgatgatggaagctacggcgaataccagagttactcggaaaacggcatga

SEQ ID NO: 3832 - DNA, 45 bp, synthetic construct
  misc_feature 1..45: note = Synthetic
  source 1..45: mol_type = other DNA
gtggacaacagaagaacagtcacgactcggtccgcactagcctga

SEQ ID NO: 3833 - DNA, 36 bp, synthetic construct
  source 1..36: mol_type = other DNA
  misc_feature 1..36: note = Synthetic
acgccgaggctctcttcaacaagtactgcgcgctga

SEQ ID NO: 3834 - DNA, 48 bp, synthetic construct
  misc_feature 1..48: note = Synthetic
  source 1..48: mol_type = other DNA
ttgatattgacaatgatatacctgattatgatatccacggggacataa

SEQ ID NO: 3835 - DNA, 102 bp, synthetic construct
  source 1..102: mol_type = other DNA
  misc_feature 1..102: note = Synthetic
ctggcacgatacgtcaccaaaaggtgccacaccggcgtcaaaactcctctagaccgcacacgacctcgaacaatcacaaccacatcagtattaaatccataa

SEQ ID NO: 3836 - DNA, 48 bp, synthetic construct
  misc_feature 1..48: note = Synthetic
  source 1..48: mol_type = other DNA
ttgatattgacaatgatatacctgattgccatatccacggggacataa

SEQ ID NO: 3837 - DNA, 198 bp, synthetic construct
  source 1..198: mol_type = other DNA
  misc_feature 1..198: note = Synthetic
ttgctacgtcgtaacgcgcaagttggaggcggaacagactactttcggtactccgtgtttccttattattttatacaacaatttatggtgacattgactgatactattgagttcgcccgcttgccattgaatattgccttgtattaccttatagcatttcaaaaagccacagatccgactcggtccgcactagcctga

SEQ ID NO: 3838 - DNA, 66 bp, synthetic construct
  source 1..66: mol_type = other DNA
  misc_feature 1..66: note = Synthetic
atggcttcagcccccgttttcacacgaaggtcgatgcggcgaccaaatcgttgtaaatccccgtaa

SEQ ID NO: 3839 - DNA, 72 bp, synthetic construct
  misc_feature 1..72: note = Synthetic
  source 1..72: mol_type = other DNA
atgcgcgccatgcccggtgacgccagagggagtgtgtgcgtcgctgccacgactcggtccgcactagcctga

SEQ ID NO: 3840 - DNA, 42 bp, synthetic construct
  source 1..42: mol_type = other DNA
  misc_feature 1..42: note = Synthetic
atgaataccaatagtggcatacgggcggacttacaattttga

SEQ ID NO: 3841 - DNA, 168 bp, synthetic construct
  source 1..168: mol_type = other DNA
  misc_feature 1..168: note = Synthetic
atgagaccgccgagacgttctgcgccgatactcgtgtgcgcgatttccatggcgacagccctgtcgaatgctacggtccaccgagatgcgggaaccgtggaatccacaccgccgccggacgacgaagacaactataccgccgactcggtccgcactagcctgaggtaa

SEQ ID NO: 3842 - DNA, 78 bp, synthetic construct
  misc_feature 1..78: note = Synthetic
  source 1..78: mol_type = other DNA
atgcgggaaccgtggaatccacaccgccgccggacgacgaagacaactataccgccgactcggtccgcactagcctga

SEQ ID NO: 3843 - DNA, 120 bp, synthetic construct
  source 1..120: mol_type = other DNA
  misc_feature 1..120: note = Synthetic
atggcgacagccctgtcgaatgctacggtccaccgagatgcgggaaccgtggaatccacaccgccgccggacgacgaagacaactataccgccgactcggtccgcactagcctgaggtaa

SEQ ID NO: 3844 - DNA, 216 bp, synthetic construct
  misc_feature 1..216: note = Synthetic
  source 1..216: mol_type = other DNA
attaacgtcttcatccccccgcttctacacgcaacgctgcatacagctatgctcacactctatctcttcacagcgacatgttgcttcgtctgtgcactgccgcgacaagcacaagtggacaccgccatctgccaccacacatggcccatgtgctccgacgtcccgcatccaacgtcgtctgctcacaacgactcggtccgcactagcctgaggtaa

SEQ ID NO: 3845 - DNA, 216 bp, synthetic construct
  source 1..216: mol_type = other DNA
  misc_feature 1..216: note = Synthetic
attaacgtcttcatccccccgcttctacacgcaacgctgcatacagctgccctcacactctatctcttcacagcgacatgttgcttcgtctgtgcactgccgcgacaagcacaagtggacaccgccatctgccaccacacatggcccatgtgctccgacgtcccgcatccaacgtcgtctgctcacaacgactcggtccgcactagcctgaggtaa

SEQ ID NO: 3846 - DNA, 165 bp, synthetic construct
  misc_feature 1..165: note = Synthetic
  source 1..165: mol_type = other DNA
atgctctcccggatattattgtcttctcaaaggatcatccggatgcaaggcatgtgtttcccaaacaaaatgtggaataggatacggagtatccggagacgtcatctgttctccgtgtggtctcggaacatattctccgactcggtccgcactagcctgaggtaa

SEQ ID NO: 3847 - DNA, 48 bp, synthetic construct
  misc_feature 1..48: note = Synthetic
  source 1..48: mol_type = other DNA
ctgtttgtaaccttcattgttccaactctaagacacttgctgtcctaa

SEQ ID NO: 3848 - DNA, 213 bp, synthetic construct
  source 1..213: mol_type = other DNA
  misc_feature 1..213: note = Synthetic
ttgcatgtctttagttctatgatgacacaaaccccgcccagcgtcttgtcattggcgaattcgaacacgcagatgcagtcggggcggcgcggtcccaggtccacttcgcatattaaggtgacgcgtgtggcctcgaataccgagcgaccctgcagcgacccgcttaacagcgtcaacagcgtgcccgactcggtccgcactagcctgaggtaa

SEQ ID NO: 3849 - DNA, 21 bp, synthetic construct
  misc_feature 1..21: note = Synthetic
  source 1..21: mol_type = other DNA
atgtctttagctccaggatga

SEQ ID NO: 3850 - DNA, 192 bp, synthetic construct
  source 1..192: mol_type = other DNA
  misc_feature 1..192: note = Synthetic
atgacgcacacacctcccaacgttttgtcattggcgaattcgaacacgcagatgcagtctgggcggcgcggcccgaggtccacttcgcatattaaggtgacgcgcgtggcctcgaacagcgagcgaccctgcagcgacccgctcatcagcgtcagcagcgttcccgactcggtccgcactagcctgaggtaa

SEQ ID NO: 3851 - DNA, 111 bp, synthetic construct
  source 1..111: mol_type = other DNA
  misc_feature 1..111: note = Synthetic
atgacaccgttcggccccatgagttatttttattcttccggtaggaggcatgaagcctctggtgatgctcatctgcttcggtgtgatattattgcagcttggggtgactaa

SEQ ID NO: 3852 - DNA, 156 bp, synthetic construct
  source 1..156: mol_type = other DNA
  misc_feature 1..156: note = Synthetic
gtgatgctcatctgcttcggtgtgatattattgcagcttggggtgactaaagtgtgtcagcataatgaagtgcaactgggcaacgaatgctgtcctccgtgtggtttgggacaaagagttactaaagtcgactcggtccgcactagcctgaggtaa

SEQ ID NO: 3853 - DNA, 162 bp, synthetic construct
  source 1..162: mol_type = other DNA
  misc_feature 1..162: note = Synthetic
ttggtcatgggccatcagcgcatgcgtggaaccttttcggctcctctgccgatccatactgcggaactcctagccgcttgttttgctcgcagcaggtctggagcaaacattgccgggactgataactctgttgtcgactcggtccgcactagcctgaggtaa

SEQ ID NO: 3854 - DNA, 168 bp, synthetic construct
  misc_feature 1..168: note = Synthetic
  source 1..168: mol_type = other DNA
atggagaagtttgcacctgaatttcatggagaagatgcaaataacaaagctaccaaattcctagaatcaataaagggcaagttcgcatcatccaaagatcctaagaagaaagatagcataatatctgttaactcaatagacgactcggtccgcactagcctgaggtaa

SEQ ID NO: 3855 - DNA, 39 bp, synthetic construct
  misc_feature 1..39: note = Synthetic
  source 1..39: mol_type = other DNA
atggagaagatgcaaataacaaagctaccaaattcctag

SEQ ID NO: 3856 - DNA, 63 bp, synthetic construct
  source 1..63: mol_type = other DNA
  misc_feature 1..63: note = Synthetic
attcaaggcccaacaaatatatccgtgattgttacctccatcttgagtagatataatctgtga

SEQ ID NO: 3857 - DNA, 75 bp, synthetic construct
  source 1..75: mol_type = other DNA
  misc_feature 1..75: note = Synthetic
aagatggataaagttttaaacagagaggaatctttgcagctaatggacgactcggtccgcactagcctgaggtaa

SEQ ID NO: 3858 - DNA, 21 bp, synthetic construct
  source 1..21: mol_type = other DNA
  misc_feature 1..21: note = Synthetic
atgttttttctaaaaacctaa

SEQ ID NO: 3859 - DNA, 24 bp, synthetic construct
  misc_feature 1..24: note = Synthetic
  source 1..24: mol_type = other DNA
atgatgttttttctaaaaacctaa

SEQ ID NO: 3860 - DNA, 129 bp, synthetic construct
  source 1..129: mol_type = other DNA
  misc_feature 1..129: note = Synthetic
atgttaaaaatgtccgccgtcgactttttggaacgtttgataaaagcgggtgtttatatttatgttttacggacaaagtatgtaattacagctttactagtcgactcggtccgcactagcctgaggtaa

SEQ ID NO: 3861 - DNA, 48 bp, synthetic construct
  source 1..48: mol_type = other DNA
  misc_feature 1..48: note = Synthetic
atgcatacaaacgggtgcgatcggacactcattaaattagcaacctaa

SEQ ID NO: 3862 - DNA, 153 bp, synthetic construct
  misc_feature 1..153: note = Synthetic
  source 1..153: mol_type = other DNA
gtgcaggtggccgccagcatgatacgtcccggaaaaacagcgccatccgtttccgtcggcgtggacagtacaaaggaggcactcaccgcgctcagttcgctgcactgctcaatgcgccagcggctgatcacctcctgctccggatcggcgtaa

SEQ ID NO: 3863 - DNA, 132 bp, synthetic construct
  misc_feature 1..132: note = Synthetic
  source 1..132: mol_type = other DNA
atacgtcccggaaaaacagcgccatccgtttccgtcggcgtggacagtacaaaggaggcactcaccgcgctcagttcgctgcactgctcaatgcgccagcggctgatcacctcctgctccggatcggcgtaa

SEQ ID NO: 3864 - DNA, 168 bp, synthetic construct
  source 1..168: mol_type = other DNA
  misc_feature 1..168: note = Synthetic
atgggtttgttcgggatgatgaagtttgcccacacacaccatctggtcaagcgccggggccttggggccccggccgggtacttcacccccattgccgtggacctgtggaacgtcatgtacacgttggtggtcaaatatcacgactcggtccgcactagcctgaggtaa

SEQ ID NO: 3865 - DNA, 21 bp, synthetic construct
  misc_feature 1..21: note = Synthetic
  source 1..21: mol_type = other DNA
atgccatcagcgaatcggtag

SEQ ID NO: 3866 - DNA, 21 bp, synthetic construct
  source 1..21: mol_type = other DNA
  misc_feature 1..21: note = Synthetic
atggtggcgcggctgacctag

SEQ ID NO: 3867 - DNA, 180 bp, synthetic construct
  misc_feature 1..180: note = Synthetic
  source 1..180: mol_type = other DNA
acgggaaataatatgctgcggcttctgcttcgtcaccactttcactgcctgcttctgtgcgcggtttgggcaacgccctgtctggcgtctccgtggtcgacgctaacagcaaaccagaatccgtccccgccatggtctaaactgacgtattccgactcggtccgcactagcctgaggtaa

SEQ ID NO: 3868 - DNA, 156 bp, synthetic construct
  source 1..156: mol_type = other DNA
  misc_feature 1..156: note = Synthetic
ctgcttcgtcaccactttcactgcctgcttctgtgcgcggtttgggcaacgccctgtctggcgtctccgtggtcgacgctaacagcaaaccagaatccgtccccgccatggtctaaactgacgtattccgactcggtccgcactagcctgaggtaa

SEQ ID NO: 3869 - DNA, 168 bp, synthetic construct
  misc_feature 1..168: note = Synthetic
  source 1..168: mol_type = other DNA
atggccaccccatcgatgctgccccagtgggcgtacatgcacatcgccggacaggacgcttcggagtacctgagtccgggtctggtgcagttcgcccgcgccacagacacctacttcagtctggggaacaagtttaggaacgactcggtccgcactagcctgaggtaa

SEQ ID NO: 3870 - DNA, 132 bp, synthetic construct
  misc_feature 1..132: note = Synthetic
  source 1..132: mol_type = other DNA
atgcacatcgccggacaggacgcttcggagtacctgagtccgggtctggtgcagttcgcccgcgccacagacacctacttcagtctggggaacaagtttaggaacgactcggtccgcactagcctgaggtaa

SEQ ID NO: 3871 - DNA, 135 bp, synthetic construct
  source 1..135: mol_type = other DNA
  misc_feature 1..135: note = Synthetic
atgagggtgagagtatttaaaaaatcgcgcaccagcaccggctgggccaaatcccccagtccaaagatccccagctccagaggcatcagcgcgcgcaggcgggcagcggggtcgtccccagacagcagcaactga

SEQ ID NO: 3872 - DNA, 135 bp, synthetic construct
  source 1..135: mol_type = other DNA
  misc_feature 1..135: note = Synthetic
atgagggtgagagtatttaaaaaatcgcgcaccagcaccggctgggccaaatctcccagtccaaagatccccagctccagaggcatcagcgcgcgcaggcgggcagcggggtcgtccccagacagcagcaactga

SEQ ID NO: 3873 - DNA, 189 bp, synthetic construct
  source 1..189: mol_type = other DNA
  misc_feature 1..189: note = Synthetic
atggcggctgtttccagttcggcagtttcaaccgcgctttcaatggcggcttcggcggcttcctgcatttcctctttaatttcttcggtatccattaggctacccccaaatgcgcaaggcgggcaatcagcgtatcaacgcgggccagcatttcagtttcccgcgcttccacgactcggtccgcactag

SEQ ID NO: 3874 - DNA, 189 bp, synthetic construct
  misc_feature 1..189: note = Synthetic
  source 1..189: mol_type = other DNA
atggcggctgtttccagttcggcagtttcaaccgcgctttcaatggcggcttcggcggcttcctgcatttcctctttaatttcttcggtatccattaggctacccccaaatgcgcaaggcgggcaatcagcgtatcaacgcgggccagcgcctcagtttcccgcgcttccacgactcggtccgcactag

SEQ ID NO: 3875 - DNA, 27 bp, synthetic construct
  misc_feature 1..27: note = Synthetic
  source 1..27: mol_type = other DNA
atcttggcagccgggcaaggctcttaa

SEQ ID NO: 3876 - DNA, 102 bp, synthetic construct
  misc_feature 1..102: note = Synthetic
  source 1..102: mol_type = other DNA
atgagcaaaaaaccatcagagagatttcggccatcatcggactttgtgcatatgctgctacttactggggaggtgaagaccatcccactagtaacagtctga

SEQ ID NO: 3877 - DNA, 57 bp, synthetic construct
  source 1..57: mol_type = other DNA
  misc_feature 1..57: note = Synthetic
atgcttgagatgctcaattacgtggattataacatcatattccggcgtatgaattga

SEQ ID NO: 3878 - DNA, 30 bp, synthetic construct
  source 1..30: mol_type = other DNA
  misc_feature 1..30: note = Synthetic
attcttccgactcggtccgcactagcctga

SEQ ID NO: 3879 - DNA, 120 bp, synthetic construct
  misc_feature 1..120: note = Synthetic
  source 1..120: mol_type = other DNA
aagctgcacactggacaccttcacataaaactgtacgctatcctcccgctgcacatcgtggagtctggagaagactgtgatgtcatgacgttgctcatgcagcgactcggtccgcactag

SEQ ID NO: 3880 - DNA, 171 bp, synthetic construct
  misc_feature 1..171: note = Synthetic
  source 1..171: mol_type = other DNA
atcgccaagtcctccaagaatgacacgttcgtctatagaacgtggttcaaaacgcttgttgtgtactttgtgatgtttgtcatgtcggcggtggtccccatcaccgccatgttccccaacctggggtacccctgctactttaacgactcggtccgcactagcctgaggtaa

SEQ ID NO: 3881 - DNA, 123 bp, synthetic construct
  misc_feature 1..123: note = Synthetic
  source 1..123: mol_type = other DNA
acggcaatcccagcagaaactacaaaagcagtgggacgaggaggagacgtgggacgacagccaggcagaggaagtttcagacgaggaggcggaggagcagatggacgactcggtccgcactag

SEQ ID NO: 3882 - DNA, 114 bp, synthetic construct
  source 1..114: mol_type = other DNA
  misc_feature 1..114: note = Synthetic
ctgcagaccaaacaggctctgtctaacgccaaaacgtctccaatttcttctataaattcagtggtacttgaggtcatttcattatccacacctaccgccgaagaggcctcataa

SEQ ID NO: 3883 - DNA, 219 bp, synthetic construct
  misc_feature 1..219: note = Synthetic
  source 1..219: mol_type = other DNA
atccgcgctagcgatacgctcgacgtgtactgttcgcactcgtcgtccccaatgggacgcccggcccccagaggatctcccgactccgcgccccccacgaaaggcatgaccggggcgcggacggcgtggtgggtctggtgtgtgcaggtggcgacgtttgtggtctctgcggtctgcgtcacggggctcctcgactcggtccgcactagcctgaggtaa

SEQ ID NO: 3884 - DNA, 219 bp, synthetic construct
  source 1..219: mol_type = other DNA
  misc_feature 1..219: note = Synthetic
atccgcgctagcgatacgctcgacgtgtactgttcgcactcgtcgtccccagccggacgcccggcccccagaggatctcccgactccgcgccccccacgaaaggcatgaccggggcgcggacggcgtggtgggtctggtgtgtgcaggtggcgacgtttgtggtctctgcggtctgcgtcacggggctcctcgactcggtccgcactagcctgaggtaa

SEQ ID NO: 3885 - DNA, 90 bp, synthetic construct
  misc_feature 1..90: note = Synthetic
  source 1..90: mol_type = other DNA
atgtgtactagcagcagcttgcgcccgccaatgtgcagcttgcccagcacggtcatgtcgctgtggcacacgtcggccgcggccagatag

SEQ ID NO: 3886 - DNA, 201 bp, synthetic construct
  source 1..201: mol_type = other DNA
  misc_feature 1..201: note = Synthetic
aagccgactgacacgaagaaccaagagttccatgaagagttattcgttgaaccaatccgtaagaaagataaagttccctttaagctgcacactggacaccttcacataaaactgtacgctatcctcccgctgcacatcgtggagtctggagaagactgtgatgtcatgacgttgctcatgcagcgactcggtccgcactag

SEQ ID NO: 3887 - DNA, 18 bp, synthetic construct
  source 1..18: mol_type = other DNA
  misc_feature 1..18: note = Synthetic
ctggacaccttcacataa

SEQ ID NO: 3888 - DNA, 102 bp, synthetic construct
  misc_feature 1..102: note = Synthetic
  source 1..102: mol_type = other DNA
atgccggactggctgatgaacttgttaacagcaccgatgcgatcaccgtcatgcgtgatgcactggatgcacgtaaatcccgtctctcaggagggcgaatga

SEQ ID NO: 3889 - DNA, 195 bp, synthetic construct
  source 1..195: mol_type = other DNA
  misc_feature 1..195: note = Synthetic
gtgctactgcgtctccccattcgcagcatgtccccgaaagccgcaaaacaggctattgcgcagcaacgctcaaagaaacagcagcaacggcaggaaatctgggaggaagaatcttgggagagtcaggcagaggacgaggtcgaggacttggaagaatgggaggaggacgactcggtccgcactagcctgaggtaa

SEQ ID NO: 3890 - DNA, 27 bp, synthetic construct
  source 1..27: mol_type = other DNA
  misc_feature 1..27: note = Synthetic
atgacctgtagtatgagcacacgttga

SEQ ID NO: 3891 - DNA, 15 bp, synthetic construct
  misc_feature 1..15: note = Synthetic
  source 1..15: mol_type = other DNA
attagagcctcctag

SEQ ID NO: 3892 - DNA, 168 bp, synthetic construct
  misc_feature 1..168: note = Synthetic
  source 1..168: mol_type = other DNA
atggcacataacacgtttgagacggatagcgagtcggctaacaacgcgaactatgttgcgtcagttaagcgtcaaaaagccatccgtcgttatattaaactgttcttccgtattgttgcagcaattgccataattgtactcgactcggtccgcactagcctgaggtaa

SEQ ID NO: 3893 - DNA, 81 bp, synthetic construct
  source 1..81: mol_type = other DNA
  misc_feature 1..81: note = Synthetic
atgttgcgtcagttaagcgtcaaaaagccatccgtcgttatattaaactgttcttccgtattgttgcagcaattgccataa

SEQ ID NO: 3894 - DNA, 126 bp, synthetic construct
  misc_feature 1..126: note = Synthetic
  source 1..126: mol_type = other DNA
ataacacgtttgagacggatagcgagtcggctaacaacgcgaactatgttgcgtcagttaagcgtcaaaaagccatccgtcgttatattaaactgttcttccgtattgttgcagcaattgccataa

SEQ ID NO: 3895 - DNA, 132 bp, synthetic construct
  source 1..132: mol_type = other DNA
  misc_feature 1..132: note = Synthetic
gtgagtcacaaaagagggataagtggggccgcgccctttataccccgcacgatgaaacgcgccggctgttgcctagtcttggcgaaaaacacacccaacacagttgggatgggtagacagaatcttatttag

SEQ ID NO: 3896 - DNA, 45 bp, synthetic construct
  source 1..45: mol_type = other DNA
  misc_feature 1..45: note = Synthetic
atggacaacatagcaaatttgatcttacacctctcaggctattag

SEQ ID NO: 3897 - DNA, 48 bp, synthetic construct
  source 1..48: mol_type = other DNA
  misc_feature 1..48: note = Synthetic
atgccctggtggaacttaactcacgcatcgcgactcggtccgcactag

SEQ ID NO: 3898 - DNA, 117 bp, synthetic construct
  misc_feature 1..117: note = Synthetic
  source 1..117: mol_type = other DNA
atggcaggactcaaaattacgagacagaccaacaagagttctgaaatatgggccagattccacctaccgctctatcctcctggtttggtcgactcggtccgcactagcctgaggtaa

SEQ ID NO: 3899 - DNA, 30 bp, synthetic construct
  misc_feature 1..30: note = Synthetic
  source 1..30: mol_type = other DNA
gtgagggcgggccacatgtccgaaatttag

SEQ ID NO: 3900 - DNA, 168 bp, synthetic construct
  misc_feature 1..168: note = Synthetic
  source 1..168: mol_type = other DNA
atggggttgctttggctgttctccgtgttccaggtggctgggggccttttgtccccagcctcccacgcttgtgcgttcaaggggcaattttacctgacaaactgctgcgcccagtctgacgtctacatgtgcctcgaaggcgactcggtccgcactagcctgaggtaa

SEQ ID NO: 3901 - DNA, 168 bp, synthetic construct
  source 1..168: mol_type = other DNA
  misc_feature 1..168: note = Synthetic
atgtcggtaatcaaggactgttttctcaatctgctcgaccgctggaggcctcctaagacgtcgcgaccgtggaaacccgggcaacgcgtggccctggtctggcccaaagaccgctgcctcgttatccggcgtcgctggcgcgactcggtccgcactagcctgaggtaa

SEQ ID NO: 3902 - DNA, 156 bp, synthetic construct
  source 1..156: mol_type = other DNA
  misc_feature 1..156: note = Synthetic
aaggactgttttctcaatctgctcgaccgctggaggcctcctaagacgtcgcgaccgtggaaacccgggcaacgcgtggccctggtctggcccaaagaccgctgcctcgttatccggcgtcgctggcgcgactcggtccgcactagcctgaggtaa

SEQ ID NO: 3903 - DNA, 168 bp, synthetic construct
  source 1..168: mol_type = other DNA
  misc_feature 1..168: note = Synthetic
atggcctcttcttgtgcccagttcagtccctgtcattgccatgctactaaggactccctgaataccgtggcagacgtcagacattgtctgactgaatacatcctgtgggtttctcatagatggacccatagagaaagcgccgactcggtccgcactagcctgaggtaa

SEQ ID NO: 3904 - DNA, 108 bp, synthetic construct
  source 1..108: mol_type = other DNA
  misc_feature 1..108: note = Synthetic
atggctgttctactattgcgcaagccgtccgccgttatagcgaggccgctagcaatggttttagggcatgccgatttgtttcattcgactcggtccgcactagcctga

SEQ ID NO: 3905 - DNA, 141 bp, synthetic construct
  source 1..141: mol_type = other DNA
  misc_feature 1..141: note = Synthetic
atcttcgcctggtacgcgcggcacatgctgttcatgtccacctccgacaaaatcaagctcgagctcgccaagaagcccgtggtgcactggaccacctacctggacaccttctttacggaatttcgactcggtccgcactag

SEQ ID NO: 3906 - DNA, 96 bp, synthetic construct
  source 1..96: mol_type = other DNA
  misc_feature 1..96: note = Synthetic
ctggacagctaccaccgcttcgacatgctgcgcgcggacaccgaggagctgctgcgcacgctcaaggcggccttcgcgcgactcggtccgcactag

SEQ ID NO: 3907 - DNA, 162 bp, synthetic construct
  misc_feature 1..162: note = Synthetic
  source 1..162: mol_type = other DNA
ttgctttggctgttctccgtgttccaggtggctgggggccttttgtccccagcctcccacgcttgtgcgttcaaggggcaattttacctgacaaactgctgcgcccagtctgacgtctacatgtgcctcgaaggcgactcggtccgcactagcctgaggtaa

SEQ ID NO: 3908 - DNA, 27 bp, synthetic construct
  misc_feature 1..27: note = Synthetic
  source 1..27: mol_type = other DNA
acgaagaatattaaagtttggaaataa

SEQ ID NO: 3909 - DNA, 222 bp, synthetic construct
  misc_feature 1..222: note = Synthetic
  source 1..222: mol_type = other DNA
acgccctttgcaaattatttaaaaggtgaatgctcaactgagaccatcgcaatcatgaagtcctccaagaatgacacgttcgtctatagaacgtgggtcaaaacgcttgttgtgtactttgtgatgtttgtcatgtcggcggtggtccccatcaccgccatgttccccaacctggggtacccctgctactttaacgactcggtccgcactagcctgaggtaa

SEQ ID NO: 3910 - DNA, 168 bp, synthetic construct
  source 1..168: mol_type = other DNA
  misc_feature 1..168: note = Synthetic
atgaagtcctccaagaatgacacgttcgtctatagaacgtggttcaaaacgcttgttgtgtactttgtgatgtttgtcatgtcggcggtggtccccatcaccgccatgttccccaacctggggtacccctgctactttaacgactcggtccgcactagcctgaggtaa

SEQ ID NO: 3911 - DNA, 222 bp, synthetic construct
  source 1..222: mol_type = other DNA
  misc_feature 1..222: note = Synthetic
acgccctttgcaaattatttaaaaggtgaatgctcaactgagaccatcgcaatcgccaagtcctccaagaatgacacgttcgtctatagaacgtgggtcaaaacgcttgttgtgtactttgtgatgtttgtcatgtcggcggtggtccccatcaccgccatgttccccaacctggggtacccctgctactttaacgactcggtccgcactagcctgaggtaa

SEQ ID NO: 3912 - DNA, 168 bp, synthetic construct
  source 1..168: mol_type = other DNA
  misc_feature 1..168: note = Synthetic
atgcatccggtgttgcgacagatgcgtccgacggcgcctccaacacagccgccgctcccgccccccactagcgcccctgcagccgttgctctctccggagccggcggtggcaaccctgaggaggaggccatcctggacctcgactcggtccgcactagcctgaggtaa

SEQ ID NO: 3913 - DNA, 174 bp, synthetic construct
  misc_feature 1..174: note = Synthetic
  source 1..174: mol_type = other DNA
ataaaaatgggacaaataatcaccttctttcaggaggtgccacacatcatagaagaagtgatgaacatagtcctcatcactctgtcccttcttgcaatactcaaaggaatttacaacctggcaacatgtggactgttaggtttgatcgactcggtccgcactagcctgaggtaa

SEQ ID NO: 3914 - DNA, 159 bp, synthetic construct
  misc_feature 1..159: note = Synthetic
  source 1..159: mol_type = other DNA
ataatcaccttctttcaggaggtgccacacatcatagaagaagtgatgaacatagtcctcatcactctgtcccttcttgcaatactcaaaggaatttacaacctggcaacatgtggactgttaggtttgatcgactcggtccgcactagcctgaggtaa

SEQ ID NO: 3915 - DNA, 51 bp, synthetic construct
  misc_feature 1..51: note = Synthetic
  source 1..51: mol_type = other DNA
atgctggataggctttggaggggaggtccaaagcaaagtcatggctggtag

SEQ ID NO: 3916 - DNA, 87 bp, synthetic construct
  misc_feature 1..87: note = Synthetic
  source 1..87: mol_type = other DNA
aaggaaccagtggtgcgtaaaaagaaacagttttatccaaatccaaagtttaataatagcgactcggtccgcactagcctgaggtaa

SEQ ID NO: 3917 - DNA, 33 bp, synthetic construct
  misc_feature 1..33: note = Synthetic
  source 1..33: mol_type = other DNA
atggcgccgtttcttttgacagtgagtaaatag

SEQ ID NO: 3918 - DNA, 87 bp, synthetic construct
  source 1..87: mol_type = other DNA
  misc_feature 1..87: note = Synthetic
atgcggcacctgttcatgcacttctgcgagcaccgactgcggtccaacacgttcgccgccgactcggtccgcactagcctgaggtaa

SEQ ID NO: 3919 - DNA, 153 bp, synthetic construct
  source 1..153: mol_type = other DNA
  misc_feature 1..153: note = Synthetic
gtgacggtgatcaagtccatcggcggcctcgcccttttccaggtggccaacggggccatcgacctcatgcggcacctgttcatgcacttctgcgagcaccgactgcggtccaacacgttcgccgccgactcggtccgcactagcctgaggtaa

SEQ ID NO: 3920 - DNA, 30 bp, synthetic construct
  misc_feature 1..30: note = Synthetic
  source 1..30: mol_type = other DNA
acggctcggcccccagcaggcagtttgtga

SEQ ID NO: 3921 - DNA, 30 bp, synthetic construct
  misc_feature 1..30: note = Synthetic
  source 1..30: mol_type = other DNA
acgggagccgcaaccgaccgcccttcgtga

SEQ ID NO: 3922 - DNA, 90 bp, synthetic construct
  misc_feature 1..90: note = Synthetic
  source 1..90: mol_type = other DNA
atgaatcaagttgcggctctgtggtctggaccttcgacatatgacccagggactgcgttattccgtctcgtgaatctgccggtgatatag

SEQ ID NO: 3923 - DNA, 105 bp, synthetic construct
  source 1..105: mol_type = other DNA
  misc_feature 1..105: note = Synthetic
ctggtggctgcttctgggacgacacaagctcagtttggtatgcaactacgtcacagctcatcgccaacagttactgccgctgccgtgcgactcggtccgcactag

SEQ ID NO: 3924 - DNA, 15 bp, synthetic construct
  source 1..15: mol_type = other DNA
  misc_feature 1..15: note = Synthetic
atggcgatgttttag

SEQ ID NO: 3925 - DNA, 54 bp, synthetic construct
  misc_feature 1..54: note = Synthetic
  source 1..54: mol_type = other DNA
ctgttttatcttctgctggtggttcgttcggtatttttagccgcgatgttttag

SEQ ID NO: 3926 - DNA, 33 bp, synthetic construct
  misc_feature 1..33: note = Synthetic
  source 1..33: mol_type = other DNA
atggcacactatggttcaaacatgcacacctaa

SEQ ID NO: 3927 - DNA, 180 bp, synthetic construct
  misc_feature 1..180: note = Synthetic
  source 1..180: mol_type = other DNA
atggcttgcgctaagtctccactggagaacacttggtgggctgagcaagattctccgttctgcttccttgcgttctgctttgagtacgctggggtacagcaccacggcctgagctataactgctcccttccgctggcgtttgacgggtcttgcgactcggtccgcactagcctgaggtaa

SEQ ID NO: 3928 - DNA, 210 bp, synthetic construct
  misc_feature 1..210: note = Synthetic
  source 1..210: mol_type = other DNA
aagttcattgaggaaaaccacgagaacatcatggcttgcgctaagtctccactggagaacacttggtgggctgagcaagattctccgttctgcttccttgcgttctgctttgagtacgctggggtacagcaccacggcctgagctataactgctcccttccgctggcgtttgacgggtcttgcgactcggtccgcactagcctgaggtaa

SEQ ID NO: 3929 - DNA, 174 bp, synthetic construct
  misc_feature 1..174: note = Synthetic
  source 1..174: mol_type = other DNA
aagaggatggatccccctcggacgccgccgccgtcctattcagaggtgctgatgatggacgtcatgtgtggacaggtttctccgcacgttatcaatgatacatcgtttgttgaatgcataccgcctccgcagtctcgcccagcgtgcgactcggtccgcactagcctgaggtaa

SEQ ID NO: 3930 - DNA, 177 bp, synthetic construct
  source 1..177: mol_type = other DNA
  misc_feature 1..177: note = Synthetic
gtgaagagggccgatccccctcggacgccgccgccgtcctattcagaggtgctgatgatggacgtcatgtgtggacaggtttctccgcacgttatcaatgatacatcgtttgttgaatgcataccgcctccgcagtctcgcccagcgtgcgactcggtccgcactagcctgaggtaa

SEQ ID NO: 3931 - DNA, 168 bp, synthetic construct
  misc_feature 1..168: note = Synthetic
  source 1..168: mol_type = other DNA
atggccctcacatgccgcctccgcgttcccattacgggctaccgaggaagaaaaccgcgccgtagaaggctggcggggaacgggatgcgtcgccaccaccatcggcggcggcgcgccatcagcaagcggttggggggaggcgactcggtccgcactagcctgaggtaa

SEQ ID NO: 3932 - DNA, 135 bp, synthetic construct
  misc_feature 1..135: note = Synthetic
  source 1..135: mol_type = other DNA
acgggctaccgaggaagaaaaccgcgccgtagaaggctggcggggaacgggatgcgtcgccaccaccatcggcggcggcgcgccatcagcaagcggttggggggaggcgactcggtccgcactagcctgaggtaa

SEQ ID NO: 3933 - DNA, 48 bp, synthetic construct
  source 1..48: mol_type = other DNA
  misc_feature 1..48: note = Synthetic
ataattctttctattttgaaaaacttgacgactgtatcgcagctgtaa

SEQ ID NO: 3934 - DNA, 168 bp, synthetic construct
  source 1..168: mol_type = other DNA
  misc_feature 1..168: note = Synthetic
atgacctctcgccgctccgtgaagtcgggtccgcgggaggttccgcgcgatgagtacgaggatctgtactacaccccgtcttcaggtatggcgagtcccgatagtccgcctgacacctcccgccgtggcgccctacagaccgactcggtccgcactagcctgaggtaa

SEQ ID NO: 3935 - DNA, 213 bp, synthetic construct
  source 1..213: mol_type = other DNA
  misc_feature 1..213: note = Synthetic
atacgcgcaacattgaaacattatatccacctctcaaacggcggtatggtccgacgcgtcctcctcgagcgcgtggacggcatcgttgagcactcgcgtgcagaccgacgctacttggaggccattcagcgacacctcgaggggtctacgcccgggctgcggcagatgtggcgcttcatctacgacgactcggtccgcactagcctgaggtaa

SEQ ID NO: 3936 - DNA, 213 bp, synthetic construct
  misc_feature 1..213: note = Synthetic
  source 1..213: mol_type = other DNA
atacgcgcaacattgaaacattatatccacctctcaaacggcggtgccgtccgacgcgtcctcctcgagcgcgtggacggcatcgttgagcactcgcgtgcagaccgacgctacttggaggccattcagcgacacctcgaggggtctacgcccgggctgcggcagatgtggcgcttcatctacgacgactcggtccgcactagcctgaggtaa

SEQ ID NO: 3937 - DNA, 36 bp, synthetic construct
  source 1..36: mol_type = other DNA
  misc_feature 1..36: note = Synthetic
atgccgccccctccgactcggtccgcactagcctga

SEQ ID NO: 3938 - DNA, 174 bp, synthetic construct
  misc_feature 1..174: note = Synthetic
  source 1..174: mol_type = other DNA
ctggtcgccgcccttggacgggtgggcctagccgtgggcctgtggggcctgctgtgggtgggtgtggtcgtggtgctggccaatgcctcccccggacgcacgataacggtgggcccgcgggggaacgcgagcaatgccgccccctccgactcggtccgcactagcctgaggtaa

SEQ ID NO: 3939 - DNA, 168 bp, synthetic construct
  source 1..168: mol_type = other DNA
  misc_feature 1..168: note = Synthetic
atggccaccccctcgatgatgccgcaatggtcttacatgcacatcgccgggcaggacgcctcggagtacctgagcccgggcctggtgcagttcgcccgtgccaccgatacctacttcagcctggggaacaagttcagaaacgactcggtccgcactagcctgaggtaa

SEQ ID NO: 3940 - DNA, 153 bp, synthetic construct
  source 1..153: mol_type = other DNA
  misc_feature 1..153: note = Synthetic
atgatgccgcaatggtcttacatgcacatcgccgggcaggacgcctcggagtacctgagcccgggcctggtgcagttcgcccgtgccaccgatacctacttcagcctggggaacaagttcagaaacgactcggtccgcactagcctgaggtaa

SEQ ID NO: 3941 - DNA, 195 bp, synthetic construct
  misc_feature 1..195: note = Synthetic
  source 1..195: mol_type = other DNA
atgaacttctttgcggtagactatccacttgtttctttctcagtcaataaactgagaagaattcaagttgattatgttccttattgcaaggaagatcgtgatccaataagcttatatgattgcttagagtttcctgtgacctctttcactcaagtccctgggatcagatcaaagctccgactcggtccgcactag

SEQ ID NO: 3942 - DNA, 198 bp, synthetic construct
  source 1..198: mol_type = other DNA
  misc_feature 1..198: note = Synthetic
atagccaacttctttgcggtagactatccacttgtttctttctcagtcaataaactgagaagaattcaagttgattatgttccttattgcaaggaagatcgtgatccaataagcttatatgattgcttagagtttcctgtgacctctttcactcaagtccctgggatcagatcaaagctccgactcggtccgcactag

SEQ ID NO: 3943 - DNA, 108 bp, synthetic construct
  source 1..108: mol_type = other DNA
  misc_feature 1..108: note = Synthetic
gtggtcgcctcgctggaccggacgacgttgtacaccccctggccctcggtataccccagctgcccgtggagaatctcgcggaacagcatcgtaccgggggtggggtga

SEQ ID NO: 3944 - DNA, 174 bp, synthetic construct
  source 1..174: mol_type = other DNA
  misc_feature 1..174: note = Synthetic
aagaggatggatcgccctcggacgccgccgccgtcctattcagaggtgctgatgatggacgtcatgtacggacaggtttctccgcacgctagcaatgatacatcgtttgttgaatgcttaccgcctccgcagtcatctcgctcagccgactcggtccgcactagcctgaggtaa

SEQ ID NO: 3945 - DNA, 153 bp, synthetic construct
  misc_feature 1..153: note = Synthetic
  source 1..153: mol_type = other DNA
acgccgccgccgtcctattcagaggtgctgatgatggacgtcatgtacggacaggtttctccgcacgctagcaatgatacatcgtttgttgaatgcttaccgcctccgcagtcatctcgctcagccgactcggtccgcactagcctgaggtaa

SEQ ID NO: 3946 - DNA, 213 bp, synthetic construct
  source 1..213: mol_type = other DNA
  misc_feature 1..213: note = Synthetic
ttggttgttcgggtagcgtgcgtgaggttttatgacggtgcccagcacgtagccgatagcatgacgatccgccgaacttgcaattctcaaacgtatcacgagacgcgattcacaggagcctgcaaccaaaaatctgtctccggtggccagagtaagacatcatctctgtccctgcgacgtataccgttcagcactcgactcggtccgcactag

SEQ ID NO: 3947 - DNA, 36 bp, synthetic construct
  source 1..36: mol_type = other DNA
  misc_feature 1..36: note = Synthetic
gtgacaggattggtcttgtctttagccattccatga

SEQ ID NO: 3948 - DNA, 174 bp, synthetic construct
  source 1..174: mol_type = other DNA
  misc_feature 1..174: note = Synthetic
atgagaacctcaagatcggtgttcttccctgcaaagacatcttcaagtctctgtgcgatctcggctttgagggggcctgacgggatgatagagagaacgtacgtttcgacctcggttagaagactcatctttcaatatctacctgccgactcggtccgcactagcctgaggtaa

SEQ ID NO: 3949 - DNA, 174 bp, synthetic construct
  source 1..174: mol_type = other DNA
  misc_feature 1..174: note = Synthetic
atgagaacctcaagatcggtgttcttccctgcaaagacgccttcaagtctctgtgcgatctcggctttgagggggcctgacgggatgatagagagaacgtacgtttcgacctcggttagaagactcatctttcaatatctacctgccgactcggtccgcactagcctgaggtaa

SEQ ID NO: 3950 - DNA, 168 bp, synthetic construct
  source 1..168: mol_type = other DNA
  misc_feature 1..168: note = Synthetic
atgagttggattgcaggagcaatgcagggcgctggcctgctgggtgatcttgcaggcacaattggacaaatagtgttgcataacaagcagttgaatattatgaattcttttaatcaggctcagatacagttggctaaagacgactcggtccgcactagcctgaggtaa

SEQ ID NO: 3951 - DNA, 204 bp, synthetic construct
  misc_feature 1..204: note = Synthetic
  source 1..204: mol_type = other DNA
aagtgggacatcaggaaggtccattcacagctcacggccagttggattgcaggagcaatgcagggcgctggcctgctgggtgatcttgcaggcacaattggacaaatagtgttgcataacaagcagttgaatattatgaattcttttaatcaggctcagatacagttggctaaagacgactcggtccgcactagcctgaggtaa

SEQ ID NO: 3952 - DNA, 27 bp, synthetic construct
  misc_feature 1..27: note = Synthetic
  source 1..27: mol_type = other DNA
atgcctatgagttggtattttgactag

SEQ ID NO: 3953 - DNA, 15 bp, synthetic construct
  misc_feature 1..15: note = Synthetic
  source 1..15: mol_type = other DNA
atgctaataagatag

SEQ ID NO: 3954 - DNA, 12 bp, synthetic construct
  misc_feature 1..12: note = Synthetic
  source 1..12: mol_type = other DNA
atgcccctatga

SEQ ID NO: 3955 - DNA, 126 bp, synthetic construct
  source 1..126: mol_type = other DNA
  misc_feature 1..126: note = Synthetic
ttgacagttcatcccatgacagactttccctacgaacaaatacaagagacagaaaacattagacataactctatgaacataacaccccgcttcaaacgcgactcggtccgcactagcctgaggtaa

SEQ ID NO: 3956 - DNA, 15 bp, synthetic construct
  source 1..15: mol_type = other DNA
  misc_feature 1..15: note = Synthetic
atggctgatgagtag

SEQ ID NO: 3957 - DNA, 201 bp, synthetic construct
  misc_feature 1..201: note = Synthetic
  source 1..201: mol_type = other DNA
atgtgggacgcacctccaaagaaatgctggaaaaaaaaaggacaatcagtattagtgaaatttgatggcagcagtgacagagacatgatatatacaagctggggattcatttatgtgcaggacactatcactgattcctggcataaggtgccagggcaggtggacgaactgggattatcgactcggtccgcactagcctga

SEQ ID NO: 3958 - DNA, 42 bp, synthetic construct
  source 1..42: mol_type = other DNA
  misc_feature 1..42: note = Synthetic
atgctggaaaaaaaaaggacaatcagtattagtgaaatttga

SEQ ID NO: 3959 - DNA, 87 bp, synthetic construct
  source 1..87: mol_type = other DNA
  misc_feature 1..87: note = Synthetic
gtggcgttgaggagcgcgtggaagatcgccgcctgcagctgtcgggtggcggcctcgctggaccggacgacgttgtacaccccctga

SEQ ID NO: 3960 - DNA, 102 bp, synthetic construct
  misc_feature 1..102: note = Synthetic
  source 1..102: mol_type = other DNA
atttgcttgtgttatcatacaatgcaccagttcgcgtcggtaatggtcggtcaaacgcttttggtgaaatggagcgactcggtccgcactagcctgaggtaa

SEQ ID NO: 3961 - DNA, 219 bp, synthetic construct
  source 1..219: mol_type = other DNA
  misc_feature 1..219: note = Synthetic
ctgcttgtctgtctgccaattatctacgcctccaccaccttcgccgcagtctcccaccttgatacggattgtcttcccgccttgctgacttatctcatcttcacctctgtttgctgcactgccatctgcagcattgccactttttttgtggccattttccaaactgcggactacctatacgttagagtggccgactcggtccgcactagcctgaggtaa

SEQ ID NO: 3962 - DNA, 24 bp, synthetic construct
  source 1..24: mol_type = other DNA
  misc_feature 1..24: note = Synthetic
atgtcacagaattcttcatcatga

SEQ ID NO: 3963 - DNA, 21 bp, synthetic construct
  misc_feature 1..21: note = Synthetic
  source 1..21: mol_type = other DNA
atgttaatctcagcaaattaa

SEQ ID NO: 3964 - DNA, 168 bp, synthetic construct
  misc_feature 1..168: note = Synthetic
  source 1..168: mol_type = other DNA
atggctacaggcagtggcgcaccaatggcagacaataacgagggcgccgacggagtgggtaattcctcgggaaattggcattgcgattccacatggatgggcgacagagtcatcaccaccagcacccgaacctgggccctcgactcggtccgcactagcctgaggtaa

SEQ ID NO: 3965 - DNA, 171 bp, synthetic construct
  misc_feature 1..171: note = Synthetic
  source 1..171: mol_type = other DNA
acggccgctacaggcagtggcgcaccaatggcagacaataacgagggcgccgacggagtgggtaattcctcgggaaattggcattgcgattccacatggatgggcgacagagtcatcaccaccagcacccgaacctgggccctcgactcggtccgcactagcctgaggtaa

SEQ ID NO: 3966 - DNA, 156 bp, synthetic construct
  misc_feature 1..156: note = Synthetic
  source 1..156: mol_type = other DNA
ctgtcaccgaaagcgcgcttgcccgcaaaagcagagggttggctggtgtcactagacagattcatcgtgcagtacctcaacacattgctgattacaatgatggcggcgatatgggctcgcgttttgataacctacctggtgtcgcggcgtcggtag

SEQ ID NO: 3967 - DNA, 195 bp, synthetic construct
  source 1..195: mol_type = other DNA
  misc_feature 1..195: note = Synthetic
atgacatgcatgtcggccgacctggaggtcgtcacgagcacctgggtgctcgttggcggcgtcctggctgctctggccgcgtattgcctgtcaacaggctgcgtggtcatagtgggcaggattgtcttgtccgggaagccggcaattatacctgacagggaggttctctacccgactcggtccgcactagcctga

SEQ ID NO: 3968 - DNA, 126 bp, synthetic construct
  source 1..126: mol_type = other DNA
  misc_feature 1..126: note = Synthetic
atgaagagctatccggttatcgctatttacacacgaatcatcaaactgcaccgatcaaacagcaatcatcaatatggactgcttagataccaggtctctgtaacactccgactcggtccgcactag

SEQ ID NO: 3969 - DNA, 30 bp, synthetic construct
  misc_feature 1..30: note = Synthetic
  source 1..30: mol_type = other DNA
atggactgcttagataccaggtctctgtaa

SEQ ID NO: 3970 - DNA, 42 bp, synthetic construct
  misc_feature 1..42: note = Synthetic
  source 1..42: mol_type = other DNA
atgaagtggaaatctgaatacatgaagcatacttccaagtga

SEQ ID NO: 3971 - DNA, 21 bp, synthetic construct
  source 1..21: mol_type = other DNA
  misc_feature 1..21: note = Synthetic
atgaagcatacttccaagtga

SEQ ID NO: 3972 - DNA, 183 bp, synthetic construct
  source 1..183: mol_type = other DNA
  misc_feature 1..183: note = Synthetic
atagcgaggctcagtatgcgggcgctgcacctatcagacggcaaactttttttcgacaaggagctgacgcagccggtccccgacgacaaccccgcgtacgctgtcctcgcgaagatccggatcccaccgcacctctcggatgtggtcgtgtacgacgactcggtccgcactagcctgaggtaa

SEQ ID NO: 3973 - DNA, 96 bp, synthetic construct
  misc_feature 1..96: note = Synthetic
  source 1..96: mol_type = other DNA
acgacaaccccgcgtacgctgtcctcgcgaagatccggatcccaccgcacctctcggatgtggtcgtgtacgacgactcggtccgcactagcctga

SEQ ID NO: 3974 - DNA, 159 bp, synthetic construct
  misc_feature 1..159: note = Synthetic
  source 1..159: mol_type = other DNA
ctgcacctatcagacggcaaactttttttcgacaaggagctgacgcagccggtccccgacgacaaccccgcgtacgctgtcctcgcgaagatccggatcccaccgcacctctcggatgtggtcgtgtacgacgactcggtccgcactagcctgaggtaa

SEQ ID NO: 3975 - DNA, 123 bp, synthetic construct
  source 1..123: mol_type = other DNA
  misc_feature 1..123: note = Synthetic
ctggccaaaagcccagcgttaatagcgccttctgggatgcaggaaccccacctgccaggtgtgaagtggactaagtggatctccaatttggcctgttctgaactacaccatctactgctgtga

SEQ ID NO: 3976 - DNA, 201 bp, synthetic construct
  misc_feature 1..201: note = Synthetic
  source 1..201: mol_type = other DNA
ttgtccttactgtataaaagtccacgaaaacagctgtgcctcactctcgagatggtacacgtcctggagcgtgctttgctagagcagcagtcctctgcctgcggcctgcccggctcttctacggagaccaggcctagccacccctgccccgaggacccagacgtcagcagactaagactactccgactcggtccgcactag

SEQ ID NO: 3977 - DNA, 21 bp, synthetic construct
  source 1..21: mol_type = other DNA
  misc_feature 1..21: note = Synthetic
atcttcctcacctgcccctga

SEQ ID NO: 3978 - DNA, 96 bp, synthetic construct
  misc_feature 1..96: note = Synthetic
  source 1..96: mol_type = other DNA
ttggttccttacgtcagctacaagattccaccaaaggtacacaccaaactctttatttttctgagtctaccaccgactcggtccgcactagcctga

SEQ ID NO: 3979 - DNA, 180 bp, synthetic construct
  misc_feature 1..180: note = Synthetic
  source 1..180: mol_type = other DNA
attcgatatataatgtctttgaaggactatctgagacagtcaatttctaaagatttggaggtgagacatcgagattctttaaagattagattaggggagagacatccgttgagtgtgcatcagcatatgatcgccgctaggcagatcattaacgactcggtccgcactagcctgaggtaa

SEQ ID NO: 3980 - DNA, 159 bp, synthetic construct
  source 1..159: mol_type = other DNA
  misc_feature 1..159: note = Synthetic
aaggactatctgagacagtcaatttctaaagatttggaggtgagacatcgagattctttaaagattagattaggggagagacatccgttgagtgtgcatcagcatatgatcgccgctaggcagatcattaacgactcggtccgcactagcctgaggtaa

SEQ ID NO: 3981 - DNA, 39 bp, synthetic construct
  misc_feature 1..39: note = Synthetic
  source 1..39: mol_type = other DNA
aaggagccaacgatcttgccaagttccaccagatgctga

SEQ ID NO: 3982 - DNA, 201 bp, synthetic construct
  source 1..201: mol_type = other DNA
  misc_feature 1..201: note = Synthetic
atgcccactgggaacaccacacgcgcggcggagatgacgggcacgctcatactcctgctggcgtgcgtactcaacgcgatggcgcagctcctagcgcgcgtgtgcatggcggcggccacgctcgcgcgcatgctcgcgctctcggtcgccttcttgctggcgctcgcgcgcaccgactcggtccgcactagcctgaggtaa

SEQ ID NO: 3983 - DNA, 201 bp, synthetic construct
  source 1..201: mol_type = other DNA
  misc_feature 1..201: note = Synthetic
atgcccactgggaacaccacacgcgcggcggaggccacgggcacgctcatactcctgctggcgtgcgtactcaacgcgatggcgcagctcctagcgcgcgtgtgcatggcggcggccacgctcgcgcgcatgctcgcgctctcggtcgccttcttgctggcgctcgcgcgcaccgactcggtccgcactagcctgaggtaa

SEQ ID NO: 3984 - DNA, 168 bp, synthetic construct
  source 1..168: mol_type = other DNA
  misc_feature 1..168: note = Synthetic
atggagaattccgcggacataaacgattttctctccggggaggacttcagcagctatgaggagatgggctcggacgagctcacggagcccagcgaggagggctcggcctcgaagccgtcggagtacaaggtggactcgcgcgactcggtccgcactagcctgaggtaa

SEQ ID NO: 3985 - DNA, 150 bp, synthetic construct
  misc_feature 1..150: note = Synthetic
  source 1..150: mol_type = other DNA
ataaacgattttctctccggggaggacttcagcagctatgaggagatgggctcggacgagctcacggagcccagcgaggagggctcggcctcgaagccgtcggagtacaaggtggactcgcgcgactcggtccgcactagcctgaggtaa

SEQ ID NO: 3986 - DNA, 78 bp, synthetic construct
  source 1..78: mol_type = other DNA
  misc_feature 1..78: note = Synthetic
atggctacaggcagtggcgcaccaatggcagacaataacgagggcgccgacggagtgggtcgactcggtccgcactag

SEQ ID NO: 3987 - DNA, 18 bp, synthetic construct
  source 1..18: mol_type = other DNA
  misc_feature 1..18: note = Synthetic
ctgggtcctgctcgataa

SEQ ID NO: 3988 - DNA, 198 bp, synthetic construct
  source 1..198: mol_type = other DNA
  misc_feature 1..198: note = Synthetic
atgcccaacagtacagtgtatccccgaaacaaaaccgccgacccaggcaacatgctcatccaaatctcgcctaacatcaccttcagtgtcgtctacaacgagataaacagtgggtatgcttttacgtttaaatggtcagccgaaccgggaaaaccttttcacccacccaccgctgtatttcgactcggtccgcactag

SEQ ID NO: 3989 - DNA, 72 bp, synthetic construct
  misc_feature 1..72: note = Synthetic
  source 1..72: mol_type = other DNA
atggtcagccgaaccgggaaaaccttttcacccacccaccgctgtatttcgactcggtccgcactagcctga

SEQ ID NO: 3990 - DNA, 63 bp, synthetic construct
  misc_feature 1..63: note = Synthetic
  source 1..63: mol_type = other DNA
aagatgaagaccgccgtagggctttgtatgacgaagtcaaaaaatggtctagatcgggcttag

SEQ ID NO: 3991 - DNA, 168 bp, synthetic construct
  misc_feature 1..168: note = Synthetic
  source 1..168: mol_type = other DNA
atggacaaactgtacaccggcgtcttcggctccttcctctccaactcggacgaggactttgaggagttcctgaacatcgtgcgcaccgtaatgactgaaaagccggcgtgcgataggcccaagggcgtcccctggaccaccgactcggtccgcactagcctgaggtaa

SEQ ID NO: 3992 - DNA, 159 bp, synthetic construct
  misc_feature 1..159: note = Synthetic
  source 1..159: mol_type = other DNA
ctgtacaccggcgtcttcggctccttcctctccaactcggacgaggactttgaggagttcctgaacatcgtgcgcaccgtaatgactgaaaagccggcgtgcgataggcccaagggcgtcccctggaccaccgactcggtccgcactagcctgaggtaa

SEQ ID NO: 3993 - DNA, 39 bp, synthetic construct
  misc_feature 1..39: note = Synthetic
  source 1..39: mol_type = other DNA
atggcgcaattaggggggcgagattggggtggatcatag

SEQ ID NO: 3994 - DNA, 126 bp, synthetic construct
  source 1..126: mol_type = other DNA
  misc_feature 1..126: note = Synthetic
ttggaggtgagacatcgagattctttaaagattagattaggggagagacatccattgagtgtgcatcagcatatgatcgccgctaggcagatcatcaacgactcggtccgcactagcctgaggtaa

SEQ ID NO: 3995 - DNA, 159 bp, synthetic construct
  misc_feature 1..159: note = Synthetic
  source 1..159: mol_type = other DNA
aaggactatctgagacagtccatttctaaagatttggaggtgagacatcgagattctttaaagattagattaggggagagacatccattgagtgtgcatcagcatatgatcgccgctaggcagatcatcaacgactcggtccgcactagcctgaggtaa

SEQ ID NO: 3996 - DNA, 177 bp, synthetic construct
  misc_feature 1..177: note = Synthetic
  source 1..177: mol_type = other DNA
gtgctcgacgagaagtttaacctgccctgcccctcgtgccagagcaagaacaccatgccgatgatgatccagacgcgctcggcggacgagccgcccttgatcaagtacgcctgcaaaaattgccaaaagagtttcaatcctcccaagttcgactcggtccgcactagcctgaggtaa

SEQ ID NO: 3997 - DNA, 192 bp, synthetic construct
  misc_feature 1..192: note = Synthetic
  source 1..192: mol_type = other DNA
ttggctactatatccataatagacatggagacacccttgaaggcgccagagagctcattaaaaccctacaacgagccctcttcgtgcacttcagagcgggatgtaaccgctcaagaattggctaaacaaggagaagaactccttgcccagctgcaccgacccctcgactcggtccgcactagcctgaggtaa

SEQ ID NO: 3998 - DNA, 177 bp, synthetic construct
  source 1..177: mol_type = other DNA
  misc_feature 1..177: note = Synthetic
ataatagacgccgagacacccttgaaggcgccagagagctcattaaaaccctacaacgagccctcttcgtgcacttcagagcgggatgtaaccgctcaagaattggctaaacaaggagaagaactccttgcccagctgcaccgacccctcgactcggtccgcactagcctgaggtaa

SEQ ID NO: 3999 - DNA, 90 bp, synthetic construct
  misc_feature 1..90: note = Synthetic
  source 1..90: mol_type = other DNA
atgtttggtgtcgcaagtttggcaaatttgcttctcactttacattacgtagtcacgatatttcccatagtaataattttggtgttgtaa

SEQ ID NO: 4000 - DNA, 201 bp, synthetic construct
  source 1..201: mol_type = other DNA
  misc_feature 1..201: note = Synthetic
ctggcgtttgtactccagcgtctcatctttatgcgccagcagggatttctcctgtgcagacagctggcgacgttgcgccgcctcctccagtaccgcgaactgactctccgccttccacaaatcccggcgctgctggctgattttctcatttgctccggcatgcttctccagcgtccggcgactcggtccgcactagcctga

SEQ ID NO: 4001 - DNA, 21 bp, synthetic construct
  source 1..21: mol_type = other DNA
  misc_feature 1..21: note = Synthetic
atacgcgcggccgtggtgtag

SEQ ID NO: 4002 - DNA, 168 bp, synthetic construct
  source 1..168: mol_type = other DNA
  misc_feature 1..168: note = Synthetic
atggacgcgccaagtctcgactgcatgctcgccgcactcgcggctaaggcggcctcggtggaccgaggcgctcccgaggacgaggtgcaccacgaagtggagctcgtgctcgtggacccgccgctgtccaccctggccgccgactcggtccgcactagcctgaggtaa

SEQ ID NO: 4003 - DNA, 57 bp, synthetic construct
  source 1..57: mol_type = other DNA
  misc_feature 1..57: note = Synthetic
atgtcacggaggttcaagttacctttagccggaagtgctggcattttgtccaattga

SEQ ID NO: 4004 - DNA, 48 bp, synthetic construct
  source 1..48: mol_type = other DNA
  misc_feature 1..48: note = Synthetic
atgcctgtcaaccatagtttcgactcggtccgcactagcctgaggtaa

SEQ ID NO: 4005 - DNA, 222 bp, synthetic construct
  misc_feature 1..222: note = Synthetic
  source 1..222: mol_type = other DNA
ctgtttgagagatccaaccgacacaaaagagaaccggtgtcgttaaccctggccctattattgggtggactaaccatggggggaattgccgctggaataggaacagggactactgctctaatggccactcagcaattccagcagctccaagccgcagtacaggatgatctcagggaggttgaaaaatcaatctctaacccgactcggtccgcactagcctga

SEQ ID NO: 4006 - DNA, 222 bp, synthetic construct
  misc_feature 1..222: note = Synthetic
  source 1..222: mol_type = other DNA
ctgtttgagagatccaaccgacacaaaagagaaccggtgtcgttaaccctggccctattattgggtggactaaccatggggggaattgccgctggagccggaacagggactactgctctaatggccactcagcaattccagcagctccaagccgcagtacaggatgatctcagggaggttgaaaaatcaatctctaacccgactcggtccgcactagcctga

SEQ ID NO: 4007 - DNA, 69 bp, synthetic construct
  misc_feature 1..69: note = Synthetic
  source 1..69: mol_type = other DNA
atgtcgaatctcaagcacaaaaccaggaatcctattcataacagatggcaccgactcggtccgcactag

SEQ ID NO: 4008 - DNA, 201 bp, synthetic construct
  source 1..201: mol_type = other DNA
  misc_feature 1..201: note = Synthetic
ctggcgtttgtactccagcgtctcatctttatgcgccagcagggatttctcctgtgcagacagctggcgacgttgcgccgcctcctccagtaccgcgaagccactctccgccttccacaaatcccggcgctgctggctgattttctcatttgctccggcatgcttctccagcgtccggcgactcggtccgcactagcctga

SEQ ID NO: 4009 - DNA, 15 bp, synthetic construct
  misc_feature 1..15: note = Synthetic
  source 1..15: mol_type = other DNA
atgaccaggatgtag

SEQ ID NO: 4010 - DNA, 171 bp, synthetic construct
  source 1..171: mol_type = other DNA
  misc_feature 1..171: note = Synthetic
atcatgattggtaaagaggtcaccgtgcaagatattattctggagctcagtgaggtgcagcccgaagtgctaccagttgacctgttttgtgaagaggaattaccaaacgagcaggaaacggaggaggagcctgacaacgaaagcgactcggtccgcactagcctgaggtaa

SEQ ID NO: 4011 - DNA, 171 bp, synthetic construct
  misc_feature 1..171: note = Synthetic
  source 1..171: mol_type = other DNA
atcgccattggtaaagaggtcaccgtgcaagatattattctggagctcagtgaggtgcagcccgaagtgctaccagttgacctgttttgtgaagaggaattaccaaacgagcaggaaacggaggaggagcctgacaacgaaagcgactcggtccgcactagcctgaggtaa

SEQ ID NO: 4012 - DNA, 168 bp, synthetic construct
  misc_feature 1..168: note = Synthetic
  source 1..168: mol_type = other DNA
atccgctggatgaccaggatgccattgctgtggaagctgcctgcactaatgttccggcgttatttcttgatgtctctgaccagacacccatcaacagtattattttctcccatgaagacggtacgcgactgggcgtggagcgactcggtccgcactagcctgaggtaa

SEQ ID NO: 4013 - DNA, 168 bp, synthetic construct
  source 1..168: mol_type = other DNA
  misc_feature 1..168: note = Synthetic
atccgctggatgaccaggatgccattgctgtggaagctgcctgcactaatgttccggcgttatttcttgatgtctctgaccagacacccatcaacagtattattttctcccgccaagacggtacgcgactgggcgtggagcgactcggtccgcactagcctgaggtaa

SEQ ID NO: 4014 - DNA, 51 bp, synthetic construct
  misc_feature 1..51: note = Synthetic
  source 1..51: mol_type = other DNA
atgtctaaaagcacttcttgtcccactttaacaactgagaagtcctactag

SEQ ID NO: 4015 - DNA, 30 bp, synthetic construct
  misc_feature 1..30: note = Synthetic
  source 1..30: mol_type = other DNA
attttcatcaaagtcaacatcacaacctaa

SEQ ID NO: 4016 - DNA, 201 bp, synthetic construct
  source 1..201: mol_type = other DNA
  misc_feature 1..201: note = Synthetic
ataacactccaatcgaccctcttgcgtaccataatgttttcggagttgcctccttccgtaccgacggcattgcttcaatggggttggggattgcatcgtggaccgtgttcgatcccaaattttaaacaggtagccagccaacacagtgttcagaacgattttacagaaaatagcgactcggtccgcactagcctgaggtaa

SEQ ID NO: 4017 - DNA, 201 bp, synthetic construct
  source 1..201: mol_type = other DNA
  misc_feature 1..201: note = Synthetic
ataacactccaatcgaccctcttgcgtaccatagccttttcggagttgcctccttccgtaccgacggcattgcttcaatggggttggggattgcatcgtggaccgtgttcgatcccaaattttaaacaggtagccagccaacacagtgttcagaacgattttacagaaaatagcgactcggtccgcactagcctgaggtaa

SEQ ID NO: 4018 - DNA, 180 bp, synthetic construct
  misc_feature 1..180: note = Synthetic
  source 1..180: mol_type = other DNA
atggataaaccgaaccacgaagggtctatgtcgtaccgggtggtcgcaacagaaagaccatcgctaggtccctttcgcaaacaccaaatccggacttttatatcaatacagcgggaggccctcagcgggtatgggttcgctccttggctcctccaaacctcgcgactcggtccgcactag

SEQ ID NO: 4019 - DNA, 75 bp, synthetic construct
  source 1..75: mol_type = other DNA
  misc_feature 1..75: note = Synthetic
aggccctcagcgggtatgggttcgctccttggctcctccaaacctcgcgactcggtccgcactagcctgaggtaa

SEQ ID NO: 4020 - DNA, 213 bp, synthetic construct
  source 1..213: mol_type = other DNA
  misc_feature 1..213: note = Synthetic
atagttgacatcttgcgacagtatttcgaaaaggagcggtttctgttcttgaactatcttattaatagcaataccacgctgagttactttggaagcgttcagcgtattggtcgttgcgcgacggaggacattaaatcgggttttctgcagtatcgtggaattaccctgtcagtgataaagctagagaacacgactcggtccgcactagcctga

SEQ ID NO: 4021 - DNA, 21 bp, synthetic construct
  source 1..21: mol_type = other DNA
  misc_feature 1..21: note = Synthetic
ttgcgcgacggaggacattaa

SEQ ID NO: 4022 - DNA, 87 bp, synthetic construct
  source 1..87: mol_type = other DNA
  misc_feature 1..87: note = Synthetic
atggtctcgttgtcggggaacgcgaacacgcccggaagattcttcatcgtaataaatggacaggtacacggatttagtaatcaataa

SEQ ID NO: 4023 - DNA, 87 bp, synthetic construct
  misc_feature 1..87: note = Synthetic
  source 1..87: mol_type = other DNA
atggtctcgttgtcggggaacgcgaacacgcccggaagattcttcatcgtaataagccgacaggtacacggatttagtaatcaataa

SEQ ID NO: 4024 - DNA, 219 bp, synthetic construct
  source 1..219: mol_type = other DNA
  misc_feature 1..219: note = Synthetic
atccccaacaagaaaatcacggccagcctgcgcgtcgagcagaactggttctatgacttccactttttcgtgcacacactactcaaggtctaccccgagctcgagcgcgacgcagcctggagcaaggcgctgggcgagttcctggtctgctgcaaccgcaacacctgcgagaagttccgcctgcgcgtacgccgcccgactcggtccgcactagcctga

SEQ ID NO: 4025 - DNA, 15 bp, synthetic construct
  misc_feature 1..15: note = Synthetic
  source 1..15: mol_type = other DNA
atgagcaagtactag

SEQ ID NO: 4026 - DNA, 54 bp, synthetic construct
  source 1..54: mol_type = other DNA
  misc_feature 1..54: note = Synthetic
atgttcttgattgataaatccaagtgtgagaaccctggtatccgactcgcgtag

SEQ ID NO: 4027 - DNA, 18 bp, synthetic construct
  misc_feature 1..18: note = Synthetic
  source 1..18: mol_type = other DNA
atgcagcattcgaggtaa

SEQ ID NO: 4028 - DNA, 57 bp, synthetic construct
  source 1..57: mol_type = other DNA
  misc_feature 1..57: note = Synthetic
atggctcagctcacgtcctgttcaaccaccgactcggtccgcactagcctgaggtaa

SEQ ID NO: 4029 - DNA, 123 bp, synthetic construct
  source 1..123: mol_type = other DNA
  misc_feature 1..123: note = Synthetic
atgagtcttacgagatgggtgaagcacgcttccgcaagatgtttgagcgtcaacttaaagctggtgaggttgcggataacgctgccgccaagcctctcatcactaccctactccctaagatga

SEQ ID NO: 4030 - DNA, 129 bp, synthetic construct
  misc_feature 1..129: note = Synthetic
  source 1..129: mol_type = other DNA
ttgagcatgagtcttacgagatgggtgaagcacgcttccgcaagatgtttgagcgtcaacttaaagctggtgaggttgcggataacgctgccgccaagcctctcatcactaccctactccctaagatga

SEQ ID NO: 4031 - DNA, 201 bp, synthetic construct
  misc_feature 1..201: note = Synthetic
  source 1..201: mol_type = other DNA
gtgttcgacggtgagctgagttttgccctgaaactggcgcgtgagatggggcgacccgactggcgtgccatgcttgccgggatgtcatccacggagtatgccgactggcaccgcttttacagtacccattattttcatgatgttctgctggatatgcacttttccgggctgacgtacaccgtgcgactcggtccgcactag

SEQ ID NO: 4032 - DNA, 201 bp, synthetic construct
  misc_feature 1..201: note = Synthetic
  source 1..201: mol_type = other DNA
gtgttcgacggtgagctgagttttgccctgaaagccgcgcgtgagatggggcgacccgactggcgtgccatgcttgccgggatgtcatccacggagtatgccgactggcaccgcttttacagtacccattattttcatgatgttctgctggatatgcacttttccgggctgacgtacaccgtgcgactcggtccgcactag

SEQ ID NO: 4033 - DNA, 222 bp, synthetic construct
  misc_feature 1..222: note = Synthetic
  source 1..222: mol_type = other DNA
ctgtttgaattcacttccggcgtgaatgttactgaatccccgatcatctatcgcgacgaaagtatgcgtaccgcctgctctcccgatggtttatgcagtgacggcaacggccttgaactgaaatgcccgtttacctcccgggatttcatgaagttccggctcggtggtttcgaggccataaagtcagcttacatggccccgactcggtccgcactagcctga

SEQ ID NO: 4034 - DNA, 96 bp, synthetic construct
  source 1..96: mol_type = other DNA
  misc_feature 1..96: note = Synthetic
atgttactgaatccccgatcatctatcgcgacgaaagtatgcgtaccgcctgctctcccgatggtttatgcagtgacggcaacggccttgaactga

SEQ ID NO: 4035 - DNA, 96 bp, synthetic construct
  misc_feature 1..96: note = Synthetic
  source 1..96: mol_type = other DNA
atgttactgaatccccgatcatctatcgcgacgaaagtgcccgtaccgcctgctctcccgatggtttatgcagtgacggcaacggccttgaactga

SEQ ID NO: 4036 - DNA, 222 bp, synthetic construct
  misc_feature 1..222: note = Synthetic
  source 1..222: mol_type = other DNA
ctgtttgaattcacttccggcgtgagccttactgaatccccgatcatctatcgcgacgaaagtatgcgtaccgcctgctctcccgatggtttatgcagtgacggcaacggccttgaactgaaatgcccgtttacctcccgggatttcatgaagttccggctcggtggtttcgaggccataaagtcagcttacatggccccgactcggtccgcactagcctga

SEQ ID NO: 4037 - DNA, 90 bp, synthetic construct
  misc_feature 1..90: note = Synthetic
  source 1..90: mol_type = other DNA
ctgaatccccgatcatctatcgcgacgaaagtatgcgtaccgcctgctctcccgatggtttatgcagtgacggcaacggccttgaactga

SEQ ID NO: 4038 - DNA, 222 bp, synthetic construct
  misc_feature 1..222: note = Synthetic
  source 1..222: mol_type = other DNA
ctgtttgagagatccaaccgacacaaaagagaaccggtgtcgttaaccctggccctattattgggtggactaaccatggggggaattgccgctggaataggaacagggactactgctctaatggccactcagcaattccagcagctccaagccgcagtacaggatgatctcagggagggccaaaaatcaatctctaacccgactcggtccgcactagcctga

SEQ ID NO: 4039 - DNA, 39 bp, synthetic construct
  misc_feature 1..39: note = Synthetic
  source 1..39: mol_type = other DNA
atgatgatgcagcagcaacggcaacagcagcgtcggtaa

SEQ ID NO: 4040 - DNA, 99 bp, synthetic construct
  source 1..99: mol_type = other DNA
  misc_feature 1..99: note = Synthetic
atgagaaacgcggacatggtaatcatagatagtagtgaaataaccatagatattctaatacatagaccaatcacgcgtttgcgtttattctttccctga

SEQ ID NO: 4041 - DNA, 27 bp, synthetic construct
  misc_feature 1..27: note = Synthetic
  source 1..27: mol_type = other DNA
atgggaattctggacgggcccagatag

SEQ ID NO: 4042 - DNA, 147 bp, synthetic construct
  source 1..147: mol_type = other DNA
  misc_feature 1..147: note = Synthetic
ttgcaatctcttggtgggctcactgacgttgcgtccaccatttctggcatggtttatcaacatagacatcttgaccaactgaaaagacagaatgatctacaagaacagtggatggcccgcgactcggtccgcactagcctgaggtaa

SEQ ID NO: 4043 - DNA, 159 bp, synthetic construct
  source 1..159: mol_type = other DNA
  misc_feature 1..159: note = Synthetic
ttggtaggcactttgcaatctcttggtgggctcactgacgttgcgtccaccatttctggcatggtttatcaacatagacatcttgaccaactgaaaagacagaatgatctacaagaacagtggatggcccgcgactcggtccgcactagcctgaggtaa

SEQ ID NO: 4044 - DNA, 30 bp, synthetic construct
  misc_feature 1..30: note = Synthetic
  source 1..30: mol_type = other DNA
atgatagtacagacctacgtgaccatatag

SEQ ID NO: 4045 - DNA, 201 bp, synthetic construct
  source 1..201: mol_type = other DNA
  misc_feature 1..201: note = Synthetic
gtgttttatttcaacgatactgtgagtttgagactcttgctaccgttgctgtataaagccggatttaaagtcgctatgtataaggttttgtgtaattctgagatgtataaacaccttgatttatcaaatccgttaccgttgatcgggaaatgttcggatggtgtggttatgcacgactcggtccgcactagcctgaggtaa

SEQ ID NO: 4046 - DNA, 66 bp, synthetic construct
  source 1..66: mol_type = other DNA
  misc_feature 1..66: note = Synthetic
atgggttacgaatacttcaccagccgcaccgaactggtgaatgctggcaccatttccaccacttaa

SEQ ID NO: 4047 - DNA, 102 bp, synthetic construct
  source 1..102: mol_type = other DNA
  misc_feature 1..102: note = Synthetic
atgcagctaatcactgatatggcggaatggtctaaaaagccattccgccctgatatgtcgctaaccggctggcttgcttttgtgcgactcggtccgcactag

SEQ ID NO: 4048 - DNA, 93 bp, synthetic construct
  misc_feature 1..93: note = Synthetic
  source 1..93: mol_type = other DNA
acggtcaatcaaagcccccgtttgctgatgggttacgaatacttcaccagccgcaccgaactggtgaatgctggcaccatttccaccacttaa

SEQ ID NO: 4049 - DNA, 168 bp, synthetic construct
  misc_feature 1..168: note = Synthetic
  source 1..168: mol_type = other DNA
atgagcaaggaaattcccacgccctacatgtggagttaccagccacaaatgggacttgcggctggagctgcccaagactactcaacccgaataaactacatgagcgcgggaccccacatgatatcccgggtcaacggaatcgactcggtccgcactagcctgaggtaa

SEQ ID NO: 4050 - DNA, 171 bp, synthetic construct
  misc_feature 1..171: note = Synthetic
  source 1..171: mol_type = other DNA
attgccagcaaggaaattcccacgccctacatgtggagttaccagccacaaatgggacttgcggctggagctgcccaagactactcaacccgaataaactacatgagcgcgggaccccacatgatatcccgggtcaacggaatcgactcggtccgcactagcctgaggtaa

SEQ ID NO: 4051 - DNA, 15 bp, synthetic construct
  misc_feature 1..15: note = Synthetic
  source 1..15: mol_type = other DNA
atgcccgatatatag

SEQ ID NO: 4052 - DNA, 69 bp, synthetic construct
  source 1..69: mol_type = other DNA
  misc_feature 1..69: note = Synthetic
ctgggtctgtcaccccatccatcaatcatcaccatcgttggcgaagaccctatggtcatctgggtgtga

SEQ ID NO: 4053 - DNA, 39 bp, synthetic construct
  source 1..39: mol_type = other DNA
  misc_feature 1..39: note = Synthetic
atgcagccaactacaacgactcggtccgcactagcctga

SEQ ID NO: 4054 - DNA, 117 bp, synthetic construct
  misc_feature 1..117: note = Synthetic
  source 1..117: mol_type = other DNA
ctgcgagagcgtttggaaaactcgggtacgtctaaattcaccccagtgcgatggatacgccgccgatgcagcgctctacaccccaacgcgcggggtcgcctgatactttggagttaa

SEQ ID NO: 4055 - DNA, 168 bp, synthetic construct
  source 1..168: mol_type = other DNA
  misc_feature 1..168: note = Synthetic
atggatacgccgccgatgcagcgctctacaccccaacgcgcggggtcgcctgatactttggagttaatggacctgttggacgcggccgcggcggccgccgaacacagggcccgggtggtcacctcgagtcagcctgacgacgactcggtccgcactagcctgaggtaa

SEQ ID NO: 4056 - DNA, 117 bp, synthetic construct
  source 1..117: mol_type = other DNA
  misc_feature 1..117: note = Synthetic
ctgcgagagcgtttggaaaactcgggtacgtctaaattcaccccagtgcggccgatacgccgccgatgcagcgctctacaccccaacgcgcggggtcgcctgatactttggagttaa

SEQ ID NO: 4057 - DNA, 153 bp, synthetic construct
  misc_feature 1..153: note = Synthetic
  source 1..153: mol_type = other DNA
atgcagcgctctacaccccaacgcgcggggtcgcctgatactttggagttaatggacctgttggacgcggccgcggcggccgccgaacacagggcccgggtggtcacctcgagtcagcctgacgacgactcggtccgcactagcctgaggtaa

SEQ ID NO: 4058 - DNA, 39 bp, synthetic construct
  misc_feature 1..39: note = Synthetic
  source 1..39: mol_type = other DNA
atcatcataggaatcatcaaaggcgcactacgcaaataa

SEQ ID NO: 4059 - DNA, 117 bp, synthetic construct
  source 1..117: mol_type = other DNA
  misc_feature 1..117: note = Synthetic
aggggcactacgcaaatgatgaagcactacgttatgccaatccacacgtccaacggggcaaccgtatgtacacctgatgggttcgcaatgaaacaacgacgactcggtccgcactag

SEQ ID NO: 4060 - DNA, 84 bp, synthetic construct
  source 1..84: mol_type = other DNA
  misc_feature 1..84: note = Synthetic
atgccaatccacacgtccaacggggcaaccgtatgtacacctgatgggttcgcaatgaaacaacgacgactcggtccgcactag

SEQ ID NO: 4061 - DNA, 36 bp, synthetic construct
  source 1..36: mol_type = other DNA
  misc_feature 1..36: note = Synthetic
atcgccggaatcatcaaaggcgcactacgcaaataa

SEQ ID NO: 4062 - DNA, 168 bp, synthetic construct
  source 1..168: mol_type = other DNA
  misc_feature 1..168: note = Synthetic
atggcaaacagagacgacattgacgcctccgccgttatggctgcctacctcgcgagagagtacgcggaggctgtagaggaacagctgacgctgcgcgagcgcgatgcgctcgaagcccttcgcgtttccggcgaggaggtcgactcggtccgcactagcctgaggtaa

SEQ ID NO: 4063 - DNA, 105 bp, synthetic construct
  misc_feature 1..105: note = Synthetic
  source 1..105: mol_type = other DNA
ctgtccccaccctacctctacacactacagccgcaaacagagacgacattgacgcctccgccgttatggctgcctacctcgcgagagagtacgcggaggctgtag

SEQ ID NO: 4064 - DNA, 150 bp, synthetic construct
  source 1..150: mol_type = other DNA
  misc_feature 1..150: note = Synthetic
attgacgcctccgccgttatggctgcctacctcgcgagagagtacgcggaggctgtagaggaacagctgacgctgcgcgagcgcgatgcgctcgaagcccttcgcgtttccggcgaggaggtcgactcggtccgcactagcctgaggtaa

SEQ ID NO: 4065 - DNA, 168 bp, synthetic construct
  source 1..168: mol_type = other DNA
  misc_feature 1..168: note = Synthetic
atggattacgtgtctctgcttaatcaaatttggcagaagtaccttaattcaccgtatactacttgtttgtatatccctaaacccacagctaagtatacacctttagttggcacttcattgcaccctgtgctgtggaactgcgactcggtccgcactagcctgaggtaa

SEQ ID NO: 4066 - DNA, 15 bp, synthetic construct
  misc_feature 1..15: note = Synthetic
  source 1..15: mol_type = other DNA
atgctgccctgctga

SEQ ID NO: 4067 - DNA, 126 bp, synthetic construct
  source 1..126: mol_type = other DNA
  misc_feature 1..126: note = Synthetic
atgccggagcaaatgagaaaatcagccagcagcgccgggatttgtggaaggcggagagtcagttcgcggtactggaggaggcggcgcaacgtcgccagcgactcggtccgcactagcctgaggtaa

SEQ ID NO: 4068 - DNA, 48 bp, synthetic construct
  misc_feature 1..48: note = Synthetic
  source 1..48: mol_type = other DNA
acgcagatcagcgaaacccattattcgactcggtccgcactagcctga

SEQ ID NO: 4069 - DNA, 213 bp, synthetic construct
  source 1..213: mol_type = other DNA
  misc_feature 1..213: note = Synthetic
atgaaatcgaactcgtgtttaaacagcgatagcgaaatacaatactcgtgctctgagggcacggatagcttcgtaagcagaccatgccagttcttacaaaacgctctgcctcttcactgttcatccaaccaagctctattagagagtcggtctaaaaccggcaatacgcagatcagcgaaacccattattcgactcggtccgcactagcctga

SEQ ID NO: 4070 - DNA, 63 bp, synthetic construct
  source 1..63: mol_type = other DNA
  misc_feature 1..63: note = Synthetic
atgaagcacaattaccggcaatccacatttctagagccgcagatagaggggggccggcactaa

SEQ ID NO: 4071 - DNA, 48 bp, synthetic construct
  source 1..48: mol_type = other DNA
  misc_feature 1..48: note = Synthetic
atgtcagaaagggtaagagaacgaatagagcgactcggtccgcactag

SEQ ID NO: 4072 - DNA, 225 bp, synthetic construct
  source 1..225: mol_type = other DNA
  misc_feature 1..225: note = Synthetic
atgcgcatacccattccaggatacagaggacgaccccgccggaggaaagggctgaccgggaacggtcgatttcggcggcgtagtatgcgcagacgcatgaagggtggggtgctgcccttcctaattccacttattgctgcggccattggagccgttcccggaattgcctcagtagccttgcaggcttctcgaaaaaacgactcggtccgcactagcctgaggtaa

SEQ ID NO: 4073 - DNA, 21 bp, synthetic construct
  source 1..21: mol_type = other DNA
  misc_feature 1..21: note = Synthetic
atgggaaatagtggtgtctag

SEQ ID NO: 4074 - DNA, 48 bp, synthetic construct
  source 1..48: mol_type = other DNA
  misc_feature 1..48: note = Synthetic
acgggaccaagcaccgcaaagcaaccgactcggtccgcactagcctga

SEQ ID NO: 4075 - DNA, 33 bp, synthetic construct
  misc_feature 1..33: note = Synthetic
  source 1..33: mol_type = other DNA
ttgaattttgtaagtaaattcgtcgaaaagtaa

SEQ ID NO: 4076 - DNA, 42 bp, synthetic construct
  source 1..42: mol_type = other DNA
  misc_feature 1..42: note = Synthetic
atgaagttctatttaggttggaaaatcacgctgaaactctaa

SEQ ID NO: 4077 - DNA, 87 bp, synthetic construct
  source 1..87: mol_type = other DNA
  misc_feature 1..87: note = Synthetic
atgtctccgattccagaattgtacaaactttcgcgtagtagtaagatcttgattccgtgtgacagcattgatgtacatacgtgttga

SEQ ID NO: 4078 - DNA, 87 bp, synthetic construct
  source 1..87: mol_type = other DNA
  misc_feature 1..87: note = Synthetic
atgtctccgattccagaattgtataaactctcgcgtagtagtaagatcttgattccgtgtgacagcattgatgtacagacatgttga

SEQ ID NO: 4079 - DNA, 78 bp, synthetic construct
  misc_feature 1..78: note = Synthetic
  source 1..78: mol_type = other DNA
atgactctaaatacggaccgagagccggaaaacaatgcatgtcgaacagcttttcatttctccacactgtttacttaa

SEQ ID NO: 4080 - DNA, 222 bp, synthetic construct
  source 1..222: mol_type = other DNA
  misc_feature 1..222: note = Synthetic
acggcgtggagcaaaacgcctccccctgagccgctttcctaccaacacaacggcatgcctctgcgggcatcggaacacgcctaccggcccctgggccccgggacaccccccatgcgggctcggctccccgccgcggcctgggttggcgtcgggaccatcatcgggggagttgtgatcattgccgcgttggtcctcgactcggtccgcactagcctgaggtaa

SEQ ID NO: 4081 - DNA, 222 bp, synthetic construct
  misc_feature 1..222: note = Synthetic
  source 1..222: mol_type = other DNA
acggcgtggagcaaaacgcctccccctgagccgctttcctaccaacacaacggcgcccctctgcgggcatcggaacacgcctaccggcccctgggccccgggacaccccccatgcgggctcggctccccgccgcggcctgggttggcgtcgggaccatcatcgggggagttgtgatcattgccgcgttggtcctcgactcggtccgcactagcctgaggtaa

SEQ ID NO: 4082 - DNA, 123 bp, synthetic construct
  source 1..123: mol_type = other DNA
  misc_feature 1..123: note = Synthetic
acgaagataatcttgcagttggcctggttgagaaagcccataatcgtctggaccgcatccgggcgaataaagttggcctcgtcgacaaagagcaggttaaagtcctggcctcggattccctag

SEQ ID NO: 4083 - DNA, 39 bp, synthetic construct
  source 1..39: mol_type = other DNA
  misc_feature 1..39: note = Synthetic
atgcacttccccaataagatcggcgctgggaataattga

SEQ ID NO: 4084 - DNA, 21 bp, synthetic construct
  source 1..21: mol_type = other DNA
  misc_feature 1..21: note = Synthetic
attagtcgaacaaatctctag

SEQ ID NO: 4085 - DNA, 90 bp, synthetic construct
  misc_feature 1..90: note = Synthetic
  source 1..90: mol_type = other DNA
attggtcggtgtttggtcttgcttggtgactttgataataacatcgattcccatatgatgtttgttttcttcttccgtacacgaggatga

SEQ ID NO: 4086 - DNA, 33 bp, synthetic construct
  misc_feature 1..33: note = Synthetic
  source 1..33: mol_type = other DNA
ctgacaaattcaatcctgtgtcgggtggaatga

SEQ ID NO: 4087 - DNA, 195 bp, synthetic construct
  misc_feature 1..195: note = Synthetic
  source 1..195: mol_type = other DNA
atgaataacatgtcttctgctgcgcccgccggttcgcgaccatgcgccctcggcctattttgctgttgctcctcatgtttctgcctatgctgcccgcgccaccgcccggtcagccgtctggccgccgccgtgggcggcgcagcggcggttccggcggtggtttctggcgactcggtccgcactagcctgaggtaa

SEQ ID NO: 4088 - DNA, 24 bp, synthetic construct
  source 1..24: mol_type = other DNA
  misc_feature 1..24: note = Synthetic
acggccaccgattcttccatttag

SEQ ID NO: 4089 - DNA, 168 bp, synthetic construct
  misc_feature 1..168: note = Synthetic
  source 1..168: mol_type = other DNA
atggatcttagaagaaggtttgcctccgacttggccaagaccaaactggtgctatcggagaccagctccagtctgttcaccaagtgtcctcaagcagtcattcccacaccggagcagccatgtcctcccgatgaggaggtcgactcggtccgcactagcctgaggtaa

SEQ ID NO: 4090 - DNA, 138 bp, synthetic construct
  misc_feature 1..138: note = Synthetic
  source 1..138: mol_type = other DNA
ttggccaagaccaaactggtgctatcggagaccagctccagtctgttcaccaagtgtcctcaagcagtcattcccacaccggagcagccatgtcctcccgatgaggaggtcgactcggtccgcactagcctgaggtaa

SEQ ID NO: 4091 - DNA, 117 bp, synthetic construct
  misc_feature 1..117: note = Synthetic
  source 1..117: mol_type = other DNA
atattacacataaccacaaaactgcttagaaacgagaatctgactagctttaaacaagaggaattacttttaattcaacacgtatgtaccgactcggtccgcactagcctgaggtaa

SEQ ID NO: 4092 - DNA, 147 bp, synthetic construct
  misc_feature 1..147: note = Synthetic
  source 1..147: mol_type = other DNA
ataaaattgaacgacgccgtccctaatttaatattacacataaccacaaaactgcttagaaacgagaatctgactagctttaaacaagaggaattacttttaattcaacacgtatgtaccgactcggtccgcactagcctgaggtaa

SEQ ID NO: 4093 - DNA, 168 bp, synthetic construct
  source 1..168: mol_type = other DNA
  misc_feature 1..168: note = Synthetic
atgacccagataggacagtacataaaactgaacgacgccgtccctaatttaatattacacataaccacaaaactgcttagaaacgagaatctgactagctttaaacaagaagaactacttttaattcaacatgtctgtaccgactcggtccgcactagcctgaggtaa

SEQ ID NO: 4094 - DNA, 159 bp, synthetic construct
  source 1..159: mol_type = other DNA
  misc_feature 1..159: note = Synthetic
ataggacagtacataaaactgaacgacgccgtccctaatttaatattacacataaccacaaaactgcttagaaacgagaatctgactagctttaaacaagaagaactacttttaattcaacatgtctgtaccgactcggtccgcactagcctgaggtaa

SEQ ID NO: 4095 - DNA, 42 bp, synthetic construct
  source 1..42: mol_type = other DNA
  misc_feature 1..42: note = Synthetic
ttgacctttaaaatggatttgaggataccatccattgtctga

SEQ ID NO: 4096 - DNA, 45 bp, synthetic construct
  misc_feature 1..45: note = Synthetic
  source 1..45: mol_type = other DNA
atggaatgggaacatttttgttatcaacggccacctttgccttaa

SEQ ID NO: 4097 - DNA, 27 bp, synthetic construct
  misc_feature 1..27: note = Synthetic
  source 1..27: mol_type = other DNA
atgaaattcttgtttagacgtttgtag

SEQ ID NO: 4098 - DNA, 204 bp, synthetic construct
  source 1..204: mol_type = other DNA
  misc_feature 1..204: note = Synthetic
atggagccctcgaaattcttcacaatatcggacagtgccacctttgcacctgggcctgttagcaatgcggctaacaagaaaacattccgaacctgcttccgaatactggcactatctgtacaagctgtcacccttatattagttattgtcactttaggtgagcttgtaaggatgatcaatgatcaacgactcggtccgcactag

SEQ ID NO: 4099 - DNA, 78 bp, synthetic construct
  source 1..78: mol_type = other DNA
  misc_feature 1..78: note = Synthetic
atgcggctaacaagaaaacattccgaacctgcttccgaatactggcactatctgtacaagctgtcacccttatattag

SEQ ID NO: 4100 - DNA, 36 bp, synthetic construct
  misc_feature 1..36: note = Synthetic
  source 1..36: mol_type = other DNA
atgcttccacttggtgattacgttggcgaccgctag

SEQ ID NO: 4101 - DNA, 87 bp, synthetic construct
  source 1..87: mol_type = other DNA
  misc_feature 1..87: note = Synthetic
acgttggcgaccgctaggactttcttgttgattttccatgcggtgttttgcgcaatgttaatcgctttgtacacctcaggcatgtaa

SEQ ID NO: 4102 - DNA, 51 bp, synthetic construct
  source 1..51: mol_type = other DNA
  misc_feature 1..51: note = Synthetic
acgacgaccgttagcccaatagccaccacgactcggtccgcactagcctga

SEQ ID NO: 4103 - DNA, 69 bp, synthetic construct
  misc_feature 1..69: note = Synthetic
  source 1..69: mol_type = other DNA
acgcaccagcgccagaggacgacgaccgttagcccaatagccaccacgactcggtccgcactagcctga

SEQ ID NO: 4104 - DNA, 24 bp, synthetic construct
  misc_feature 1..24: note = Synthetic
  source 1..24: mol_type = other DNA
atgttaaaaatgagaacgaaatag

SEQ ID NO: 4105 - DNA, 189 bp, synthetic construct
  misc_feature 1..189: note = Synthetic
  source 1..189: mol_type = other DNA
atcagcaaaaacagcgagatcatgacctccgagagcgatttatataccttgaaagagctaatacgacttcgggactcgctgcacctcgccaccggcgccgccgtcgagcgctacaacgcgctcgttgagtgggccgcgcgcacgtactggacggtcgcggtcgactcggtccgcactagcctgaggtaa

SEQ ID NO: 4106 - DNA, 33 bp, synthetic construct
  source 1..33: mol_type = other DNA
  misc_feature 1..33: note = Synthetic
atgttcagcgggagttttccgggctgcgagtaa

SEQ ID NO: 4107 - DNA, 129 bp, synthetic construct
  source 1..129: mol_type = other DNA
  misc_feature 1..129: note = Synthetic
aggacgaggatggttcggaggatggggaattttcagacctggatctgtctgacagcgaccatgaaggggatgagggtgggggggctgttggagggggcaggagtctgcactcgactcggtccgcactag

SEQ ID NO: 4108 - DNA, 39 bp, synthetic construct
  source 1..39: mol_type = other DNA
  misc_feature 1..39: note = Synthetic
ttgaggatgttcagcgagagttttccgggctgcgagtaa

SEQ ID NO: 4109 - DNA, 168 bp, synthetic construct
  source 1..168: mol_type = other DNA
  misc_feature 1..168: note = Synthetic
atgaacctgggcatcgtctcgctcttccgcgagcacgtggacagcatccccaacatcctgccacaccagctggctacgctggacttcctgctgcgcagcatcctcgatgagaacaacagcgtgttgctgttccacatcatcgactcggtccgcactagcctgaggtaa

SEQ ID NO: 4110 - DNA, 132 bp, synthetic construct
  source 1..132: mol_type = other DNA
  misc_feature 1..132: note = Synthetic
gtggacagcatccccaacatcctgccacaccagctggctacgctggacttcctgctgcgcagcatcctcgatgagaacaacagcgtgttgctgttccacatcatcgactcggtccgcactagcctgaggtaa

SEQ ID NO: 4111 - DNA, 45 bp, synthetic construct
  misc_feature 1..45: note = Synthetic
  source 1..45: mol_type = other DNA
atgtttttaaagtttgtcgactcggtccgcactagcctgaggtaa

SEQ ID NO: 4112 - DNA, 93 bp, synthetic construct
  misc_feature 1..93: note = Synthetic
  source 1..93: mol_type = other DNA
gtgattacgttggcgaccgctaggactttcttgttgattttccatgcggtgttttgcgcaatgttaatcgctttgtacacctcaggcatgtaa

SEQ ID NO: 4113 - DNA, 189 bp, synthetic construct
  misc_feature 1..189: note = Synthetic
  source 1..189: mol_type = other DNA
atagggacccaagaccacccccttccgacagggacggaaatggtggaggcccgacccctgcgggagaggcaccggacccctccccaatggcatctcgcctacgtgggagacgggagccccctgtggccgactccactacctcgcaggcattccccctccgcgcaggaggaacgactcggtccgcactag

SEQ ID NO: 4114 - DNA, 168 bp, synthetic construct
  source 1..168: mol_type = other DNA
  misc_feature 1..168: note = Synthetic
atggatttcgccaatgatgaagaaattgcagaacttttgaatctcagcaccaatgtaatcaaggagattcagaaatccgaactcaagcctccccaaaccaccggacgaccacctgtcagtcaagggaacacaagaaatctcgactcggtccgcactagcctgaggtaa

SEQ ID NO: 4115 - DNA, 195 bp, synthetic construct
  misc_feature 1..195: note = Synthetic
  source 1..195: mol_type = other DNA
atgaataacatgtcttctgctgcgcccatgggttcgcgaccatgcgccctcggcctattttgctgttgctcctcatgtttctgcctatgctgcccgcgccaccgcccggtcagccgtctggccgccgccgtgggcggcgcagcggcggttccggcggtggtttctggcgactcggtccgcactagcctgaggtaa

SEQ ID NO: 4116 - DNA, 141 bp, synthetic construct
  misc_feature 1..141: note = Synthetic
  source 1..141: mol_type = other DNA
atgcactttcaactctctacctctcgcatgcgcctgcacttcggacacctcacctttctctttctcaagatcgttttgcacttgtcaggccggccgtggcgtgcttgtagcgcaaggcgacggcgactcggtccgcactag

SEQ ID NO: 4117 - DNA, 177 bp, synthetic construct
  source 1..177: mol_type = other DNA
  misc_feature 1..177: note = Synthetic
atgcacataaatcgatggaccggttccgtgcgctctacggcgagttctgccggctcagcgtggagcacctggaacgcgagacgggcacgcgcgcagacgcggtggacgtggacgtggacgtggataccatgctctcgctgctgcccatactcgacgactcggtccgcactagcctga

SEQ ID NO: 4118 - DNA, 123 bp, synthetic construct
  source 1..123: mol_type = other DNA
  misc_feature 1..123: note = Synthetic
gtggagcacctggaacgcgagacgggcacgcgcgcagacgcggtggacgtggacgtggacgtggataccatgctctcgctgctgcccatactcgacgactcggtccgcactagcctgaggtaa

SEQ ID NO: 4119 - DNA, 183 bp, synthetic construct
  source 1..183: mol_type = other DNA
  misc_feature 1..183: note = Synthetic
acgtgcatgcacataaatcggccgaccggttccgtgcgctctacggcgagttctgccggctcagcgtggagcacctggaacgcgagacgggcacgcgcgcagacgcggtggacgtggacgtggacgtggataccatgctctcgctgctgcccatactcgacgactcggtccgcactagcctga

SEQ ID NO: 4120 - DNA, 93 bp, synthetic construct
  source 1..93: mol_type = other DNA
  misc_feature 1..93: note = Synthetic
atgggatgtacgggcggggggagaaagagttgtgcatcgcccatctacccaccctgcgagacatccgcacctgccgtgtcgacgccgacctag

SEQ ID NO: 4121 - DNA, 21 bp, synthetic construct
  misc_feature 1..21: note = Synthetic
  source 1..21: mol_type = other DNA
aggatgaaagcgcgcgaatga

SEQ ID NO: 4122 - DNA, 225 bp, synthetic construct
  misc_feature 1..225: note = Synthetic
  source 1..225: mol_type = other DNA
ctgctgctcgtccatcgtcattgtcgtcaccgtcgctacccgctcaccgagcgaacggccatggcccgcgacgaagagaaccccgccgtcccgcgggtccgcacgggcaaattctcctttacttgcgccaatcatctaatattacagattagcgagaagatgtcgcgcggacagccgctgagctcgctgcgtttggacgactcggtccgcactagcctgaggtaa

SEQ ID NO: 4123 - DNA, 63 bp, synthetic construct
  misc_feature 1..63: note = Synthetic
  source 1..63: mol_type = other DNA
atgatccctggacaccaacaaccccctaacctccccaagttgtcattaagaaaaaatatatga

SEQ ID NO: 4124 - DNA, 198 bp, synthetic construct
  source 1..198: mol_type = other DNA
  misc_feature 1..198: note = Synthetic
ataaagaagaacgaacgtacgctcgtcgccgccgccttgagcatcaatgactgcgcgcgcctcactggtcaaaccgtgcctacaatgaactacttcatgccgctacgcaacatttggaaccgcgtacgcgagtttcctcgggcttctactaccgccgcaggaatcacctgcgactcggtccgcactagcctgaggtaa

SEQ ID NO: 4125 - DNA, 42 bp, synthetic construct
  misc_feature 1..42: note = Synthetic
  source 1..42: mol_type = other DNA
atgactgcgcgcgcctcactggtcaaaccgtgcctacaatga

SEQ ID NO: 4126 - DNA, 99 bp, synthetic construct
  source 1..99: mol_type = other DNA
  misc_feature 1..99: note = Synthetic
ctgggcccgctggtgctggctcttctgctggtgctggctctgctgtggcgcggtcatggccaatcgtcgtctccgacacgctccgcacaccgcgactga

SEQ ID NO: 4127 - DNA, 168 bp, synthetic construct
  source 1..168: mol_type = other DNA
  misc_feature 1..168: note = Synthetic
atggccaatcgtcgtctccgacacgctccgcacaccgcgactgatgagttccaccaggctctgcgccgtctcttcgcgcccctctgcgttcacgaggaccatttccatgtgcagctggtgatcggccgcggtgcgctgcacgactcggtccgcactagcctgaggtaa

SEQ ID NO: 4128 - DNA, 114 bp, synthetic construct
  source 1..114: mol_type = other DNA
  misc_feature 1..114: note = Synthetic
atcgtcgtctccgacacgctccgcacaccgcgactgatgagttccaccaggctctgcgccgtctcttcgcgcccctctgcgttcacgaggaccatttccatgtgcagctggtga

SEQ ID NO: 4129 - DNA, 132 bp, synthetic construct
  misc_feature 1..132: note = Synthetic
  source 1..132: mol_type = other DNA
gtggcgcggtcgccgccaatcgtcgtctccgacacgctccgcacaccgcgactgatgagttccaccaggctctgcgccgtctcttcgcgcccctctgcgttcacgaggaccatttccatgtgcagctggtga

SEQ ID NO: 4130 - DNA, 225 bp, synthetic construct
  misc_feature 1..225: note = Synthetic
  source 1..225: mol_type = other DNA
ctgctgctcgtccatcgtcattgtcgtcaccgtcgctacccgctcaccgagcgaacgatgatggcccgcgacgaagagaaccccgccgtcccgcgggtccgcacgggcaaattctcctttacttgcgccaatcatctaatattacagattagcgagaagatgtcgcgcggacagccgctgagctcgctgcgtttggacgactcggtccgcactagcctgaggtaa

SEQ ID NO: 4131 - DNA, 18 bp, synthetic construct
  misc_feature 1..18: note = Synthetic
  source 1..18: mol_type = other DNA
atagcaataccacgctga

SEQ ID NO: 4132 - DNA, 93 bp, synthetic construct
  misc_feature 1..93: note = Synthetic
  source 1..93: mol_type = other DNA
acggaggacattaaatcgggttttctgcagtatcgtggaattaccctgccggtgataaagctagagaacacgactcggtccgcactagcctga

SEQ ID NO: 4133 - DNA, 39 bp, synthetic construct
  source 1..39: mol_type = other DNA
  misc_feature 1..39: note = Synthetic
atgagtacgagccagaggacggcgagtactaagcggtga

SEQ ID NO: 4134 - DNA, 165 bp, synthetic construct
  misc_feature 1..165: note = Synthetic
  source 1..165: mol_type = other DNA
atgcaagacgcaacggacccggcggtgcgggcggcgctgcagagccagccgtccggccttaactccacggacgactggcgccaggtcatggaccgcatcatgtcgctgactgcgcgtaaccctgacgcgttccggcacgactcggtccgcactagcctgaggtaa

SEQ ID NO: 4135 - DNA, 201 bp, synthetic construct
  source 1..201: mol_type = other DNA
  misc_feature 1..201: note = Synthetic
aaggaagactctattcgcctaggagtacgctgcatcgagatgctcattgagtcaaccggaatggttagcttacaccgccaaaatgctggcgtagtaggtcaagactctgagactatcgaactcgcacctgaatacgctgaggctatcgcaacccgtgcaggtgcgctggctggcatctcgactcggtccgcactagcctga

SEQ ID NO: 4136 - DNA, 201 bp, synthetic construct
  misc_feature 1..201: note = Synthetic
  source 1..201: mol_type = other DNA
atggttaaatctcgggtctcataccggtccgtgatgtcgggcgtgggggaagagagggtcccctctgcgtttactatccttgcctcgtggggctggacgtttgcaccccagaaccatgatcctggcgcgtcgccgaatacgacgcccatagagtcgattgcggggaccgcacccgactcggtccgcactagcctgaggtaa

SEQ ID NO: 4137 - DNA, 201 bp, synthetic construct
  misc_feature 1..201: note = Synthetic
  source 1..201: mol_type = other DNA
atggttaaatctcgggtctcataccggtccgtggcctcgggcgtgggggaagagagggtcccctctgcgtttactatccttgcctcgtggggctggacgtttgcaccccagaaccatgatcctggcgcgtcgccgaatacgacgcccatagagtcgattgcggggaccgcacccgactcggtccgcactagcctgaggtaa

SEQ ID NO: 4138 - DNA, 135 bp, synthetic construct
  source 1..135: mol_type = other DNA
  misc_feature 1..135: note = Synthetic
aagtgccaacgactccgcggaaggcccgtgcccgtgacgccggaggaagcgtgtccgcgactccgtgcggggcatatgcacgcgagaggttcgaacccggcttgcgctgcgaagaatataagggccggcccctag

SEQ ID NO: 4139 - DNA, 72 bp, synthetic construct
  misc_feature 1..72: note = Synthetic
  source 1..72: mol_type = other DNA
atcgcctgctgcatcacgctctcgtacgagggaggaggaccctccgggtcgactcggtccgcactagcctga

SEQ ID NO: 4140 - DNA, 192 bp, synthetic construct
  misc_feature 1..192: note = Synthetic
  source 1..192: mol_type = other DNA
atgctgctgatagtggtaacaaacggggccaccatcgcgcgccgcggcgcgccctcgctgggcatccgctcgcgcggggcgctgcgcgtgctcacagtgctggacttcgtgtcgctgctgaccacgatcccgtgcaccatcatcctgtacttcctctacatgcacgactcggtccgcactagcctgaggtaa

SEQ ID NO: 4141 - DNA, 168 bp, synthetic construct
  misc_feature 1..168: note = Synthetic
  source 1..168: mol_type = other DNA
atgactcttcatatgccttgcaagacagtgaaagcactaatcaagtgcagtgagcatggtccagttttcattactatagaggttgatgacatgatatggactcacaaggacttaaaagaagctttatctgatgggatagtcgactcggtccgcactagcctgaggtaa

SEQ ID NO: 4142 - DNA, 156 bp, synthetic construct
  misc_feature 1..156: note = Synthetic
  source 1..156: mol_type = other DNA
atgccttgcaagacagtgaaagcactaatcaagtgcagtgagcatggtccagttttcattactatagaggttgatgacatgatatggactcacaaggacttaaaagaagctttatctgatgggatagtcgactcggtccgcactagcctgaggtaa

SEQ ID NO: 4143 - DNA, 186 bp, synthetic construct
  source 1..186: mol_type = other DNA
  misc_feature 1..186: note = Synthetic
ctgcgcgaggagcccaaggtcacgctgttgccgctggtctttttccagcatcccgagaaggtgctcgagctcatccgctcgctgcgctcgcgcgagggcatctacggaacctgcttcttcgacgagcgcgcgggggcggtcacgctcacgctgcgcagcctgccgactcggtccgcactagcctga

SEQ ID NO: 4144 - DNA, 201 bp, synthetic construct
  source 1..201: mol_type = other DNA
  misc_feature 1..201: note = Synthetic
ataataaagaagaacgaacgtacgctcgtcgccatggccttgagcatcaatgactgcgcgcgcctcactggtcaaaccgtgcctacaatgaactacttcatgccgctacgcaacatttggaaccgcgtacgcgagtttcctcgggcttctactaccgccgcaggaatcacctgcgactcggtccgcactagcctgaggtaa

SEQ ID NO: 4145 - DNA, 72 bp, synthetic construct
  source 1..72: mol_type = other DNA
  misc_feature 1..72: note = Synthetic
atgccagcacttccggctaaaggtaacttgaacctccgtgacatcttagagtcggacttcgcgttcgcgtaa

SEQ ID NO: 4146 - DNA, 105 bp, synthetic construct
  misc_feature 1..105: note = Synthetic
  source 1..105: mol_type = other DNA
atcaatacgactcactatagagggacaaactcaaggtcattcgcaagagtggcctttatgattgaccttcttccggttaatacgactcgactcggtccgcactag

SEQ ID NO: 4147 - DNA, 48 bp, synthetic construct
  misc_feature 1..48: note = Synthetic
  source 1..48: mol_type = other DNA
atgattgaccttcttccggttaatacgactcgactcggtccgcactag

SEQ ID NO: 4148 - DNA, 156 bp, synthetic construct
  misc_feature 1..156: note = Synthetic
  source 1..156: mol_type = other DNA
atgcatttttacggatggagtctcggtctaaaaacgggaatgtactatctacgtacgaaacccgcatccgctcccattcaattcacattggacaaggataaaataaaaccacaagtggtttgcgattccgaaatctgtacatcatgcagcggttaa

SEQ ID NO: 4149 - DNA, 45 bp, synthetic construct
  misc_feature 1..45: note = Synthetic
  source 1..45: mol_type = other DNA
atatacaaaacgcgttttgtacctctaccgcacccgatatcttaa

SEQ ID NO: 4150 - DNA, 168 bp, synthetic construct
  source 1..168: mol_type = other DNA
  misc_feature 1..168: note = Synthetic
atggaatcgtctaacattaacgcgctacaacaaccgtcgtctatcgcacatcatccgtccaaacagtgcgcttcaagtctcaatgaaacagtaaaagattctccccccgcgatttatgaagataggttagaacacacgcccgactcggtccgcactagcctgaggtaa

SEQ ID NO: 4151 - DNA, 153 bp, synthetic construct
  misc_feature 1..153: note = Synthetic
  source 1..153: mol_type = other DNA
attaacgcgctacaacaaccgtcgtctatcgcacatcatccgtccaaacagtgcgcttcaagtctcaatgaaacagtaaaagattctccccccgcgatttatgaagataggttagaacacacgcccgactcggtccgcactagcctgaggtaa

SEQ ID NO: 4152 - DNA, 219 bp, synthetic construct
  source 1..219: mol_type = other DNA
  misc_feature 1..219: note = Synthetic
attcatccgaccacccgttctatccctaaatggcagaggaacaggcctaccatgtcagcaaagggctggaatgcctcaaagccctcagagagaatcctcctgacattgaggagattcaagaggtcagcagcctcagagaccaaacctgcaacccaggccaagagaatggaaccacaggcatgcaggaagagcgactcggtccgcactagcctgaggtaa

SEQ ID NO: 4153 - DNA, 180 bp, synthetic construct
  source 1..180: mol_type = other DNA
  misc_feature 1..180: note = Synthetic
atggcagaggaacaggcctaccatgtcagcaaagggctggaatgcctcaaagccctcagagagaatcctcctgacattgaggagattcaagaggtcagcagcctcagagaccaaacctgcaacccaggccaagagaatggaaccacaggcatgcaggaagagcgactcggtccgcactag

SEQ ID NO: 4154 - DNA, 219 bp, synthetic construct
  source 1..219: mol_type = other DNA
  misc_feature 1..219: note = Synthetic
attcatccgaccacccgttctatccctaaatggcagaggaacaggcctaccgcctcagcaaagggctggaatgcctcaaagccctcagagagaatcctcctgacattgaggagattcaagaggtcagcagcctcagagaccaaacctgcaacccaggccaagagaatggaaccacaggcatgcaggaagagcgactcggtccgcactagcctgaggtaa

SEQ ID NO: 4155 - DNA, 180 bp, synthetic construct
  source 1..180: mol_type = other DNA
  misc_feature 1..180: note = Synthetic
atggcagaggaacaggcctaccgcctcagcaaagggctggaatgcctcaaagccctcagagagaatcctcctgacattgaggagattcaagaggtcagcagcctcagagaccaaacctgcaacccaggccaagagaatggaaccacaggcatgcaggaagagcgactcggtccgcactag

SEQ ID NO: 4156 - DNA, 108 bp, synthetic construct
  source 1..108: mol_type = other DNA
  misc_feature 1..108: note = Synthetic
gtggcccccaccatcggcagggtgatcgcaccggcaagccccctgaacatggggatcatcccgccgaaggagtccttcaccgactcggtccgcactagcctgaggtaa

SEQ ID NO: 4157 - DNA, 36 bp, synthetic construct
  source 1..36: mol_type = other DNA
  misc_feature 1..36: note = Synthetic
aggatgttcagcgagagttttccgggctgcgagtaa

SEQ ID NO: 4158 - DNA, 216 bp, synthetic construct
  source 1..216: mol_type = other DNA
  misc_feature 1..216: note = Synthetic
atgttgacagcaatggctgagtttccatgtctgttgtttctctgcctaggagaacacaatggccagccgcgaaggaaatcagttaagcgaccgccacagggagcacacccccgaacgcggaaggggttctgccagtcatccgccttccaggtcggaccgcagcccttcgcaatcgcctccacctctgcccccgaagagcgactcggtccgcactag

SEQ ID NO: 4159 - DNA, 171 bp, synthetic construct
  source 1..171: mol_type = other DNA
  misc_feature 1..171: note = Synthetic
atgccgcacaatcgccccagccacagacacaaacagcacccacaccacgccgcttcacccagaggaccaacacacgttacccttacaccacagcaccacacaacctcatgtccaaacttcggacaaacacgccgacaaacaacaccgcacgcacgactcggtccgcactag

SEQ ID NO: 4160 - DNA, 222 bp, synthetic construct
  source 1..222: mol_type = other DNA
  misc_feature 1..222: note = Synthetic
gtggatcctacgctttccttgaacatggaggaacacgttaacgaattgcacgaccttgtcaggaaatgggtgtctgatgatgaaaactttgcggagcagaaagcaatttttctgtcccagacaaaattgagggctataacaattgaaggactaaaattgttgtccacaattgtagaggttgactcatgtcaaaacgactcggtccgcactagcctgaggtaa

SEQ ID NO: 4161 - DNA, 222 bp, synthetic construct
  misc_feature 1..222: note = Synthetic
  source 1..222: mol_type = other DNA
gtggatcctacgctttccttgaacgccgaggaacacgttaacgaattgcacgaccttgtcaggaaatgggtgtctgatgatgaaaactttgcggagcagaaagcaatttttctgtcccagacaaaattgagggctataacaattgaaggactaaaattgttgtccacaattgtagaggttgactcatgtcaaaacgactcggtccgcactagcctgaggtaa

SEQ ID NO: 4162 - DNA, 96 bp, synthetic construct
  source 1..96: mol_type = other DNA
  misc_feature 1..96: note = Synthetic
acgttaacgaattgcacgaccttgtcaggaaatgggtgtctgatgatgaaaactttgcggagcagaaagcaatttttctgtcccagacaaaattga

SEQ ID NO: 4163 - DNA, 147 bp, synthetic construct
  source 1..147: mol_type = other DNA
  misc_feature 1..147: note = Synthetic
atggctcaatccaaggaagtgccaagcttcagatggacccagtctcttagaaagggattgagtcaattcacccaaacagtcaagtcagatattttaaaggacgctaagctgattgccgacagcacgactcggtccgcactagcctga

SEQ ID NO: 4164 - DNA, 57 bp, synthetic construct
  source 1..57: mol_type = other DNA
  misc_feature 1..57: note = Synthetic
attatggcgctgactacccgcaaccccgacgactcggtccgcactagcctgaggtaa

SEQ ID NO: 4165 - DNA, 141 bp, synthetic construct
  misc_feature 1..141: note = Synthetic
  source 1..141: mol_type = other DNA
ctgcgacagatcgtgacctacttctcggaattcagcgaggaagtctctgtcaacgtggacgcgcgcagcgagctcatgtacatcttttccacgctgggcggcgcggtgaacatcgactcggtccgcactagcctgaggtaa

SEQ ID NO: 4166 - DNA, 162 bp, synthetic construct
  source 1..162: mol_type = other DNA
  misc_feature 1..162: note = Synthetic
gtgcgcatcaagatcgacaagctgcgacagatcgtgacctacttctcggaattcagcgaggaagtctctgtcaacgtggacgcgcgcagcgagctcatgtacatcttttccacgctgggcggcgcggtgaacatcgactcggtccgcactagcctgaggtaa

SEQ ID NO: 4167 - DNA, 216 bp, synthetic construct
  misc_feature 1..216: note = Synthetic
  source 1..216: mol_type = other DNA
atgcgccgcgcggtaagcgccagcaggcggcgcgagctgagcgatcaggagctgatgcacagcctgcagcgggccctgaccggggccgggaccgagggggagagctactttgacatgggcgcggacctgcactggcagcccagccgccgggtcttggaagccgcggcggtcccttacgtagaagaggtcgactcggtccgcactagcctgaggtaa

SEQ ID NO: 4168 - DNA, 198 bp, synthetic construct
  source 1..198: mol_type = other DNA
  misc_feature 1..198: note = Synthetic
aagaacccaatagacaaatccaaattcgagatggaatactggaagcataccaatcacggaaaggatgctggtaatgagctggagacgtccatggctactcataacaacaagctcactaataagataatatatatattatggacaataatcctggtgttattatcaatagtcgactcggtccgcactagcctgaggtaa

SEQ ID NO: 4169 - DNA, 84 bp, synthetic construct
  source 1..84: mol_type = other DNA
  misc_feature 1..84: note = Synthetic
ataattgagaaagaacccaacagacaaatccaaattcgagatggaatactggaagcacaccaatcacggaaaggatgctggtaa

SEQ ID NO: 4170 - DNA, 168 bp, synthetic construct
  source 1..168: mol_type = other DNA
  misc_feature 1..168: note = Synthetic
atggaatactggaagcacaccaatcacggaaaggatgctggtaatgagctggagaaatccatggctactcatggcaacaagcccactaacaagataatatatatattatggacaataatcctggtgttattatcaatagtcgactcggtccgcactagcctgaggtaa

SEQ ID NO: 4171 - DNA, 27 bp, synthetic construct
  misc_feature 1..27: note = Synthetic
  source 1..27: mol_type = other DNA
atggcaacaagcccactaacaagataa

SEQ ID NO: 4172 - DNA, 81 bp, synthetic construct
  misc_feature 1..81: note = Synthetic
  source 1..81: mol_type = other DNA
attgagaaagaacccaacagacaaatccaaattcgaggccgaatactggaagcacaccaatcacggaaaggatgctggtaa

SEQ ID NO: 4173 - DNA, 156 bp, synthetic construct
  source 1..156: mol_type = other DNA
  misc_feature 1..156: note = Synthetic
aagcacaccaatcacggaaaggatgctggtaatgagctggagaaatccatggctactcatggcaacaagcccactaacaagataatatatatattatggacaataatcctggtgttattatcaatagtcgactcggtccgcactagcctgaggtaa

SEQ ID NO: 4174 - DNA, 171 bp, synthetic construct
  misc_feature 1..171: note = Synthetic
  source 1..171: mol_type = other DNA
atgccgcacaatcatgccagccacagacacaaacagcacccacaccacgccgcttcacccagaggaccaacacacgttacccttacaccacagcaccacacaacctcatgtccaaacttcggacaaacacgccgacaaacaacaccgcacgcacgactcggtccgcactag

SEQ ID NO: 4175 - DNA, 168 bp, synthetic construct
  source 1..168: mol_type = other DNA
  misc_feature 1..168: note = Synthetic
atgccagccacagacacaaacagcacccacaccacgccgcttcacccagaggaccaacacacgttacccttacaccacagcaccacacaacctcatgtccaaacttcggacaaacacgccgacaaacaacaccgcacgcacgactcggtccgcactagcctgaggtaa

SEQ ID NO: 4176 - DNA, 171 bp, synthetic construct
  misc_feature 1..171: note = Synthetic
  source 1..171: mol_type = other DNA
atggcaaactccaaagagattcccagcttccgctggactcaggccctgagacgggaactgggcagcttcacagagcccaccaagggaagtgtcctgaaggacgccaagttaatagcagacagcttagacttcactcaagtctcccaagcgactcggtccgcactagcctga

SEQ ID NO: 4177 - DNA, 177 bp, synthetic construct
  misc_feature 1..177: note = Synthetic
  source 1..177: mol_type = other DNA
attctgcactcaaagccgcatccggcaagagtcatggggaaaacgcagtccaagggacagcccagcacaaatctcctcaaggagacagaaccaaggcatccagtaataccagatgccaggggaactggccctgaattctgcaagagctgctggtcgactcggtccgcactagcctga

SEQ ID NO: 4178 - DNA, 180 bp, synthetic construct
  misc_feature 1..180: note = Synthetic
  source 1..180: mol_type = other DNA
ctggcagtcatgcaagaccccctcttaggaaccctgtctgaattaaaggatttggttagaaaaaccataccagatgtaattgagcttgcatatcaaaaggacgcattactttcacaagtgcatccaagatcagtgttaattgaggggtttaaacttttatctcgactcggtccgcactag

SEQ ID NO: 4179 - DNA, 222 bp, synthetic construct
  misc_feature 1..222: note = Synthetic
  source 1..222: mol_type = other DNA
gtggatcctaggcatttcttgatcatgattgattgctctgatcgtataaatgagctcaaggatctcgttagaaggtgggttcccgacgaagaagcctacacagaacaaaaaacaatagtcctctctcaggtcaatccctcttcagttataaccgagggtctgaagctcctatcaatgctgatcgagattgattccgactcggtccgcactagcctgaggtaa

SEQ ID NO: 4180 - DNA, 60 bp, synthetic construct
  misc_feature 1..60: note = Synthetic
  source 1..60: mol_type = other DNA
aggatctcgttagaaggtgggttcccgacgaagaagcctacacagaacaaaaaacaatag

SEQ ID NO: 4181 - DNA, 222 bp, synthetic construct
  misc_feature 1..222: note = Synthetic
  source 1..222: mol_type = other DNA
gtggatcctaggcatttcttgatcgccattgattgctctgatcgtataaatgagctcaaggatctcgttagaaggtgggttcccgacgaagaagcctacacagaacaaaaaacaatagtcctctctcaggtcaatccctcttcagttataaccgagggtctgaagctcctatcaatgctgatcgagattgattccgactcggtccgcactagcctgaggtaa

SEQ ID NO: 4182 - DNA, 66 bp, synthetic construct
  source 1..66: mol_type = other DNA
  misc_feature 1..66: note = Synthetic
atggacgcaagcattgagaagagaattgcagagcttcacatcagatgtgaaggctgctgtcattaa

SEQ ID NO: 4183 - DNA, 153 bp, synthetic construct
  misc_feature 1..153: note = Synthetic
  source 1..153: mol_type = other DNA
attcctgcgtttcgttggactcaagctctcagaagaggcctatccaactggacacagactgtcaaagccgatgtcatcaaagatgcaaaggctattatgagtgcccttgacttcaatcaggtggcacaagttcagcgactcggtccgcactag

SEQ ID NO: 4184 - DNA, 165 bp, synthetic construct
  misc_feature 1..165: note = Synthetic
  source 1..165: mol_type = other DNA
atgggtcaggtggtgactttctttcaatcaattcctgagatcatacaagaggccatcaacattgctctaattgctgttagcgtcatctgcatcatcaaaggctgtgtaaacctctggaaatgtggtctaattcaactgatggcgactcggtccgcactagcctga

SEQ ID NO: 4185 - DNA, 123 bp, synthetic construct
  source 1..123: mol_type = other DNA
  misc_feature 1..123: note = Synthetic
atgagtgcctcaaaggaaataaaatcctttttgtggacacaatctttgaggagggaattatctggttactgctccaacatcaaactacaggtggtgaaagcgactcggtccgcactagcctga

SEQ ID NO: 4186 - DNA, 183 bp, synthetic construct
  misc_feature 1..183: note = Synthetic
  source 1..183: mol_type = other DNA
ctgaatcaggggaaaaccgaagacctggaacttaccataatgtctgaaaaacaggttcccagcttccggtggactcaagccctcaggaggggcctgtctaactggacagagcctgttaaggtagatgtgataaaggatgcaagggcaataatatctgctccgactcggtccgcactagcctga

SEQ ID NO: 4187 - DNA, 129 bp, synthetic construct
  misc_feature 1..129: note = Synthetic
  source 1..129: mol_type = other DNA
atgggtcaagtgattggattcttccaatcattgcccgagattattaatgaagcgttgaacattgctctgatctgtgtggctctgcttgccacaatcaagggaatggtcaaccgactcggtccgcactag

SEQ ID NO: 4188 - DNA, 30 bp, synthetic construct
  misc_feature 1..30: note = Synthetic
  source 1..30: mol_type = other DNA
gtgttcacgactcggtccgcactagcctga

SEQ ID NO: 4189 - DNA, 180 bp, synthetic construct
  source 1..180: mol_type = other DNA
  misc_feature 1..180: note = Synthetic
ctggcagtcgcccaagaccccctcttaggaaccctgtctgaattaaaggatttggttagaaaaaccataccagatgtaattgagcttgcatatcaaaaggacgcattactttcacaagtgcatccaagatcagtgttaattgaggggtttaaacttttatctcgactcggtccgcactag

SEQ ID NO: 4190 - DNA, 177 bp, synthetic construct
  misc_feature 1..177: note = Synthetic
  source 1..177: mol_type = other DNA
atggggcaattcataactttgatgcaatcgataccagaagcattgaacatggctttcaatgttgctctagtgattgtgtcactgttatgtgttaccaagggactgatcaacctctggaaatgcgggatcattcaactcctaatgtttcttgcatcgactcggtccgcactagcctga

SEQ ID NO: 4191 - DNA, 204 bp, synthetic construct
  misc_feature 1..204: note = Synthetic
  source 1..204: mol_type = other DNA
atacaagtctacgccttactcttgatcgccgggcaattcataactttgatgcaatcgataccagaagcattgaacatggctttcaatgttgctctagtgattgtgtcactgttatgtgttaccaagggactgatcaacctctggaaatgcgggatcattcaactcctaatgtttcttgcatcgactcggtccgcactagcctga

SEQ ID NO: 4192 - DNA, 222 bp, synthetic construct
  source 1..222: mol_type = other DNA
  misc_feature 1..222: note = Synthetic
gtggatcctaggcattccttgatcatgtctgagtgcttgacctactttaatgaactgaaggaccttgtaaggaagtgggtaccagatgaggacacctatgtggagcaaaagacggttttactctcacaggtcaatttttcctccattgtgaccgaagggttgaagctcctctcaactctgatagaggttgactccgactcggtccgcactagcctgaggtaa

SEQ ID NO: 4193 - DNA, 66 bp, synthetic construct
  source 1..66: mol_type = other DNA
  misc_feature 1..66: note = Synthetic
atgaggacacctatgtggagcaaaagacggttttactctcacaggtcaatttttcctccattgtga

SEQ ID NO: 4194 - DNA, 30 bp, synthetic construct
  source 1..30: mol_type = other DNA
  misc_feature 1..30: note = Synthetic
ttgactccgactcggtccgcactagcctga

SEQ ID NO: 4195 - DNA, 216 bp, synthetic construct
  misc_feature 1..216: note = Synthetic
  source 1..216: mol_type = other DNA
atgttgacagcaatggctgagtttccatgtctgttgtttctctgcctaggagaacacagccgccagccgcgaaggaaatcagttaagcgaccgccacagggagcacacccccgaacgcggaaggggttctgccagtcatccgccttccaggtcggaccgcagcccttcgcaatcgcctccacctctgcccccgaagagcgactcggtccgcactag

SEQ ID NO: 4196 - DNA, 216 bp, synthetic construct
  source 1..216: mol_type = other DNA
  misc_feature 1..216: note = Synthetic
atgttggcagtgatggctgagtttccatgtctgttgtttctctgcctaggagaacacaatggccagccgcggaggaaatcagtcaagcgaccgccaccgggagcacacccccgaacgcggaatgagctctgccagccatccgcctccaaggccagaccgcagcccatctcagtcgcctccacctctgcccccgaagagcgactcggtccgcactag

SEQ ID NO: 4197 - DNA, 168 bp, synthetic construct
  misc_feature 1..168: note = Synthetic
  source 1..168: mol_type = other DNA
atggccagccgcggaggaaatcagtcaagcgaccgccaccgggagcacacccccgaacgcggaatgagctctgccagccatccgcctccaaggccagaccgcagcccatctcagtcgcctccacctctgcccccgaagagcgactcggtccgcactagcctgaggtaa

SEQ ID NO: 4198 - DNA, 216 bp, synthetic construct
  misc_feature 1..216: note = Synthetic
  source 1..216: mol_type = other DNA
atgttggcagtgatggctgagtttccatgtctgttgtttctctgcctaggagaacacagccgccagccgcggaggaaatcagtcaagcgaccgccaccgggagcacacccccgaacgcggaatgagctctgccagccatccgcctccaaggccagaccgcagcccatctcagtcgcctccacctctgcccccgaagagcgactcggtccgcactag

SEQ ID NO: 4199 - DNA, 105 bp, synthetic construct
  source 1..105: mol_type = other DNA
  misc_feature 1..105: note = Synthetic
atgagctctgccagccatccgcctccaaggccagaccgcagcccatctcagtcgcctccacctctgcccccgaagagcgactcggtccgcactagcctgaggtaa

SEQ ID NO: 4200 - DNA, 222 bp, synthetic construct
  misc_feature 1..222: note = Synthetic
  source 1..222: mol_type = other DNA
gtggatcctaggctttggagattctacgcatcaacatcaacttctaccttcatcatgtctgatcaggtggtgcactcctttcgctggactcagtcactcaggagaggactctccaattggacatgtccagtgaaggctgacgtcctcaatgatacgagggctttactgtctggattggattttgcaaaggtggccgactcggtccgcactagcctgaggtaa

SEQ ID NO: 4201 - DNA, 48 bp, synthetic construct
  source 1..48: mol_type = other DNA
  misc_feature 1..48: note = Synthetic
ttggagattctacgcatcaacatcaacttctaccttcatcatgtctga

SEQ ID NO: 4202 - DNA, 222 bp, synthetic construct
  misc_feature 1..222: note = Synthetic
  source 1..222: mol_type = other DNA
gtggatcctaggctttggagattctacgcatcaacatcaacttctaccttcatcgcctctgatcaggtggtgcactcctttcgctggactcagtcactcaggagaggactctccaattggacatgtccagtgaaggctgacgtcctcaatgatacgagggctttactgtctggattggattttgcaaaggtggccgactcggtccgcactagcctgaggtaa

SEQ ID NO: 4203 - DNA, 222 bp, synthetic construct
  source 1..222: mol_type = other DNA
  misc_feature 1..222: note = Synthetic
gtggatcctaggcttttttggatcacgcttacccctgttcaggataacactgaaaacatgggtctacgctacagcaaagaggtgagagagagacacggagacaaagatctggaagggagagtccccatgacactcaatctcccacagggtttatatggacgcttcaactgtaagtcttgctggtttgcaaacagcgactcggtccgcactagcctgaggtaa

SEQ ID NO: 4204 - DNA, 162 bp, synthetic construct
  source 1..162: mol_type = other DNA
  misc_feature 1..162: note = Synthetic
atgggacagcttgtctccttcattggagaaataccagccattgtgcacgaagccctgaatgtagctttaatcgcagtaagtatcattgcgattatgaagggcctcataaatatctggaaaagtgggttattccaattgataatgcgactcggtccgcactag

SEQ ID NO: 4205 - DNA, 171 bp, synthetic construct
  source 1..171: mol_type = other DNA
  misc_feature 1..171: note = Synthetic
atcatttcagccggacagcttgtctccttcattggagaaataccagccattgtgcacgaagccctgaatgtagctttaatcgcagtaagtatcattgcgattatgaagggcctcataaatatctggaaaagtgggttattccaattgataatgcgactcggtccgcactag

SEQ ID NO: 4206 - DNA, 201 bp, synthetic construct
  misc_feature 1..201: note = Synthetic
  source 1..201: mol_type = other DNA
atgttagtgacaaaaagcctaggggcagaaaagatgttgccgtctacatcacttcgtgggcagaataacttaattctacctgagtcgcatctgtcttccccaattgtaaagcataagttattgtattattggaggataacagggttacaattacctgaatcatgcatgtatgacgactcggtccgcactagcctgaggtaa

SEQ ID NO: 4207 - DNA, 18 bp, synthetic construct
  source 1..18: mol_type = other DNA
  misc_feature 1..18: note = Synthetic
ttggtgttgaagtgttga

SEQ ID NO: 4208 - DNA, 135 bp, synthetic construct
  misc_feature 1..135: note = Synthetic
  source 1..135: mol_type = other DNA
atggggcagcttatcagcttctttcaggagattcctgtttttctacaggaagctctgaacatcgctttagtggctgttagtctcatagctgtcatcaaaggcatcattaacccgactcggtccgcactagcctga

SEQ ID NO: 4209 - DNA, 168 bp, synthetic construct
  source 1..168: mol_type = other DNA
  misc_feature 1..168: note = Synthetic
atgtcaaccattactaaaaaaatatattgttctggttttctttttctttcgtacatctctaattatgaaaaagtaaatgatgaaatgtatgagatgggcgagatggacgagattgtgcgcatcgttaacgatagtatgtgcgactcggtccgcactagcctgaggtaa

SEQ ID NO: 4210 - DNA, 63 bp, synthetic construct
  misc_feature 1..63: note = Synthetic
  source 1..63: mol_type = other DNA
atgataaaaacatttaccggcatcataaacacggagtttattttatgcctcaaccattactaa

SEQ ID NO: 4211 - DNA, 195 bp, synthetic construct
  source 1..195: mol_type = other DNA
  misc_feature 1..195: note = Synthetic
acgacgggcgcgcttctcatagcatataaatcatggccgcgccctcgctcgagggcgccgtgctgcgtcacaagcaccgcctgctgcagctccgcgacgaactcgacaaggaggctttcttcctcgacgaggcctacagcgcgctgcacaccgagcgctacgacgacatgcacgactcggtccgcactagcctga

SEQ ID NO: 4212 - DNA, 99 bp, synthetic construct
  source 1..99: mol_type = other DNA
  misc_feature 1..99: note = Synthetic
acgaactcgacaaggaggctttcttcctcgacgaggcctacagcgcgctgcacaccgagcgctacgacgacatgcacgactcggtccgcactagcctga

SEQ ID NO: 4213 - DNA, 222 bp, synthetic construct
  misc_feature 1..222: note = Synthetic
  source 1..222: mol_type = other DNA
gtggatcctaggcattccttgatcgcctctgagtgcttgacctactttaatgaactgaaggaccttgtaaggaagtgggtaccagatgaggacacctatgtggagcaaaagacggttttactctcacaggtcaatttttcctccattgtgaccgaagggttgaagctcctctcaactctgatagaggttgactccgactcggtccgcactagcctgaggtaa

SEQ ID NO: 4214 - DNA, 183 bp, synthetic construct
  source 1..183: mol_type = other DNA
  misc_feature 1..183: note = Synthetic
ctgaggaacaagtgtgtggtgatggaggagttgctgtccgagagcaaagatcttgtgagcaggtacctcttagaggatgagaggctttcaaaacagaagctagccttcctagttcagacagagccgagaatgctattaattgagggccttaagttgttgtcactccgactcggtccgcactag

SEQ ID NO: 4215 - DNA, 153 bp, synthetic construct
  source 1..153: mol_type = other DNA
  misc_feature 1..153: note = Synthetic
ttgctgtccgagagcaaagatcttgtgagcaggtacctcttagaggatgagaggctttcaaaacagaagctagccttcctagttcagacagagccgagaatgctattaattgagggccttaagttgttgtcactccgactcggtccgcactag

SEQ ID NO: 4216 - DNA, 93 bp, synthetic construct
  source 1..93: mol_type = other DNA
  misc_feature 1..93: note = Synthetic
ctgagtcacttcaccacatcagcaaagggagatgtcttgagggatgccaaatcactggtggatggtttggcgactcggtccgcactagcctga

SEQ ID NO: 4217 - DNA, 168 bp, synthetic construct
  source 1..168: mol_type = other DNA
  misc_feature 1..168: note = Synthetic
atgaaatccttgaaaaaattaaaagaattagaaacctcagacgtattcaacaccttacacgtccgaactatcctaaaggtgatcaagattgataagtgtgtatccctcgcacgacattcgttagtaaatataacagtaggcgactcggtccgcactagcctgaggtaa

SEQ ID NO: 4218 - DNA, 213 bp, synthetic construct
  source 1..213: mol_type = other DNA
  misc_feature 1..213: note = Synthetic
acgagccgattttcgattcgaacattttctccccaaacccggagagccaaatccttgaaaaaattaaaagaattagaaacctcagacgtattcaacaccttacacgtccgaactatcctaaaggtgatcaagattgataagtgtgtatccctcgcacgacattcgttagtaaatataacagtaggcgactcggtccgcactagcctgaggtaa

SEQ ID NO: 4219 - DNA, 168 bp, synthetic construct
  source 1..168: mol_type = other DNA
  misc_feature 1..168: note = Synthetic
atgaaatccttgaaaaaattaaaagaattagaaacctcagacgtattcaacatcttacacgtccgaactatcctaaaggtgatcaagattgataaatgtatatcactcgcacgacatccgttagtaaatataacagtaggcgactcggtccgcactagcctgaggtaa

SEQ ID NO: 4220 - DNA, 156 bp, synthetic construct
  misc_feature 1..156: note = Synthetic
  source 1..156: mol_type = other DNA
gtggtgactttctttcaatcaattcctgagatcatacaagaggccatcaacattgctctaattgctgttagcgtcatctgcatcatcaaaggctgtgtaaacctctggaaatgtggtctaattcaactgatggcgactcggtccgcactagcctga

SEQ ID NO: 4221 - DNA, 24 bp, synthetic construct
  misc_feature 1..24: note = Synthetic
  source 1..24: mol_type = other DNA
atgtgctgtggtgaaggcgtgtaa

SEQ ID NO: 4222 - DNA, 126 bp, synthetic construct
  source 1..126: mol_type = other DNA
  misc_feature 1..126: note = Synthetic
atggatgaatatgtccaagagttgaaagggcttattagaaagcacattcctgagaggtgcgagtttggacatcaaaaggtcacattcctatctcaggtcgactcggtccgcactagcctgaggtaa

SEQ ID NO: 4223 - DNA, 222 bp, synthetic construct
  source 1..222: mol_type = other DNA
  misc_feature 1..222: note = Synthetic
gtggatcctaggcgaaatttgacaatggatgaaaaagtctttgttttgaaagattttatcagaagacaagtgcctgacatacctgaactgtcttatcagaaggaggcattactttctcaagtcgaagtaccaatggtcttaacagagggcttcaagctcctatcatgcctggtcgagattgaatcctgcaggaacgactcggtccgcactagcctgaggtaa

SEQ ID NO: 4224 - DNA, 222 bp, synthetic construct
  misc_feature 1..222: note = Synthetic
  source 1..222: mol_type = other DNA
gtggatcctaggcgaaatttgacagccgatgaaaaagtctttgttttgaaagattttatcagaagacaagtgcctgacatacctgaactgtcttatcagaaggaggcattactttctcaagtcgaagtaccaatggtcttaacagagggcttcaagctcctatcatgcctggtcgagattgaatcctgcaggaacgactcggtccgcactagcctgaggtaa

SEQ ID NO: 4225 - DNA, 42 bp, synthetic construct
  misc_feature 1..42: note = Synthetic
  source 1..42: mol_type = other DNA
acgctgtacgttcacttctttactgactcagaggaagtgtga

SEQ ID NO: 4226 - DNA, 165 bp, synthetic construct
  source 1..165: mol_type = other DNA
  misc_feature 1..165: note = Synthetic
atcatgggtcaacttgttagtttctttcaggacatacaactctttttccaagaggctctcaatgtggctctagctgttgtcaccgtcctggctatcattaaggggcttgtgaacctttggaaatcaggtctcttccagttcccgactcggtccgcactagcctga

SEQ ID NO: 4227 - DNA, 222 bp, synthetic construct
  source 1..222: mol_type = other DNA
  misc_feature 1..222: note = Synthetic
gtggatcctaggcggcacttgaccatggatgaaactgtgtctgaactcaaagacttggttagaaaacacattccaaataggcatgagtttgcccaccagaaagatgccttcctgtcacactgtcattcagggtcactgcttcaagaaggttttaaacttctctccaaccttgtggagttagagtcctgtgaatccgactcggtccgcactagcctgaggtaa

SEQ ID NO: 4228 - DNA, 99 bp, synthetic construct
  source 1..99: mol_type = other DNA
  misc_feature 1..99: note = Synthetic
atgagtttgcccaccagaaagatgccttcctgtcacactgtcattcagggtcactgcttcaagaaggttttaaacttctctccaaccttgtggagttag

SEQ ID NO: 4229 - DNA, 153 bp, synthetic construct
  source 1..153: mol_type = other DNA
  misc_feature 1..153: note = Synthetic
atgaaactgtgtctgaactcaaagacttggttagaaaacacattccaaataggcatgagtttgcccaccagaaagatgccttcctgtcacactgtcattcagggtcactgcttcaagaaggttttaaacttctctccaaccttgtggagttag

SEQ ID NO: 4230 - DNA, 222 bp, synthetic construct
  source 1..222: mol_type = other DNA
  misc_feature 1..222: note = Synthetic
gtggatcctaggcggcacttgagcatggaggaatcagtaaatgaaataaaaagccttattagaaagcattttccagaaagacaggagctagcataccaaagggacatctttttatctcaacatcaccccagctctctgttgttggaagggttcaaacttctgtcaagtttagtagagcttgagtcctgtgaggccgactcggtccgcactagcctgaggtaa

SEQ ID NO: 4231 - DNA, 222 bp, synthetic construct
  misc_feature 1..222: note = Synthetic
  source 1..222: mol_type = other DNA
gtggatcctaggcggcacttgagcgccgaggaatcagtaaatgaaataaaaagccttattagaaagcattttccagaaagacaggagctagcataccaaagggacatctttttatctcaacatcaccccagctctctgttgttggaagggttcaaacttctgtcaagtttagtagagcttgagtcctgtgaggccgactcggtccgcactagcctgaggtaa

SEQ ID NO: 4232 - DNA, 36 bp, synthetic construct
  misc_feature 1..36: note = Synthetic
  source 1..36: mol_type = other DNA
gtggatcctaggcgtttcttgagcttgcgcaaatag

SEQ ID NO: 4233 - DNA, 180 bp, synthetic construct
  source 1..180: mol_type = other DNA
  misc_feature 1..180: note = Synthetic
atagtgattcagttaattttcagacatactcagaacccgatcatggggcaactgatctccttctttggagagattccaaccattctgcaagaggctctcaacattgcactcattgcagtcagcatcattgcaaccatcaagggtgtcgtgaatgtctggaaacgactcggtccgcactag

SEQ ID NO: 4234 - DNA, 48 bp, synthetic construct
  misc_feature 1..48: note = Synthetic
  source 1..48: mol_type = other DNA
ttgcactcattgcagtcagcatcattgcaaccatcaagggtgtcgtga

SEQ ID NO: 4235 - DNA, 156 bp, synthetic construct
  source 1..156: mol_type = other DNA
  misc_feature 1..156: note = Synthetic
atggggcagctgatctcgtttttcggggaaattccatcaataatacacgaggccctgaacattgcattaatagcagtcagcatcatatcaattctgaagggtgttatcaacatttgggggagtggcctactgcagttccgactcggtccgcactag

SEQ ID NO: 4236 - DNA, 150 bp, synthetic construct
  misc_feature 1..150: note = Synthetic
  source 1..150: mol_type = other DNA
atgggacagttaatcagtttctttcaggacataccgatcttctttgaagaagcactcaatgtagccttggctgtggttacactgcttgctattataaagggcattgtgaatgtttggaaatcaggaacgactcggtccgcactagcctga

SEQ ID NO: 4237 - DNA, 162 bp, synthetic construct
  source 1..162: mol_type = other DNA
  misc_feature 1..162: note = Synthetic
aagcctccaacaatgtccaattcaaaggaggtgaagtccttcttgtggacacagagcctgaggagagaactctcagggtactgctccaacataaagatccaagtcatcaaggatgctcaagcacttcttcatgggctggacttccgactcggtccgcactag

SEQ ID NO: 4238 - DNA, 51 bp, synthetic construct
  misc_feature 1..51: note = Synthetic
  source 1..51: mol_type = other DNA
atgtcaaagtgcaggtcattaaagatgcgcaagcactcttacatggcctag

SEQ ID NO: 4239 - DNA, 177 bp, synthetic construct
  misc_feature 1..177: note = Synthetic
  source 1..177: mol_type = other DNA
gtggatcctaggctactttggttgcgcatattggaaaactattccgaaacgccagcaattctaaagaagtcaagtcctttttgtggacccagtcccttagaagggaactgtcaggattttgttcaaatgtcaaagtgcaggtcattaaagatgcgcaagcactcttacatggcctag

SEQ ID NO: 4240 - DNA, 147 bp, synthetic construct
  source 1..147: mol_type = other DNA
  misc_feature 1..147: note = Synthetic
gtggtacccacgggatcttctcaactacttcaattgaccatgagtgatcagtcagtgccatcattccggtgggttcaatcccttagaagggggctgtctgcatggacaaccccagttaaagcagcgactcggtccgcactagcctga

SEQ ID NO: 4241 - DNA, 159 bp, synthetic construct
  source 1..159: mol_type = other DNA
  misc_feature 1..159: note = Synthetic
gtgaccctcttccaatcgatcccagagatcatagaggaggcagtcaacattgctctcattgctgttgcaataatgtgcattgttaaaggcactgtcaacctatggaagtgtggtattgtccaactgtgcatctttccgactcggtccgcactagcctga

SEQ ID NO: 4242 - DNA, 132 bp, synthetic construct
  misc_feature 1..132: note = Synthetic
  source 1..132: mol_type = other DNA
atcatagaggaggcagtcaacattgctctcattgctgttgcaataatgtgcattgttaaaggcactgtcaacctatggaagtgtggtattgtccaactgtgcatctttccgactcggtccgcactagcctga

SEQ ID NO: 4243 - DNA, 78 bp, synthetic construct
  misc_feature 1..78: note = Synthetic
  source 1..78: mol_type = other DNA
ctgcagctaaacatggaggaagacatagcctgtgtcaaagacttagtatcaaaatcgactcggtccgcactagcctga

SEQ ID NO: 4244 - DNA, 78 bp, synthetic construct
  source 1..78: mol_type = other DNA
  misc_feature 1..78: note = Synthetic
ctgcagctaaacatggaggaagacgccgcctgtgtcaaagacttagtatcaaaatcgactcggtccgcactagcctga

SEQ ID NO: 4245 - DNA, 198 bp, synthetic construct
  source 1..198: mol_type = other DNA
  misc_feature 1..198: note = Synthetic
atggaggaatacgtttccgaatttaaagacatggtaagaaaatgggttccagaatgggaagagttatctgagcagaagaataacgtgcttgcacaggttaaagacagagccatcacaatagaaggcctgaaactcttatccatgttggtagaggtggactcatgtaagaacgactcggtccgcactagcctgaggtaa

SEQ ID NO: 4246 - DNA, 213 bp, synthetic construct
  misc_feature 1..213: note = Synthetic
  source 1..213: mol_type = other DNA
aggcatttcttgatcgccgaggaatacgtttccgaatttaaagacatggtaagaaaatgggttccagaatgggaagagttatctgagcagaagaataacgtgcttgcacaggttaaagacagagccatcacaatagaaggcctgaaactcttatccatgttggtagaggtggactcatgtaagaacgactcggtccgcactagcctgaggtaa

SEQ ID NO: 4247 - DNA, 204 bp, synthetic construct
  misc_feature 1..204: note = Synthetic
  source 1..204: mol_type = other DNA
ttgactatggatgaaaagatcaattctttgaaagactttgtgagaaagcaggttcctgaaatacctgaactttcctatcaaagagaacttttgttatctcaggtggagatgggcatgattttaatggaaggctttaagttactttcctgtttagttgagatagagtcctgtaagaacgactcggtccgcactagcctgaggtaa

SEQ ID NO: 4248 - DNA, 186 bp, synthetic construct
  misc_feature 1..186: note = Synthetic
  source 1..186: mol_type = other DNA
atcaattctttgaaagactttgtgagaaagcaggttcctgaaatacctgaactttcctatcaaagagaacttttgttatctcaggtggagatgggcatgattttaatggaaggctttaagttactttcctgtttagttgagatagagtcctgtaagaacgactcggtccgcactagcctgaggtaa

SEQ ID NO: 4249 - DNA, 150 bp, synthetic construct
  misc_feature 1..150: note = Synthetic
  source 1..150: mol_type = other DNA
attgcaataatggggcttaggtattcaaaggaagtcagggatcggtatggtgacaaagagccagagggaagaattcctattacattgaacatgcctcagactctttatggtagatacaattgcaaatcttgccgactcggtccgcactag

SEQ ID NO: 4250 - DNA, 150 bp, synthetic construct
  source 1..150: mol_type = other DNA
  misc_feature 1..150: note = Synthetic
atgccgggacttaagtggccgtataacaccccgcgaagacgcggggtactcgcaacgcctgcgggggtcctggagggccgcgggggatcgataattcgccgctccctacagcgcacgacagtcgactcggtccgcactagcctgaggtaa

SEQ ID NO: 4251 - DNA, 201 bp, synthetic construct
  misc_feature 1..201: note = Synthetic
  source 1..201: mol_type = other DNA
ctggcaaacggaaagatggcggacaacatgaccacaacacaaattgaggtgggtccgggagcaaccaatgccactataaactttgaagcaggaattctggagtgctatgaaaggttttcatggcaaagagcccttgactatcctggtcaagaccgcctacacagactaaaacgcgactcggtccgcactagcctgaggtaa

SEQ ID NO: 4252 - DNA, 201 bp, synthetic construct
  source 1..201: mol_type = other DNA
  misc_feature 1..201: note = Synthetic
ctggcaaacggaaagatggcggacaacatgaccacaacacaaattgagtggaggatgaaaaagatggccatcggatcctcaactcactcttcgagcgttttgatgaaggacattcaaagccaattcgagcagctgaaactgcggtgggagtcttatcccaatttggtcaagagcgactcggtccgcactagcctgaggtaa

SEQ ID NO: 4253 - DNA, 201 bp, synthetic construct
  source 1..201: mol_type = other DNA
  misc_feature 1..201: note = Synthetic
ctggcaaacggaaaggccgcggacaacatgaccacaacacaaattgaggtgggtccgggagcaaccaatgccactataaactttgaagcaggaattctggagtgctatgaaaggttttcatggcaaagagcccttgactatcctggtcaagaccgcctacacagactaaaacgcgactcggtccgcactagcctgaggtaa

SEQ ID NO: 4254 - DNA, 201 bp, synthetic construct
  misc_feature 1..201: note = Synthetic
  source 1..201: mol_type = other DNA
ctggcaaacggaaaggccgcggacaacatgaccacaacacaaattgagtggaggatgaaaaagatggccatcggatcctcaactcactcttcgagcgttttgatgaaggacattcaaagccaattcgagcagctgaaactgcggtgggagtcttatcccaatttggtcaagagcgactcggtccgcactagcctgaggtaa

SEQ ID NO: 4255 - DNA, 39 bp, synthetic construct
  source 1..39: mol_type = other DNA
  misc_feature 1..39: note = Synthetic
ctggtggaccccacgtacgtgatagacaagtatgtctag

SEQ ID NO: 4256 - DNA, 168 bp, synthetic construct
  misc_feature 1..168: note = Synthetic
  source 1..168: mol_type = other DNA
atgtctagcgtgagcggcgtgcgcacgccgcgcgaacgacgctcggccttgcgctccctgctccgcaagcgccgccaacgcgagctggccagcaaagtggcgtcaacggtgaacggcgctacgtcggccaacaaccacggcgactcggtccgcactagcctgaggtaa

SEQ ID NO: 4257 - DNA, 39 bp, synthetic construct
  misc_feature 1..39: note = Synthetic
  source 1..39: mol_type = other DNA
ctggtggaccccacgtacgtgatagacaagtgcctctag

SEQ ID NO: 4258 - DNA, 120 bp, synthetic construct
  source 1..120: mol_type = other DNA
  misc_feature 1..120: note = Synthetic
ttgcgctccctgctccgcaagcgccgccaacgcgagctggccagcaaagtggcgtcaacggtgaacggcgctacgtcggccaacaaccacggcgactcggtccgcactagcctgaggtaa

SEQ ID NO: 4259 - DNA, 96 bp, synthetic construct
  misc_feature 1..96: note = Synthetic
  source 1..96: mol_type = other DNA
atggggaaagcccagtccaaacaaaaccacatagcccaaggctctgagcccaggacggagctgatacccgactcggtccgcactagcctgaggtaa

SEQ ID NO: 4260 - DNA, 192 bp, synthetic construct
  misc_feature 1..192: note = Synthetic
  source 1..192: mol_type = other DNA
ttgtctttttttgaggccttgtgcgctgtacttctccaaatgggaaacaagcaagccaaagccccagaatcaaaagacagtccgagagccagcctgatcccagatgccacacatctagggccacagttctgtaagagctgctggttcgaaaacaagggcctggttgagtgcaaccgactcggtccgcactag

SEQ ID NO: 4261 - DNA, 174 bp, synthetic construct
  misc_feature 1..174: note = Synthetic
  source 1..174: mol_type = other DNA
ctgcactcaaagccgcatccggcaagagtcatggggaaaacgcagtccaagggacagcccagcacaaatctcctcaaggagacagaaccaaggcatccagtaataccagatgccaggggaactggccctgaattctgcaagagctgctggtcgactcggtccgcactagcctga

SEQ ID NO: 4262 - DNA, 225 bp, synthetic construct
  source 1..225: mol_type = other DNA
  misc_feature 1..225: note = Synthetic
atccccgtcccgaattaccgaggaagatcccgccgcaggagaggcatggcaggcagcggcctgaaccgccgccggcggcgggccatgcgcaggcgcctgagtggcggctttctgcccgcgctcatccccataatcgccgcggccatcggcacgatcccgggcatagcttccgttgcgctgcaggcgtcgcagcgccgcgactcggtccgcactagcctgaggtaa

SEQ ID NO: 4263 - DNA, 21 bp, synthetic construct
  misc_feature 1..21: note = Synthetic
  source 1..21: mol_type = other DNA
atgagggtttatctactttga

SEQ ID NO: 4264 - DNA, 51 bp, synthetic construct
  misc_feature 1..51: note = Synthetic
  source 1..51: mol_type = other DNA
atgtgcagatacaaaatgagaattcattcgactcggtccgcactagcctga

SEQ ID NO: 4265 - DNA, 66 bp, synthetic construct
  misc_feature 1..66: note = Synthetic
  source 1..66: mol_type = other DNA
atgacggtgatcgcatcggtgctgttaacaagttcatcagccagtccggcatcaatggcctcctga

SEQ ID NO: 4266 - DNA, 117 bp, synthetic construct
  misc_feature 1..117: note = Synthetic
  source 1..117: mol_type = other DNA
acgcgtctttccgcgaagaataccatcagctccagccccacgccgcacagacccaggacgccgaacaccactgccgccgagatcgacagacccacgactcggtccgcactagcctga

SEQ ID NO: 4267 - DNA, 168 bp, synthetic construct
  source 1..168: mol_type = other DNA
  misc_feature 1..168: note = Synthetic
atgggggacaccgtatccaaggtggaggtgctcgacacgccgacgcccggcgagtacgcgctgcgcgtcacacacacgagcgccacggacaccttcgccttcgcggaagaaacagaaaccttctccgacccgaagctgaacgactcggtccgcactagcctgaggtaa

SEQ ID NO: 4268 - DNA, 147 bp, synthetic construct
  source 1..147: mol_type = other DNA
  misc_feature 1..147: note = Synthetic
gtggaggtgctcgacacgccgacgcccggcgagtacgcgctgcgcgtcacacacacgagcgccacggacaccttcgccttcgcggaagaaacagaaaccttctccgacccgaagctgaacgactcggtccgcactagcctgaggtaa

SEQ ID NO: 4269 - DNA, 183 bp, synthetic construct
  misc_feature 1..183: note = Synthetic
  source 1..183: mol_type = other DNA
ctgaggaacaagtgtgtggtggccgaggagttgctgtccgagagcaaagatcttgtgagcaggtacctcttagaggatgagaggctttcaaaacagaagctagccttcctagttcagacagagccgagaatgctattaattgagggccttaagttgttgtcactccgactcggtccgcactag

SEQ ID NO: 4270 - DNA, 144 bp, synthetic construct
  source 1..144: mol_type = other DNA
  misc_feature 1..144: note = Synthetic
atcaccttctttcaggaggtgccacacatcatagaagaagtgatgaacatagtcctcatcactctgtcccttcttgcaatactcaaaggaatttacaacctggcaacatgtggactcgactcggtccgcactagcctgaggtaa

SEQ ID NO: 4271 - DNA, 204 bp, synthetic construct
  misc_feature 1..204: note = Synthetic
  source 1..204: mol_type = other DNA
gtgcactcttctttattgggctggattacacaaaacttttcaagcatgggcaactgcaatcgaactcagaaacccagttcgtcttctaacaacctcgagaagccaccacaagctgcagaatttagaagaacggcagagcccagtctatatgggaggtacaattgcaaatgttgttgcgactcggtccgcactagcctgaggtaa

SEQ ID NO: 4272 - DNA, 57 bp, synthetic construct
  source 1..57: mol_type = other DNA
  misc_feature 1..57: note = Synthetic
gtggatcctaggcagttacagactctgcgcttagaggctcaaataccactactttag

SEQ ID NO: 4273 - DNA, 144 bp, synthetic construct
  source 1..144: mol_type = other DNA
  misc_feature 1..144: note = Synthetic
atgggtctgagatactccaaagaggtcagggaccgtcacggcgacaaagacccagaagggaggatcccaatcactcaaaccatgcctcagacactgtacggcaggtacaactgtaaatcatcgactcggtccgcactagcctga

SEQ ID NO: 4274 - DNA, 222 bp, synthetic construct
  source 1..222: mol_type = other DNA
  misc_feature 1..222: note = Synthetic
gtggatcctaggcattcctttatcatgagtgaataccttgatgaattgaaggaactcattaggaaatggatacctgacgaagagatgtatatagaacagaagaccagtttcttgtctcaagtcaatctcagatcagtagtcattgaaggcctaaaattattgtcaattattatagagatagattcctgcaagaacgactcggtccgcactagcctgaggtaa

SEQ ID NO: 4275 - DNA, 222 bp, synthetic construct
  source 1..222: mol_type = other DNA
  misc_feature 1..222: note = Synthetic
gtggatcctaggcattcctttatcgccagtgaataccttgatgaattgaaggaactcattaggaaatggatacctgacgaagagatgtatatagaacagaagaccagtttcttgtctcaagtcaatctcagatcagtagtcattgaaggcctaaaattattgtcaattattatagagatagattcctgcaagaacgactcggtccgcactagcctgaggtaa

SEQ ID NO: 4276 - DNA, 222 bp, synthetic construct
  source 1..222: mol_type = other DNA
  misc_feature 1..222: note = Synthetic
gtggatcctaggctttactggtcattgcgcaaagtgaaatcttttcaagtcccaatgggtcttagatattcaagagaggtcaaacaacggtatggtgaaaaagaactagaaggtagaatacccatcactttagatatgcctcagactctgtatgggagatacaattgcaaatcttgttggtttgccaacaaaggcgactcggtccgcactagcctgaggtaa

SEQ ID NO: 4277 - DNA, 222 bp, synthetic construct
  source 1..222: mol_type = other DNA
  misc_feature 1..222: note = Synthetic
gtggatcctaggctttactggtcattgcgcaaagtgaaatcttttcaagtcccagccggtcttagatattcaagagaggtcaaacaacggtatggtgaaaaagaactagaaggtagaatacccatcactttagatatgcctcagactctgtatgggagatacaattgcaaatcttgttggtttgccaacaaaggcgactcggtccgcactagcctgaggtaa

SEQ ID NO: 4278 - DNA, 75 bp, synthetic construct
  source 1..75: mol_type = other DNA
  misc_feature 1..75: note = Synthetic
atgtcatacaccgccttcagagcagccggacctatctgcccgttcgtgccgtcgttgcgactcggtccgcactag

SEQ ID NO: 4279 - DNA, 96 bp, synthetic construct
  source 1..96: mol_type = other DNA
  misc_feature 1..96: note = Synthetic
atggtacggatactcgcaccgaaaatgtcagccagctgctttttgttgacttccattgttcattccaccgactcggtccgcactagcctgaggtaa

SEQ ID NO: 4280 - DNA, 72 bp, synthetic construct
  misc_feature 1..72: note = Synthetic
  source 1..72: mol_type = other DNA
atgtcagccagctgctttttgttgacttccattgttcattccaccgactcggtccgcactagcctgaggtaa

SEQ ID NO: 4281 - DNA, 210 bp, synthetic construct
  misc_feature 1..210: note = Synthetic
  source 1..210: mol_type = other DNA
atgaacgctatcgacgcaatcaaagcactgccaatctgtgaacttgacaagcgtcaaggtatgcttatcgacttactggtcgagatggtcaacagcgagacgtgtgatggcgagctaaccgaactaaatcaggcacttgagcatcaagattggtggactaccttgaagtgtctcacggctgacgcagcgactcggtccgcactagcctga

SEQ ID NO: 4282 - DNA, 90 bp, synthetic construct
  misc_feature 1..90: note = Synthetic
  source 1..90: mol_type = other DNA
atgaggacgacgactactattactatagggaggacgaaccgcgacaacacggtgaaccgaactatgtcgactcggtccgcactagcctga

SEQ ID NO: 4283 - DNA, 99 bp, synthetic construct
  source 1..99: mol_type = other DNA
  misc_feature 1..99: note = Synthetic
ttgtatcacagaagtgaagaccaactgcagcgcacgctggaggacgccgaggcactgttcaataaatattgctcggcgactcggtccgcactagcctga

SEQ ID NO: 4284 - DNA, 168 bp, synthetic construct
  misc_feature 1..168: note = Synthetic
  source 1..168: mol_type = other DNA
atggagacaagtgtgtgtgaggcaaaggacctcatttccaaatacttagccaatgatcagaggctgtccagacagaagttgaactttctgatccaatctgagcctcaaaacttattgattgagggcctcaagctgctttctctatgcatacgactcggtccgcactag

SEQ ID NO: 4285 - DNA, 156 bp, synthetic construct
  source 1..156: mol_type = other DNA
  misc_feature 1..156: note = Synthetic
atggcccggtttgatattgatactggcggctatccagtacagcgccgtaccaagataacgcgtgctggtttcaacctgtctgatatccgcaatctgcttttccgagaaccagaactcaaactgtaccgcgactcggtccgcactagcctgaggtaa

SEQ ID NO: 4286 - DNA, 171 bp, synthetic construct
  misc_feature 1..171: note = Synthetic
  source 1..171: mol_type = other DNA
ataaaagtaataatcatggcccggtttgatattgatactggcggctatccagtacagcgccgtaccaagataacgcgtgctggtttcaacctgtctgatatccgcaatctgcttttccgagaaccagaactcaaactgtaccgcgactcggtccgcactagcctgaggtaa

SEQ ID NO: 4287 - DNA, 153 bp, synthetic construct
  source 1..153: mol_type = other DNA
  misc_feature 1..153: note = Synthetic
aagggctgctcggcggccacggcgtcttcctcctcgtcgtcgccgccgtcgcgccttcctctgcctgggcacgcgcgtcggccgcgtcgcaaacgctgcttggtacccgaggtcttttgcacgcgcgactcggtccgcactagcctgaggtaa

SEQ ID NO: 4288 - DNA, 51 bp, synthetic construct
  source 1..51: mol_type = other DNA
  misc_feature 1..51: note = Synthetic
atgctgaccacggacatgggcccgagcgcgcgcgtccacgccagcggctga

SEQ ID NO: 4289 - DNA, 216 bp, synthetic construct
  source 1..216: mol_type = other DNA
  misc_feature 1..216: note = Synthetic
aagccgtctatccaacgttccgcgttcgcctcttatatacactctgcaatgcagtccgactctgcccctctacccagggtggaatatgtgttcgaaacaagcaaatttagaatgacgtcgagagcaaatgaagccagactcagactgacaaatgagtgtccgatactggtgagaccccacgagccgttcgactcggtccgcactagcctgaggtaa

SEQ ID NO: 4290 - DNA, 96 bp, synthetic construct
  misc_feature 1..96: note = Synthetic
  source 1..96: mol_type = other DNA
aaggtaatggaggacctatgtaaggaagatcttgtgtcctcggttgatgtcagcggtggtaaggagttcgactcggtccgcactagcctgaggtaa

SEQ ID NO: 4291 - DNA, 21 bp, synthetic construct
  source 1..21: mol_type = other DNA
  misc_feature 1..21: note = Synthetic
atgccttttagcgtagtgtaa

SEQ ID NO: 4292 - DNA, 141 bp, synthetic construct
  source 1..141: mol_type = other DNA
  misc_feature 1..141: note = Synthetic
atggtgtccgactacgacccggcggtgctcgtgtttatcttctgcatggcgctggccgcgaacttctgcatgcccatgaagacgaagctgagcaccatcttcgtgctgcagtccgtcgcgactcggtccgcactagcctga

SEQ ID NO: 4293 - DNA, 96 bp, synthetic construct
  misc_feature 1..96: note = Synthetic
  source 1..96: mol_type = other DNA
ctgaacaagcactacgagctcaccaaaggccagctctcgatcctgcgcacggtcaacgacaagctgctcgactcggtccgcactagcctgaggtaa

SEQ ID NO: 4294 - DNA, 30 bp, synthetic construct
  misc_feature 1..30: note = Synthetic
  source 1..30: mol_type = other DNA
atgtgttggcctttaggccgtcattggtga

SEQ ID NO: 4295 - DNA, 168 bp, synthetic construct
  misc_feature 1..168: note = Synthetic
  source 1..168: mol_type = other DNA
atggaactcgctaatgtcttcctagagaccgacgaaggcaagctcccgctgcgcttcgagctgcccccgccatgccaacgcaccggcagggaaatgcgggaggctctcgagcacttcctttccgtgcttgacaagtacatcgactcggtccgcactagcctgaggtaa

SEQ ID NO: 4296 - DNA, 69 bp, synthetic construct
  misc_feature 1..69: note = Synthetic
  source 1..69: mol_type = other DNA
acgttcccgccctcacagatcacggaaccctgccgctgcgcagcagtatcagtggagttcagcgcgtga

SEQ ID NO: 4297 - DNA, 18 bp, synthetic construct
  misc_feature 1..18: note = Synthetic
  source 1..18: mol_type = other DNA
atgctgacccgcccctga

SEQ ID NO: 4298 - DNA, 141 bp, synthetic construct
  misc_feature 1..141: note = Synthetic
  source 1..141: mol_type = other DNA
atggagttctgctgcacggaaacccttcgggttgtccgcctcagccaaaacgctaccataccaaccagaggatctcccggtgccgcaggattagacctatgtagcgcgtacgacgactcggtccgcactagcctgaggtaa

SEQ ID NO: 4299 - DNA, 219 bp, synthetic construct
  misc_feature 1..219: note = Synthetic
  source 1..219: mol_type = other DNA
acggaaaaaggcgggaattacgtcacctgtgcacccccacccagcaccgctatgagcaaagaaattcccacgccttacatgtggagctaccagccccagatgggcctggccgccggcgccgcccaggactactccacccgcatgaattggctcagcgccgggcccgggatgatctcacgggtgaatgacatcgactcggtccgcactagcctgaggtaa

SEQ ID NO: 4300 - DNA, 219 bp, synthetic construct
  misc_feature 1..219: note = Synthetic
  source 1..219: mol_type = other DNA
acggaaaaaggcgggaattacgtcacctgtgcacccccacccagcaccgctgccagcaaagaaattcccacgccttacatgtggagctaccagccccagatgggcctggccgccggcgccgcccaggactactccacccgcatgaattggctcagcgccgggcccgggatgatctcacgggtgaatgacatcgactcggtccgcactagcctgaggtaa

SEQ ID NO: 4301 - DNA, 138 bp, synthetic construct
  misc_feature 1..138: note = Synthetic
  source 1..138: mol_type = other DNA
aaggcgggaattacgtcacctgtgcacccccacccagcaccgctgccagcaaagaaattcccacgccttacatgtggagctaccagccccagatgggcctggccgccggcgccgcccaggactactccacccgcatga

SEQ ID NO: 4302 - DNA, 210 bp, synthetic construct
  misc_feature 1..210: note = Synthetic
  source 1..210: mol_type = other DNA
aagatactgagcagtctccgatgttgtgtcccagcggcaagtatgtccaagcgcaaatacaaggaagagatgctccaggtcatcgcgcctgaaatctacggtccgccggtgaaggatgaaaaaaagccccgcaaaatcaagcgggtcaaaaataacaaaaaggaagaagatgacgatgatggcgactcggtccgcactagcctgaggtaa

SEQ ID NO: 4303 - DNA, 72 bp, synthetic construct
  source 1..72: mol_type = other DNA
  misc_feature 1..72: note = Synthetic
atgttgtgtcccagcggcaagtatgtccaagcgcaaatacaaggaagagatgctccaggtcatcgcgcctga

SEQ ID NO: 4304 - DNA, 210 bp, synthetic construct
  source 1..210: mol_type = other DNA
  misc_feature 1..210: note = Synthetic
aagatactgagcagtctccgatgttgtgtcccagcggcaagtgcctccaagcgcaaatacaaggaagagatgctccaggtcatcgcgcctgaaatctacggtccgccggtgaaggatgaaaaaaagccccgcaaaatcaagcgggtcaaaaataacaaaaaggaagaagatgacgatgatggcgactcggtccgcactagcctgaggtaa

SEQ ID NO: 4305 - DNA, 72 bp, synthetic construct
  source 1..72: mol_type = other DNA
  misc_feature 1..72: note = Synthetic
atgttgtgtcccagcggcaagtgcctccaagcgcaaatacaaggaagagatgctccaggtcatcgcgcctga

SEQ ID NO: 4306 - DNA, 165 bp, synthetic construct
  source 1..165: mol_type = other DNA
  misc_feature 1..165: note = Synthetic
atggggcagatagtcaccttctttcaagaggtgccacacatccttgaagaagtgatgaacattgtgctgatgaccctctcaatcttggccatcctaaagggcatctacaatgtgatgacctgtggaatcatcggtttgataacatttcgactcggtccgcactag

SEQ ID NO: 4307 - DNA, 126 bp, synthetic construct
  source 1..126: mol_type = other DNA
  misc_feature 1..126: note = Synthetic
atccttgaagaagtgatgaacattgtgctgatgaccctctcaatcttggccatcctaaagggcatctacaatgtgatgacctgtggaatcatcggtttgataacatttcgactcggtccgcactag

SEQ ID NO: 4308 - DNA, 117 bp, synthetic construct
  misc_feature 1..117: note = Synthetic
  source 1..117: mol_type = other DNA
ctggggtccctgtcgcctcccaaccccctaagacccaccccccgtcctatgcgaggttggtcgcccgtctctgctacgccgctgacccccgactcggtccgcactagcctgaggtaa

SEQ ID NO: 4309 - DNA, 48 bp, synthetic construct
  source 1..48: mol_type = other DNA
  misc_feature 1..48: note = Synthetic
atgctgtttcgcccctccgtaggcgccaggtaccgcggtggcacgtaa

SEQ ID NO: 4310 - DNA, 111 bp, synthetic construct
  misc_feature 1..111: note = Synthetic
  source 1..111: mol_type = other DNA
atggacaaagtgctgaatagggaggaatccatggagcttatggatttattaggccttgataggtctgcatgggggaacattcccgactcggtccgcactagcctgaggtaa

SEQ ID NO: 4311 - DNA, 21 bp, synthetic construct
  source 1..21: mol_type = other DNA
  misc_feature 1..21: note = Synthetic
gtgggtgcttcggggacttga

SEQ ID NO: 4312 - DNA, 210 bp, synthetic construct
  misc_feature 1..210: note = Synthetic
  source 1..210: mol_type = other DNA
acgactccatttactttaaataatttacgagatcaaaataaaatgactctgcgcatcaaactcgagaagctcaagcagatcgtaacctacttctcggagttcagcgaggaggtctcggtgaacgtggacgtcggcgatggactcatgtacatattcgcggcactgggcgggtccgtgaacatcgactcggtccgcactagcctgaggtaa

SEQ ID NO: 4313 - DNA, 51 bp, synthetic construct
  misc_feature 1..51: note = Synthetic
  source 1..51: mol_type = other DNA
acgtcggcgatggactcatgtacatattcgcggcactgggcgggtccgtga

SEQ ID NO: 4314 - DNA, 210 bp, synthetic construct
  source 1..210: mol_type = other DNA
  misc_feature 1..210: note = Synthetic
acgactccatttactttaaataatttacgagatcaaaataaagccactctgcgcatcaaactcgagaagctcaagcagatcgtaacctacttctcggagttcagcgaggaggtctcggtgaacgtggacgtcggcgatggactcatgtacatattcgcggcactgggcgggtccgtgaacatcgactcggtccgcactagcctgaggtaa

SEQ ID NO: 4315 - DNA, 150 bp, synthetic construct
  misc_feature 1..150: note = Synthetic
  source 1..150: mol_type = other DNA
gtgcaaacactgacagcgcgggcgaggcaggaacggatgcggggaccggcacggacgtgggcgctctccttgtctaacgccctcctctcacgccctctcgaggcggaaagtcgtgcgcgttcggaacgcgtgaggaggcggcactgctag

SEQ ID NO: 4316 - DNA, 201 bp, synthetic construct
  misc_feature 1..201: note = Synthetic
  source 1..201: mol_type = other DNA
ctggtgtttggagtgccaggaaagtggggtggggcctcgctgtgtagattgttgctcatgcttgcaatgtgctgcggggtgtcaaggggctcccaaacgctcccagccggaggcaggcgtggccagcgccgccgtgacaattcagcccagtggagcactcaacaacgccccgacgactcggtccgcactagcctgaggtaa

SEQ ID NO: 4317 - DNA, 84 bp, synthetic construct
  source 1..84: mol_type = other DNA
  misc_feature 1..84: note = Synthetic
atggcccggtactgggggtgcgccgtgaaggcggcggcgcagtccgccttcagcgcctccaccgcgtcgcccgaggagctgtag

SEQ ID NO: 4318 - DNA, 48 bp, synthetic construct
  misc_feature 1..48: note = Synthetic
  source 1..48: mol_type = other DNA
attgacagcttttattccaacgtctctgactgggaggtgattctctag

SEQ ID NO: 4319 - DNA, 27 bp, synthetic construct
  source 1..27: mol_type = other DNA
  misc_feature 1..27: note = Synthetic
atgctgtggtccagcccctacatatag

SEQ ID NO: 4320 - DNA, 210 bp, synthetic construct
  source 1..210: mol_type = other DNA
  misc_feature 1..210: note = Synthetic
ctggcgccggtggtgttctaccgctcgggcggcgagggcaaagtcaccttcgcggttaagaagatcaccatgccgcgcgagtgctcgctgaccgtgctcggtctcgagggcgagcagacgtgtgtgcgcatgagcgagactcagcccacattcaccgaggagcaggacgtgcgcggcctgggcgtcgtcgatcgactcggtccgcactag

SEQ ID NO: 4321 - DNA, 42 bp, synthetic construct
  source 1..42: mol_type = other DNA
  misc_feature 1..42: note = Synthetic
acgtcacccttggcacctgtcctttgcccttgtcatgagtaa

SEQ ID NO: 4322 - DNA, 168 bp, synthetic construct
  source 1..168: mol_type = other DNA
  misc_feature 1..168: note = Synthetic
atgagtaaagagattcccacgccttacatgtggagctatcagccccaaatggggttggcagcaggcgcttcccaggactactccacccgcatgaattggcttagcgccgggccctcaatgatatcacgggttaatgatatcgactcggtccgcactagcctgaggtaa

SEQ ID NO: 4323 - DNA, 42 bp, synthetic construct
  misc_feature 1..42: note = Synthetic
  source 1..42: mol_type = other DNA
acgtcacccttggcacctgtcctttgcccttgtcgccagtaa

SEQ ID NO: 4324 - DNA, 114 bp, synthetic construct
  source 1..114: mol_type = other DNA
  misc_feature 1..114: note = Synthetic
ttggcagcaggcgcttcccaggactactccacccgcatgaattggcttagcgccgggccctcaatgatatcacgggttaatgatatcgactcggtccgcactagcctgaggtaa

SEQ ID NO: 4325 - DNA, 168 bp, synthetic construct
  misc_feature 1..168: note = Synthetic
  source 1..168: mol_type = other DNA
atgaagcggatacaaataaatttaattttaacgatcgcgtgtatacaattatcgactgaatctcaacccacacccgtaagtataactgaattatatacctcggccgctacccgaaagcccgatcccgccgtcgcgcccaccgactcggtccgcactagcctgaggtaa

SEQ ID NO: 4326 - DNA, 153 bp, synthetic construct
  source 1..153: mol_type = other DNA
  misc_feature 1..153: note = Synthetic
ataaatttaattttaacgatcgcgtgtatacaattatcgactgaatctcaacccacacccgtaagtataactgaattatatacctcggccgctacccgaaagcccgatcccgccgtcgcgcccaccgactcggtccgcactagcctgaggtaa

SEQ ID NO: 4327 - DNA, 57 bp, synthetic construct
  misc_feature 1..57: note = Synthetic
  source 1..57: mol_type = other DNA
atgtggcgcatacgtcgctacagctctttattacgttcatttcccttttttttctga

SEQ ID NO: 4328 - DNA, 93 bp, synthetic construct
  misc_feature 1..93: note = Synthetic
  source 1..93: mol_type = other DNA
acgttaacgccgaacgacctgtcccatgcttcgtcgtcaacgccgttgtccaccctctcgccctacgactcggtccgcactagcctgaggtaa

SEQ ID NO: 4329 - DNA, 24 bp, synthetic construct
  misc_feature 1..24: note = Synthetic
  source 1..24: mol_type = other DNA
atggcccacaaaacatccgcgtag

SEQ ID NO: 4330 - DNA, 63 bp, synthetic construct
  source 1..63: mol_type = other DNA
  misc_feature 1..63: note = Synthetic
acggtgatcgcatcggtgctgttaacaagttcatcagccagtccggcatcaatggcctcctga

SEQ ID NO: 4331 - DNA, 24 bp, synthetic construct
  source 1..24: mol_type = other DNA
  misc_feature 1..24: note = Synthetic
atgtatctgtcacagtgtatgtag

SEQ ID NO: 4332 - DNA, 30 bp, synthetic construct
  misc_feature 1..30: note = Synthetic
  source 1..30: mol_type = other DNA
aagacggtagccaccttcgtaagactgtag

SEQ ID NO: 4333 - DNA, 90 bp, synthetic construct
  misc_feature 1..90: note = Synthetic
  source 1..90: mol_type = other DNA
atagcgagattggcccacacaaacaggagtctggtatcgctcctaactttgtacacagccaagacggtagccaccttcgtaagactgtag

SEQ ID NO: 4334 - DNA, 96 bp, synthetic construct
  source 1..96: mol_type = other DNA
  misc_feature 1..96: note = Synthetic
gtgcggatcgtcgtcgaagggggcctagactcccacctgcttcgtatcttcagccagcgcccgatcctggtcccgactcggtccgcactagcctga

SEQ ID NO: 4335 - DNA, 99 bp, synthetic construct
  source 1..99: mol_type = other DNA
  misc_feature 1..99: note = Synthetic
ttgcccgggaactcattgagttcatctacttcgaactccccaaggatcaccctcaaggtccggcccacggagtgcggatttctatcgaaggcaaaatag

SEQ ID NO: 4336 - DNA, 222 bp, synthetic construct
  source 1..222: mol_type = other DNA
  misc_feature 1..222: note = Synthetic
atggcgggctgttgcgtgccggggacgggggactcttgcggcggggacggtggtgaggacggggacaggggcatttcgcggcggggacggggagttgcgggatggcgagctgttgcgtggcggggacgggggactcttgcggcggggacggggacgggggcctttcgcggcggacacggggaacacagacggcacgactcggtccgcactagcctgaggtaa

SEQ ID NO: 4337 - DNA, 180 bp, synthetic construct
  misc_feature 1..180: note = Synthetic
  source 1..180: mol_type = other DNA
ctgatgcacagtttgcaaagagctctgactggagctggaaccgagggtgagaattacttcgacatgggagctgacttgcagtggcagcctagtcgcagggctctgagcgccgcgacggcaggatgtgagcttccttacatagaagaggcggatgaagcgactcggtccgcactagcctga

SEQ ID NO: 4338 - DNA, 198 bp, synthetic construct
  misc_feature 1..198: note = Synthetic
  source 1..198: mol_type = other DNA
gtgtttggagtgccaggaaagtggggtgggatgtcgctgtgtagattgttgctcatgcttgcaatgtgctgcggggtgtcaaggggctcccaaacgctcccagccggaggcaggcgtggccagcgccgccgtgacaattcagcccagtggagcactcaacaacgccccgacgactcggtccgcactagcctgaggtaa

SEQ ID NO: 4339 - DNA, 96 bp, synthetic construct
  misc_feature 1..96: note = Synthetic
  source 1..96: mol_type = other DNA
atgcctggacagctcgctcgcgcgtcacttggggccactacgatcgtagtcttggtcaatcacggcactaggtgctttcgtcgaggttgccactag

SEQ ID NO: 4340 - DNA, 168 bp, synthetic construct
  source 1..168: mol_type = other DNA
  misc_feature 1..168: note = Synthetic
atggagtacgcgtctgaccagcttctgcctcgtgacatgcaaattttatttcccacgatctattgtagattgaacgccatcaactactgtcagtatttaaaaacctttctcgtccagcgggcacagcctgcagcctgcgacgactcggtccgcactagcctgaggtaa

SEQ ID NO: 4341 - DNA, 180 bp, synthetic construct
  misc_feature 1..180: note = Synthetic
  source 1..180: mol_type = other DNA
gtggaacccaacgccgagtacgcgtctgaccagcttctgcctcgtgacatgcaaattttatttcccacgatctattgtagattgaacgccatcaactactgtcagtatttaaaaacctttctcgtccagcgggcacagcctgcagcctgcgacgactcggtccgcactagcctgaggtaa

SEQ ID NO: 4342 - DNA, 138 bp, synthetic construct
  misc_feature 1..138: note = Synthetic
  source 1..138: mol_type = other DNA
atggataaagttttaaacagagaggaatctttgcagctaatggaccttctaggtcttgaaaggagtgcctgggggaatattcctctgatgagaaaggcatatttaaaaaaatgcaaggagcgactcggtccgcactag

SEQ ID NO: 4343 - DNA, 168 bp, synthetic construct
  misc_feature 1..168: note = Synthetic
  source 1..168: mol_type = other DNA
atggaagtaattaatatttttttagaatctgacactggaagagttaagctagctatagattcctgtgaaaaagataaaaattttattcctatgtggaaagcagtagatatttttataaaaaagttaagaaaatacattgacgactcggtccgcactagcctgaggtaa

SEQ ID NO: 4344 - DNA, 159 bp, synthetic construct
  source 1..159: mol_type = other DNA
  misc_feature 1..159: note = Synthetic
attaatatttttttagaatctgacactggaagagttaagctagctatagattcctgtgaaaaagataaaaattttattcctatgtggaaagcagtagatatttttataaaaaagttaagaaaatacattgacgactcggtccgcactagcctgaggtaa

SEQ ID NO: 4345 - DNA, 39 bp, synthetic construct
  misc_feature 1..39: note = Synthetic
  source 1..39: mol_type = other DNA
aggatcccttccgccctcgagctcttcggctgctcgtaa

SEQ ID NO: 4346 - DNA, 168 bp, synthetic construct
  misc_feature 1..168: note = Synthetic
  source 1..168: mol_type = other DNA
atggcggccgccgcaacacccggcgccaagcgccccgcggaccccgcccgcgaccccgatagtcccccgaagcggccccgacccaacagcctagatctggcgaccgtctttgggccccgccccgccccaccccgccccaccgactcggtccgcactagcctgaggtaa

SEQ ID NO: 4347 - DNA, 195 bp, synthetic construct
  source 1..195: mol_type = other DNA
  misc_feature 1..195: note = Synthetic
ataagcgccttccgcgaaagcccaaacacgcgatgctgcagctgctcaagagatttgtcggcgccgccgtcgccgcgggcggcaccgagcgcgcgttcgccgcactgtctacctcagaggccatggagctcgtgctcgccggcgtgcaccccaggcacctcccgcggcggctcgactcggtccgcactagcctga

SEQ ID NO: 4348 - DNA, 168 bp, synthetic construct
  misc_feature 1..168: note = Synthetic
  source 1..168: mol_type = other DNA
atgctgcagctgctcaagagatttgtcggcgccgccgtcgccgcgggcggcaccgagcgcgcgttcgccgcactgtctacctcagaggccatggagctcgtgctcgccggcgtgcaccccaggcacctcccgcggcggctcgactcggtccgcactagcctgaggtaa

SEQ ID NO: 4349 - DNA, 195 bp, synthetic construct
  source 1..195: mol_type = other DNA
  misc_feature 1..195: note = Synthetic
ataagcgccttccgcgaaagcccaaacacgcggccctgcagctgctcaagagatttgtcggcgccgccgtcgccgcgggcggcaccgagcgcgcgttcgccgcactgtctacctcagaggccatggagctcgtgctcgccggcgtgcaccccaggcacctcccgcggcggctcgactcggtccgcactagcctga

SEQ ID NO: 4350 - DNA, 165 bp, synthetic construct
  source 1..165: mol_type = other DNA
  misc_feature 1..165: note = Synthetic
ctgcagctgctcaagagatttgtcggcgccgccgtcgccgcgggcggcaccgagcgcgcgttcgccgcactgtctacctcagaggccatggagctcgtgctcgccggcgtgcaccccaggcacctcccgcggcggctcgactcggtccgcactagcctgaggtaa

SEQ ID NO: 4351 - DNA, 192 bp, synthetic construct
  source 1..192: mol_type = other DNA
  misc_feature 1..192: note = Synthetic
ttgctctccccggtgttgggagacatgggaactcaaaagaaggggccgcgttctgaaaaagtctcgccgtacgacaccacgacacccgaggtggaagcgttagatcatcaaatggatacgcttaattggcgaatttggataattcaggtgatgatgttcactttcgactcggtccgcactagcctgaggtaa

SEQ ID NO: 4352 - DNA, 156 bp, synthetic construct
  source 1..156: mol_type = other DNA
  misc_feature 1..156: note = Synthetic
aagaaggggccgcgttctgaaaaagtctcgccgtacgacaccacgacacccgaggtggaagcgttagatcatcaaatggatacgcttaattggcgaatttggataattcaggtgatgatgttcactttcgactcggtccgcactagcctgaggtaa

SEQ ID NO: 4353 - DNA, 87 bp, synthetic construct
  source 1..87: mol_type = other DNA
  misc_feature 1..87: note = Synthetic
atgttctattatcatcggattattgcggagcagtactccaggacgcatagaatggttgggcggcagggcaacgggtcttatcactag

SEQ ID NO: 4354 - DNA, 168 bp, synthetic construct
  source 1..168: mol_type = other DNA
  misc_feature 1..168: note = Synthetic
atggatcccgccgtctcccccgcgagcaccgaccccctagatacccacgcgtcgggggccggggcggccccgattccggtgtgccccacccccgagcggtacttctacacctcccagtgccccgacatcaaccaccttcgcgactcggtccgcactagcctgaggtaa

SEQ ID NO: 4355 - DNA, 174 bp, synthetic construct
  misc_feature 1..174: note = Synthetic
  source 1..174: mol_type = other DNA
atcgccgccgatcccgccgtctcccccgcgagcaccgaccccctagatacccacgcgtcgggggccggggcggccccgattccggtgtgccccacccccgagcggtacttctacacctcccagtgccccgacatcaaccaccttcgcgactcggtccgcactagcctgaggtaa

SEQ ID NO: 4356 - DNA, 168 bp, synthetic construct
  source 1..168: mol_type = other DNA
  misc_feature 1..168: note = Synthetic
atgggtcaagtgattggattcttccaatcattgcccgagattattaatgaagcgttgaacattgctctgatctgtgtggctctgcttgccacaatcaagggaatggtcaacatctggaaatctggtttgatacagctcctcgactcggtccgcactagcctgaggtaa

SEQ ID NO: 4357 - DNA, 159 bp, synthetic construct
  source 1..159: mol_type = other DNA
  misc_feature 1..159: note = Synthetic
gtgattggattcttccaatcattgcccgagattattaatgaagcgttgaacattgctctgatctgtgtggctctgcttgccacaatcaagggaatggtcaacatctggaaatctggtttgatacagctcctcgactcggtccgcactagcctgaggtaa

SEQ ID NO: 4358 - DNA, 96 bp, synthetic construct
  misc_feature 1..96: note = Synthetic
  source 1..96: mol_type = other DNA
atgatgacatccgtgacactgatgacctgcacgatgctattcacatggctgccgataatgcagttccgcactactacgctgacatctttagcgtaa

SEQ ID NO: 4359 - DNA, 96 bp, synthetic construct
  source 1..96: mol_type = other DNA
  misc_feature 1..96: note = Synthetic
atggccacatccgtgacactgatgacctgcacgatgctattcacatggctgccgataatgcagttccgcactactacgctgacatctttagcgtaa

SEQ ID NO: 4360 - DNA, 168 bp, synthetic construct
  misc_feature 1..168: note = Synthetic
  source 1..168: mol_type = other DNA
atgaacgctctccaagaagatactccacccggaccatcaacggtgttcaggccaccaacaagttcacggccgttggaaacccctcactgcagagagatccggattggtatcgctggaattacaatcactctatcgctgtgcgactcggtccgcactagcctgaggtaa

SEQ ID NO: 4361 - DNA, 222 bp, synthetic construct
  source 1..222: mol_type = other DNA
  misc_feature 1..222: note = Synthetic
atagccggaggtcattacgtgcaagccgccatcatcaagttaggggcgcttactggcacctatgtgtataaccatctcacccctcttcgagactgggcgcacaacggcctgcgagatctggccgtggctgtggaaccagtcgtcttctcccgaatggagaccaagctcatcacgtggggggcagataccgccgccgactcggtccgcactagcctgaggtaa

SEQ ID NO: 4362 - DNA, 156 bp, synthetic construct
  misc_feature 1..156: note = Synthetic
  source 1..156: mol_type = other DNA
atgtgtataaccatctcacccctcttcgagactgggcgcacaacggcctgcgagatctggccgtggctgtggaaccagtcgtcttctcccgaatggagaccaagctcatcacgtggggggcagataccgccgccgactcggtccgcactagcctga

SEQ ID NO: 4363 - DNA, 165 bp, synthetic construct
  source 1..165: mol_type = other DNA
  misc_feature 1..165: note = Synthetic
atccggcggcggggaaacgtggagattcgggtctactacgagtctgtgcggccctctcgatcccgaagccatctgaagccgtccgaccatcaagaattcccagggcaccacgtgtccccagggagccccgggttccccgactcggtccgcactagcctgaggtaa

SEQ ID NO: 4364 - DNA, 147 bp, synthetic construct
  misc_feature 1..147: note = Synthetic
  source 1..147: mol_type = other DNA
gtggagattcgggtctactacgagtctgtgcggccctctcgatcccgaagccatctgaagccgtccgaccatcaagaattcccagggcaccacgtgtccccagggagccccgggttccccgactcggtccgcactagcctgaggtaa

SEQ ID NO: 4365 - DNA, 189 bp, synthetic construct
  misc_feature 1..189: note = Synthetic
  source 1..189: mol_type = other DNA
acgcgtttgtctacaataaacatgtcaacggataaaaccgatgtaaaaatgggcgttttgcgtatttatttggacggggcgtatggaattggaaaaacaaccgccgccgaagaatttttacaccactttgcaataacaccaaaccggatcttactcattggcgactcggtccgcactagcctgaggtaa

SEQ ID NO: 4366 - DNA, 189 bp, synthetic construct
  misc_feature 1..189: note = Synthetic
  source 1..189: mol_type = other DNA
acgcgtttgtctacaataaacgcctcaacggataaaaccgatgtaaaaatgggcgttttgcgtatttatttggacggggcgtatggaattggaaaaacaaccgccgccgaagaatttttacaccactttgcaataacaccaaaccggatcttactcattggcgactcggtccgcactagcctgaggtaa

SEQ ID NO: 4367 - DNA, 192 bp, synthetic construct
  source 1..192: mol_type = other DNA
  misc_feature 1..192: note = Synthetic
atggcactccaagactgtatgaatatagtcgtgttacggacgatggttgtcggcctagtgcatcccccaattgtctgtggcttattgggccatttatccgacctctcgcacagtgtcgctagcgtgatgggggtttgtggagtgacaaacaagcccgatatgaaaccccacaagcgactcggtccgcactag

SEQ ID NO: 4368 - DNA, 15 bp, synthetic construct
  source 1..15: mol_type = other DNA
  misc_feature 1..15: note = Synthetic
attgtgttctcctag

SEQ ID NO: 4369 - DNA, 168 bp, synthetic construct
  source 1..168: mol_type = other DNA
  misc_feature 1..168: note = Synthetic
atggagactcagccatcgtcgccaacctcgccatctgcccccaccgccgacaagaagcagcagcagaatgagagcttaaccgccccgccgcccagccccgccacctttgtcgcggccccagacatgcaagagatggaggacgactcggtccgcactagcctgaggtaa

SEQ ID NO: 4370 - DNA, 45 bp, synthetic construct
  misc_feature 1..45: note = Synthetic
  source 1..45: mol_type = other DNA
gtgctgacgccctcccggtgcagctgcagggtctggtccttgtaa

SEQ ID NO: 4371 - DNA, 213 bp, synthetic construct
  source 1..213: mol_type = other DNA
  misc_feature 1..213: note = Synthetic
atgcggcggctgcgtgcggagggcgccgtgcgcctcgcgtgcgagtgcatgggatacccgcgccagaacgcggtggagctcataaataatatgcgctttcaaataacggaagaaggcgcggtggcgaactttgagctggcgaacgcgagctgtctcggcaacccgaccgcggagtccatcttcgccgactcggtccgcactagcctgaggtaa

SEQ ID NO: 4372 - DNA, 81 bp, synthetic construct
  misc_feature 1..81: note = Synthetic
  source 1..81: mol_type = other DNA
atgatgcagctgggactaacgggcgagagcagcgcggcacaaacgcgagaggcgctcgagcgctactaccggctgagctag

SEQ ID NO: 4373 - DNA, 60 bp, synthetic construct
  source 1..60: mol_type = other DNA
  misc_feature 1..60: note = Synthetic
ttgctgaccgtcttgattaagtttttgcccctctaccttgtattcctcctcctcctgtaa

SEQ ID NO: 4374 - DNA, 207 bp, synthetic construct
  misc_feature 1..207: note = Synthetic
  source 1..207: mol_type = other DNA
acgcacatcaacgggcgcaagctagacgcggtgctggtcatcgtcaaggacgccttcatggcgggcgtgaccatggacggcgtcttccagaaggaaaacctggtctggcgcggcaagtacacgtaccgcgtgacgaagtcaagcttcgaggtcccagagttccgcgggaaggccggcggacacccgccccgactcggtccgcactag

SEQ ID NO: 4375 - DNA, 111 bp, synthetic construct
  misc_feature 1..111: note = Synthetic
  source 1..111: mol_type = other DNA
ttggcaaccacggggagaacctcagcgtcgataatgttagaattttcttcctccgcgctaatgaggctaaacagaaactgcgtaagagctctgcgactcggtccgcactag

SEQ ID NO: 4376 - DNA, 153 bp, synthetic construct
  misc_feature 1..153: note = Synthetic
  source 1..153: mol_type = other DNA
ctgcctcttcttttgatcctcaacaagcctacaatgaatttattggcaaccacggggagaacctcagcgtcgataatgttagaattttcttcctccgcgctaatgaggctaaacagaaactgcgtaagagctctgcgactcggtccgcactag

SEQ ID NO: 4377 - DNA, 171 bp, synthetic construct
  source 1..171: mol_type = other DNA
  misc_feature 1..171: note = Synthetic
atgacgacaggggcccaactgcctcttcttttgatcctcaacaagcctacaatgaatttattggcaaccacggggagaacctcagcgtcgataatgttagaattttcttcctccgcgctaatgaggctaaacagaaactgcgtaagagctctgcgactcggtccgcactag

SEQ ID NO: 4378 - DNA, 168 bp, synthetic construct
  misc_feature 1..168: note = Synthetic
  source 1..168: mol_type = other DNA
atgcagaccccccgctctcgccgacaagcaacaactactcggtcagaactattaacggcatacgagcatccaacaagttcgtgtccgccagcagaaacgacctcgatagagatccaaattggtatcgggtcaactataatcgactcggtccgcactagcctgaggtaa

SEQ ID NO: 4379 - DNA, 141 bp, synthetic construct
  source 1..141: mol_type = other DNA
  misc_feature 1..141: note = Synthetic
gtggctaagcccctgccgccggtggccgtggcccgcgcgcgacccgggggctccgcccgccctcatgcgaactggcagagcactctgaacagcatcgtgggtctgggagtgcagagtgtgaagcgccgccgctgctattaa

SEQ ID NO: 4380 - DNA, 123 bp, synthetic construct
  misc_feature 1..123: note = Synthetic
  source 1..123: mol_type = other DNA
acggacgcgcccgaccgcttcatgaagacctggtccgtgaactgcgcgctgaagctgggcgtggagccggactccgcgcgcgcgccggcgctgctcgactcggtccgcactagcctgaggtaa

SEQ ID NO: 4381 - DNA, 222 bp, synthetic construct
  misc_feature 1..222: note = Synthetic
  source 1..222: mol_type = other DNA
atagccggaggtcattacgtgcaaatggccatcatcaagttaggggcgcttactggcacctatgtgtataaccatctcacccctcttcgagactgggcgcacaacggcctgcgagatctggccgtggctgtggaaccagtcgtcttctcccgaatggagaccaagctcatcacgtggggggcagataccgccgccgactcggtccgcactagcctgaggtaa

SEQ ID NO: 4382 - DNA, 168 bp, synthetic construct
  misc_feature 1..168: note = Synthetic
  source 1..168: mol_type = other DNA
atggagactcagccatcgccaacctcgccatctgcccccaccgccggcgacgagaagcagcagcagcagaatgaaagcttaaccgccccgccgcccagccccgcctccgacgcagccgcggtcccagacatgcaagagatcgactcggtccgcactagcctgaggtaa

SEQ ID NO: 4383 - DNA, 168 bp, synthetic construct
  misc_feature 1..168: note = Synthetic
  source 1..168: mol_type = other DNA
atggccgtgatcgcgcgcgtgagctacagcctctacacgcagaacgagatcaacgccaacgacatcctcattaaccacgtgaagaacgacgacgatgtgggcaccgtcaaggacagcaggctgggcgccatggacggcgtcgactcggtccgcactagcctgaggtaa

SEQ ID NO: 4384 - DNA, 159 bp, synthetic construct
  source 1..159: mol_type = other DNA
  misc_feature 1..159: note = Synthetic
atcgcgcgcgtgagctacagcctctacacgcagaacgagatcaacgccaacgacatcctcattaaccacgtgaagaacgacgacgatgtgggcaccgtcaaggacagcaggctgggcgccatggacggcgtcgactcggtccgcactagcctgaggtaa

SEQ ID NO: 4385 - DNA, 177 bp, synthetic construct
  source 1..177: mol_type = other DNA
  misc_feature 1..177: note = Synthetic
aggttgggtgtggccggaagcgctcggggtcgacggtgggccgccatgacacctcaattgccgtcagtacgcccctccacaatcaccgtccccacacgatgggcccggcaggtcacccaacgttggttcaggcccagtcgagtttttccccggccgactcggtccgcactagcctga

SEQ ID NO: 4386 - DNA, 225 bp, synthetic construct
  misc_feature 1..225: note = Synthetic
  source 1..225: mol_type = other DNA
atgtttcgaaagttcgtcgtcgactctttcggaagaagtgcgcctgctgcgctccggctgctattgctgcgtgctcatgtaatcgccgcgagctcgcgtcatcgctgcacgcgaatgtccggcgctggagaaagaagtgtgcctgctgcgcttctattgccgcgtgctcgtgttgttgcatcttcttgcttttttttcgactcggtccgcactagcctgaggtaa

SEQ ID NO: 4387 - DNA, 45 bp, synthetic construct
  misc_feature 1..45: note = Synthetic
  source 1..45: mol_type = other DNA
gtgcgcctgctgcgctccggctgctattgctgcgtgctcatgtaa

SEQ ID NO: 4388 - DNA, 45 bp, synthetic construct
  misc_feature 1..45: note = Synthetic
  source 1..45: mol_type = other DNA
atgaaaaaaactaacacccctcctttcgaaccaccccaaacatga

SEQ ID NO: 4389 - DNA, 168 bp, synthetic construct
  misc_feature 1..168: note = Synthetic
  source 1..168: mol_type = other DNA
atgagcaagatctttgtcaatcctagtgctattagagccggtctggccgatcttgagatggctgaagaaactgttgatctgatcaatagaaatatcgaagacaatcaggctcatctccaaggggaacccatagaagtggacgactcggtccgcactagcctgaggtaa

SEQ ID NO: 4390 - DNA, 123 bp, synthetic construct
  source 1..123: mol_type = other DNA
  misc_feature 1..123: note = Synthetic
atgaaaaaaactaacacccctcctttcgaaccaccccaaacgccagcaagatctttgtcaatcctagtgctattagagccggtctggccgatcttgagatggctgaagaaactgttgatctga

SEQ ID NO: 4391 - DNA, 159 bp, synthetic construct
  misc_feature 1..159: note = Synthetic
  source 1..159: mol_type = other DNA
atctttgtcaatcctagtgctattagagccggtctggccgatcttgagatggctgaagaaactgttgatctgatcaatagaaatatcgaagacaatcaggctcatctccaaggggaacccatagaagtggacgactcggtccgcactagcctgaggtaa

SEQ ID NO: 4392 - DNA, 147 bp, synthetic construct
  misc_feature 1..147: note = Synthetic
  source 1..147: mol_type = other DNA
atgtttatgacgagcaaagaaacctttacccattaccagccgcagggcaacagtgacccggctcataccgcaaccgcgcccggcggattgagtgcgaaagcgcctgcaatgaccccgctgatgctggaccgactcggtccgcactag

SEQ ID NO: 4393 - DNA, 147 bp, synthetic construct
  source 1..147: mol_type = other DNA
  misc_feature 1..147: note = Synthetic
atgtttatgacgagcaaagaaacctttacccattaccagccgcagggcaacagtgacccggctcataccgcaaccgcgcccggcggattgagtgcgaaagcgcctgcagccaccccgctgatgctggaccgactcggtccgcactag

SEQ ID NO: 4394 - DNA, 69 bp, synthetic construct
  misc_feature 1..69: note = Synthetic
  source 1..69: mol_type = other DNA
atggatttatgtgcgttgttagtccgtgagaggagggcacgattaaagttctcgcttgttgtagcgtga

SEQ ID NO: 4395 - DNA, 51 bp, synthetic construct
  source 1..51: mol_type = other DNA
  misc_feature 1..51: note = Synthetic
atgtttcccacgtgcaccagctcagcgacgactcggtccgcactagcctga

SEQ ID NO: 4396 - DNA, 174 bp, synthetic construct
  misc_feature 1..174: note = Synthetic
  source 1..174: mol_type = other DNA
aaggacatggtacaagcaatgatagacatggacattatgaagggcatcctagaggactctgtgtcctcctctgagtttgacgaatcgagggacgacgagacggacgcaccgacactggaagacgagcaattgtccgaacccgccgacgactcggtccgcactagcctgaggtaa

SEQ ID NO: 4397 - DNA, 153 bp, synthetic construct
  misc_feature 1..153: note = Synthetic
  source 1..153: mol_type = other DNA
atagacatggacattatgaagggcatcctagaggactctgtgtcctcctctgagtttgacgaatcgagggacgacgagacggacgcaccgacactggaagacgagcaattgtccgaacccgccgacgactcggtccgcactagcctgaggtaa

SEQ ID NO: 4398 - DNA, 33 bp, synthetic construct
  source 1..33: mol_type = other DNA
  misc_feature 1..33: note = Synthetic
atggcagacaaataccgtgtcgattcgctttga

SEQ ID NO: 4399 - DNA, 15 bp, synthetic construct
  misc_feature 1..15: note = Synthetic
  source 1..15: mol_type = other DNA
atggtttatatttaa

SEQ ID NO: 4400 - DNA, 24 bp, synthetic construct
  source 1..24: mol_type = other DNA
  misc_feature 1..24: note = Synthetic
atgttcactgggacttctacatag

SEQ ID NO: 4401 - DNA, 15 bp, synthetic construct
  misc_feature 1..15: note = Synthetic
  source 1..15: mol_type = other DNA
atggcagcatgttga

SEQ ID NO: 4402 - DNA, 213 bp, synthetic construct
  misc_feature 1..213: note = Synthetic
  source 1..213: mol_type = other DNA
aagagcaactccatcgcatttggaggggaggaccaaagaagtgtgatggctagcaagtccaacaagcaggtaactgttgaggtcagtaacaatggccgcaacaggagtaaatcaagggcccgctcacaatctagagggcgggacagagcagttaaaatcacagttaattcaaaaaacaggactagcgactcggtccgcactagcctgaggtaa

SEQ ID NO: 4403 - DNA, 213 bp, synthetic construct
  source 1..213: mol_type = other DNA
  misc_feature 1..213: note = Synthetic
aagagcaactccatcgcatttggaggggaggaccaaagaagtgtggccgctagcaagtccaacaagcaggtaactgttgaggtcagtaacaatggccgcaacaggagtaaatcaagggcccgctcacaatctagagggcgggacagagcagttaaaatcacagttaattcaaaaaacaggactagcgactcggtccgcactagcctgaggtaa

SEQ ID NO: 4404 - DNA, 90 bp, synthetic construct
  source 1..90: mol_type = other DNA
  misc_feature 1..90: note = Synthetic
ttgcccaggacaccagctctgacgctggcccaggcgccgccccggacgccggcacggagaccgtacccacgaacgccgccttgccggtag

SEQ ID NO: 4405 - DNA, 168 bp, synthetic construct
  source 1..168: mol_type = other DNA
  misc_feature 1..168: note = Synthetic
atggagttgccgcgaaaatacgacagggtaacgggcaggatattgacacataagaataaccagatgtgtacaaccgaatgttctcagatgtataatttacacaatcctatcacgtttgagttgggacttggaaacgtgttcgactcggtccgcactagcctgaggtaa

SEQ ID NO: 4406 - DNA, 129 bp, synthetic construct
  misc_feature 1..129: note = Synthetic
  source 1..129: mol_type = other DNA
atattgacacataagaataaccagatgtgtacaaccgaatgttctcagatgtataatttacacaatcctatcacgtttgagttgggacttggaaacgtgttcgactcggtccgcactagcctgaggtaa

SEQ ID NO: 4407 - DNA, 33 bp, synthetic construct
  source 1..33: mol_type = other DNA
  misc_feature 1..33: note = Synthetic
acggtgcgcatggctctgaagagccttatttaa

SEQ ID NO: 4408 - DNA, 42 bp, synthetic construct
  misc_feature 1..42: note = Synthetic
  source 1..42: mol_type = other DNA
atggtacggactatcgactcggtccgcactagcctgaggtaa

SEQ ID NO: 4409 - DNA, 102 bp, synthetic construct
  misc_feature 1..102: note = Synthetic
  source 1..102: mol_type = other DNA
gtgagttatagccccatcgtcatccaagactgcgccgcggctgttaccgacgtcactttgagccacatcttgcccggcccgactcggtccgcactagcctga

SEQ ID NO: 4410 - DNA, 27 bp, synthetic construct
  misc_feature 1..27: note = Synthetic
  source 1..27: mol_type = other DNA
ttgggtatactggtgcgcctcatttaa

SEQ ID NO: 4411 - DNA, 150 bp, synthetic construct
  misc_feature 1..150: note = Synthetic
  source 1..150: mol_type = other DNA
ttgatatcggccgttatattttacatacaagtgaccaacgctttgatcttcaagggcgaccacgtgagcttgcaagttaacagcagtctcacgtctatccttattcccatgcaaaatgataacgactcggtccgcactagcctgaggtaa

SEQ ID NO: 4412 - DNA, 156 bp, synthetic construct
  misc_feature 1..156: note = Synthetic
  source 1..156: mol_type = other DNA
ctgctatctgataactctatgaggacattttcccaatctcccgccgatacctgttcctgcacaaccgaggtagatgggacttcttcttccatgttgtcatccagggccgggggacccggcctgtccttgtccattttgtctgcaacaaaagtgtga

SEQ ID NO: 4413 - DNA, 108 bp, synthetic construct
  misc_feature 1..108: note = Synthetic
  source 1..108: mol_type = other DNA
atgggacttcttcttccatgttgtcatccagggccgggggacccggcctgtccttgtccattttgtctgcaacaaaagtgtgactcaccacgactcggtccgcactag

SEQ ID NO: 4414 - DNA, 123 bp, synthetic construct
  source 1..123: mol_type = other DNA
  misc_feature 1..123: note = Synthetic
ttgcactcgaccgtcttcactccgcacagcttcacgtacttgagcaccaagaagcggccctgcacggtgtccacgatgaacggctccttgagaatcatttcgactcggtccgcactagcctga

SEQ ID NO: 4415 - DNA, 36 bp, synthetic construct
  misc_feature 1..36: note = Synthetic
  source 1..36: mol_type = other DNA
atgatattcaccacaccgctggcgttcagcgcgtag

SEQ ID NO: 4416 - DNA, 129 bp, synthetic construct
  source 1..129: mol_type = other DNA
  misc_feature 1..129: note = Synthetic
atatcgtcggtcgggtcatacgtggacttgtcacgcttgctccactccgtgccgccggactgcgtgatgttattctcctcactgcggcccatatccacctcaaccggatcgcgactcggtccgcactag

SEQ ID NO: 4417 - DNA, 102 bp, synthetic construct
  source 1..102: mol_type = other DNA
  misc_feature 1..102: note = Synthetic
atctgggcacttctgacgcttgtcttagtcattatagcctcagccatctacctgatgtacgtctgctttaacaagtttgtgaacacgctgctgacggattag

SEQ ID NO: 4418 - DNA, 129 bp, synthetic construct
  source 1..129: mol_type = other DNA
  misc_feature 1..129: note = Synthetic
atatcgtcggtcgggtcatacgtggacttgtcacgcttgctccactccgccccgccggactgcgtgatgttattctcctcactgcggcccatatccacctcaaccggatcgcgactcggtccgcactag

SEQ ID NO: 4419 - DNA, 15 bp, synthetic construct
  misc_feature 1..15: note = Synthetic
  source 1..15: mol_type = other DNA
atgaaaaagtactag

SEQ ID NO: 4420 - DNA, 168 bp, synthetic construct
  misc_feature 1..168: note = Synthetic
  source 1..168: mol_type = other DNA
atggagatggcgttgccgcgaaaatacgacagggtaacgggcagaatattgacacataagaataaccagatgtgcacaaccgaatgttctcagatgtataatttacacaatcctatcacgtttgagttgggacttggaaacgactcggtccgcactagcctgaggtaa

SEQ ID NO: 4421 - DNA, 162 bp, synthetic construct
  misc_feature 1..162: note = Synthetic
  source 1..162: mol_type = other DNA
atggcgttgccgcgaaaatacgacagggtaacgggcagaatattgacacataagaataaccagatgtgcacaaccgaatgttctcagatgtataatttacacaatcctatcacgtttgagttgggacttggaaacgactcggtccgcactagcctgaggtaa

SEQ ID NO: 4422 - DNA, 168 bp, synthetic construct
  source 1..168: mol_type = other DNA
  misc_feature 1..168: note = Synthetic
atgtttttaatccaatgtttgatatcggccgttatattttacatacaagtgaccaacgctttgatcttcaagggcgaccacgtgagcttgcaagttaacagcagtctcacgtctatccttattcccatgcaaaatgataacgactcggtccgcactagcctgaggtaa

SEQ ID NO: 4423 - DNA, 102 bp, synthetic construct
  source 1..102: mol_type = other DNA
  misc_feature 1..102: note = Synthetic
acgccctcgactgacttgaccaaggacccaccgtccactcacattccactgccagacaacagactcaagcttttcgactcggtccgcactagcctgaggtaa

SEQ ID NO: 4424 - DNA, 168 bp, synthetic construct
  misc_feature 1..168: note = Synthetic
  source 1..168: mol_type = other DNA
atggcagacatccccccggacccgcccgcgctcaacacgacgcctgcgaatcatgctcccccatccccacccccgggttcacggaagcgcagacgccccgtcctccccagctcgtcggaatctgagggtaagcccgacaccgactcggtccgcactagcctgaggtaa

SEQ ID NO: 4425 - DNA, 159 bp, synthetic construct
  source 1..159: mol_type = other DNA
  misc_feature 1..159: note = Synthetic
atccccccggacccgcccgcgctcaacacgacgcctgcgaatcatgctcccccatccccacccccgggttcacggaagcgcagacgccccgtcctccccagctcgtcggaatctgagggtaagcccgacaccgactcggtccgcactagcctgaggtaa

SEQ ID NO: 4426 - DNA, 84 bp, synthetic construct
  source 1..84: mol_type = other DNA
  misc_feature 1..84: note = Synthetic
ctgtgttgcgcgcgcctgctctccgcgggaagaggacgccggcaagccgagccaaggatgcctgcccgactcggtccgcactag

SEQ ID NO: 4427 - DNA, 81 bp, synthetic construct
  misc_feature 1..81: note = Synthetic
  source 1..81: mol_type = other DNA
ctgtttagctcccgctctgattctaacgaagaaagcacgttatacgtgctcgtcaaagcaaccatagtacgcgccctgtag

SEQ ID NO: 4428 - DNA, 108 bp, synthetic construct
  misc_feature 1..108: note = Synthetic
  source 1..108: mol_type = other DNA
atgggtccgcttcatcagactgcgtacgctttggagcgtcagacccagggcgcatgtagccgacttggaggactttgccgccttttatcgcaccctctcggacagtga

SEQ ID NO: 4429 - DNA, 45 bp, synthetic construct
  misc_feature 1..45: note = Synthetic
  source 1..45: mol_type = other DNA
atgtactttattttacagaagccttcaaatctccaacatacttaa

SEQ ID NO: 4430 - DNA, 192 bp, synthetic construct
  misc_feature 1..192: note = Synthetic
  source 1..192: mol_type = other DNA
gtgatttgttcgccaggtctcaggatggcgcagtgcaatctcttttatcaatacccaattacaccaattttagaagggcatgtcagaaacatactgatttgtacagaaaaagatgtcgaaaagctccaaagtcagtcctcactaagacttcgggagaaaatagacgactcggtccgcactagcctgaggtaa

SEQ ID NO: 4431 - DNA, 18 bp, synthetic construct
  source 1..18: mol_type = other DNA
  misc_feature 1..18: note = Synthetic
atgtcagaaacatactga

SEQ ID NO: 4432 - DNA, 168 bp, synthetic construct
  misc_feature 1..168: note = Synthetic
  source 1..168: mol_type = other DNA
atggcgcagtgcaatctcttttatcaatacccaattacaccaattttagaagggcatgtcagaaacatactgatttgtacagaagaagatatcagaaggcttcaaagtcagtcctcactaagacttcgggagaaaatagacgactcggtccgcactagcctgaggtaa

SEQ ID NO: 4433 - DNA, 33 bp, synthetic construct
  misc_feature 1..33: note = Synthetic
  source 1..33: mol_type = other DNA
atggtgtgttccatgatagcggactcaggatga

SEQ ID NO: 4434 - DNA, 60 bp, synthetic construct
  source 1..60: mol_type = other DNA
  misc_feature 1..60: note = Synthetic
atgtatatagaggttttacctgttggttatatgaatgggcaaagccgagttctggcgtga

SEQ ID NO: 4435 - DNA, 39 bp, synthetic construct
  misc_feature 1..39: note = Synthetic
  source 1..39: mol_type = other DNA
atggcactgttggggtatttgcgactcggtccgcactag

SEQ ID NO: 4436 - DNA, 54 bp, synthetic construct
  misc_feature 1..54: note = Synthetic
  source 1..54: mol_type = other DNA
atcggcgaaacgtacagcgccatgtttaccagtcccggaatttgtgagagatag

SEQ ID NO: 4437 - DNA, 69 bp, synthetic construct
  source 1..69: mol_type = other DNA
  misc_feature 1..69: note = Synthetic
atgcctataaaaccgcgcccgttttcacagcagccgcgcttgtcgccatgcttcatgtcgtcccgctag

SEQ ID NO: 4438 - DNA, 69 bp, synthetic construct
  source 1..69: mol_type = other DNA
  misc_feature 1..69: note = Synthetic
atgcctataaaaccgcgcccgttttcacagcagccgcgcttgtcgccgcccttcatgtcgtcccgctag

SEQ ID NO: 4439 - DNA, 168 bp, synthetic construct
  misc_feature 1..168: note = Synthetic
  source 1..168: mol_type = other DNA
atggcatccggggtttccccggcccacccccaaaccccggttggggcgggcagccgagacctttccttaaaaggcaccccatccgacggcatgcagcccagaggagcggacacgcttgaagggcactcgcttccgaccgacgactcggtccgcactagcctgaggtaa

SEQ ID NO: 4440 - DNA, 207 bp, synthetic construct
  source 1..207: mol_type = other DNA
  misc_feature 1..207: note = Synthetic
atcctcctgactatacgcctcacggaggcgtctgaggtcatgttcaacatgaacgtggacgagagcgcctctggcgccctcggctcctcggccattcctgttcaccccacgccggcctcggtccgactttttgagatcctgcagggaaagtacgcctacgtccagggacagaccatctacgactcggtccgcactagcctgaggtaa

SEQ ID NO: 4441 - DNA, 207 bp, synthetic construct
  misc_feature 1..207: note = Synthetic
  source 1..207: mol_type = other DNA
atcctcctgactatacgcctcacggaggcgtctgaggtcgccttcaacatgaacgtggacgagagcgcctctggcgccctcggctcctcggccattcctgttcaccccacgccggcctcggtccgactttttgagatcctgcagggaaagtacgcctacgtccagggacagaccatctacgactcggtccgcactagcctgaggtaa

SEQ ID NO: 4442 - DNA, 93 bp, synthetic construct
  misc_feature 1..93: note = Synthetic
  source 1..93: mol_type = other DNA
atcagcataacccggaaccccgagggagtaattacgcggggagcgaggggccgtccgaacgttttcgactcggtccgcactagcctgaggtaa

SEQ ID NO: 4443 - DNA, 33 bp, synthetic construct
  source 1..33: mol_type = other DNA
  misc_feature 1..33: note = Synthetic
atgcccgactcggtccgcactagcctgaggtaa

SEQ ID NO: 4444 - DNA, 30 bp, synthetic construct
  source 1..30: mol_type = other DNA
  misc_feature 1..30: note = Synthetic
atggccagaccccagacaccggccggttaa

SEQ ID NO: 4445 - DNA, 48 bp, synthetic construct
  source 1..48: mol_type = other DNA
  misc_feature 1..48: note = Synthetic
atgtacccgcaccgcagcaacgactcggtccgcactagcctgaggtaa

SEQ ID NO: 4446 - DNA, 210 bp, synthetic construct
  source 1..210: mol_type = other DNA
  misc_feature 1..210: note = Synthetic
ttgcgccgccccgactgcagccgcccgacctccgaaggtctgtaccgctacccgccgggcgtgtacctcacgtacaactccgactgtccgctggtggccatcgtcgagagcggccccgacggctgcatcggaccccgctcggtcgtggtttacgaccgagacgttttttccatcctctactcggtcccgactcggtccgcactagcctga

SEQ ID NO: 4447 - DNA, 87 bp, synthetic construct
  source 1..87: mol_type = other DNA
  misc_feature 1..87: note = Synthetic
acggctgcatcggaccccgctcggtcgtggtttacgaccgagacgttttttccatcctctactcggtcccgactcggtccgcactag

SEQ ID NO: 4448 - DNA, 207 bp, synthetic construct
  source 1..207: mol_type = other DNA
  misc_feature 1..207: note = Synthetic
ttgtctttttttgaggccttgtgcgctgtacttctccaaatgggaaacaagcaagccaaagccccagaatcaaaagacagtccgagagccagcctgatcccagatgccacacatctagggccacagttctgtaagagctgctggttcgaaaacaagggcctggttgagtgcaacaaccacgactcggtccgcactagcctgaggtaa

SEQ ID NO: 4449 - DNA, 207 bp, synthetic construct
  misc_feature 1..207: note = Synthetic
  source 1..207: mol_type = other DNA
ttgtctttttttgaggccttgtgcgctgtacttctccaagccggaaacaagcaagccaaagccccagaatcaaaagacagtccgagagccagcctgatcccagatgccacacatctagggccacagttctgtaagagctgctggttcgaaaacaagggcctggttgagtgcaacaaccacgactcggtccgcactagcctgaggtaa

SEQ ID NO: 4450 - DNA, 207 bp, synthetic construct
  source 1..207: mol_type = other DNA
  misc_feature 1..207: note = Synthetic
atcctcctgactatacgcctcacggaggcgtctgaggtcatgttcaacatgaacgtggacgagagcgcctctggcgctctcggctcctcggccattcctgtgcaccccacgccggcctcggtccgactttttgagatcctgcagggaaagtacgcctacgtccagggacagaccatctacgactcggtccgcactagcctgaggtaa

SEQ ID NO: 4451 - DNA, 207 bp, synthetic construct
  misc_feature 1..207: note = Synthetic
  source 1..207: mol_type = other DNA
atcctcctgactatacgcctcacggaggcgtctgaggtcatgtttaacatgaacgtggacgagagcgcctctggcgccctcggctcctcggccattcctgtgcaccccacaccggcctcggtccgactttttgagatcctgcagggaaagtacgcctacgtccagggacagaccatctacgactcggtccgcactagcctgaggtaa

SEQ ID NO: 4452 - DNA, 201 bp, synthetic construct
  source 1..201: mol_type = other DNA
  misc_feature 1..201: note = Synthetic
ctggatcacgccgctgaacccagcggcgcggccgcgctgcccggccaggcctcccctcctacctcatcatcctcgccgtctgtctcttcagccacctactttcgtcacgatatggcgcagaagccgtatccgaaccgctggacaaagcgtttcacctactgctcaacacctacgggagcgactcggtccgcactagcctga

SEQ ID NO: 4453 - DNA, 213 bp, synthetic construct
  source 1..213: mol_type = other DNA
  misc_feature 1..213: note = Synthetic
ataggtgctagggttcacttttatcatgatataagtcctattgcaccttccccagaatatattgaactgcagcctttagtatctgccacggaggacaatgacttgtttgatatatatgcagatgacatggaccctgcagtgcctgtaccatcgcgttctactacctcctttgcattttttaaatattcgccgactcggtccgcactagcctga

SEQ ID NO: 4454 - DNA, 111 bp, synthetic construct
  misc_feature 1..111: note = Synthetic
  source 1..111: mol_type = other DNA
atgacttgtttgatatatatgcagatgacatggaccctgcagtgcctgtaccatcgcgttctactacctcctttgcattttttaaatattcgccgactcggtccgcactag

SEQ ID NO: 4455 - DNA, 60 bp, synthetic construct
  misc_feature 1..60: note = Synthetic
  source 1..60: mol_type = other DNA
ctgaacagcatcgtgggcctgggagtgaaaagcctgaaacgccgccgttgctattattaa

SEQ ID NO: 4456 - DNA, 48 bp, synthetic construct
  misc_feature 1..48: note = Synthetic
  source 1..48: mol_type = other DNA
atgcaggattacactacatctaaagaccacgtattacagacaccatga

SEQ ID NO: 4457 - DNA, 180 bp, synthetic construct
  misc_feature 1..180: note = Synthetic
  source 1..180: mol_type = other DNA
attacagacaccgccaattacattccaactcaaaccttttacggacgccgttggcgaccacgcccggcgtaccgtccatggcgggtgccgatgcagccggccccacccatggtgattcctgagctgcaaactccgatcgtccaggcccaacacgactcggtccgcactagcctgaggtaa

SEQ ID NO: 4458 - DNA, 141 bp, synthetic construct
  misc_feature 1..141: note = Synthetic
  source 1..141: mol_type = other DNA
ctggctttcctggtgttcatggtaattattcttttgtacgtgacctacatgctggcgcgccggcgggactggtcctataagagactggaggagcccgttgaagaaaagaaacacccggtgccctacttcaagcagtggtag

SEQ ID NO: 4459 - DNA, 207 bp, synthetic construct
  misc_feature 1..207: note = Synthetic
  source 1..207: mol_type = other DNA
atgggaaaacggtaccgctcccgatggagagcccggggtatgctgaaattcttcttaaaattacgtaaacgacgtcgtccagtcgttgtgccgcgattcgtacggttcatcgtctacgtcgttttgttcaccgtcgctgtgcaacgcgtgaaacaagagcgtgatgcgcaccttcggcgcgactcggtccgcactagcctgaggtaa

SEQ ID NO: 4460 - DNA, 207 bp, synthetic construct
  misc_feature 1..207: note = Synthetic
  source 1..207: mol_type = other DNA
atgggaaaacggtaccgctcccgatggagagcccggggtgccctgaaattcttcttaaaattacgtaaacgacgtcgtccagtcgttgtgccgcgattcgtacggttcatcgtctacgtcgttttgttcaccgtcgctgtgcaacgcgtgaaacaagagcgtgatgcgcaccttcggcgcgactcggtccgcactagcctgaggtaa

SEQ ID NO: 4461 - DNA, 168 bp, synthetic construct
  misc_feature 1..168: note = Synthetic
  source 1..168: mol_type = other DNA
atggcggccatggaggccaacatcttctgcactttcgaccacaagctcagcatcgccgacgtaggcaaactgaccaaactagtagcggccgttgtgcccattccgcagcgtctacatctcatcaagcactaccagctgggcgactcggtccgcactagcctgaggtaa

SEQ ID NO: 4462 - DNA, 159 bp, synthetic construct
  misc_feature 1..159: note = Synthetic
  source 1..159: mol_type = other DNA
atggaggccaacatcttctgcactttcgaccacaagctcagcatcgccgacgtaggcaaactgaccaaactagtagcggccgttgtgcccattccgcagcgtctacatctcatcaagcactaccagctgggcgactcggtccgcactagcctgaggtaa

SEQ ID NO: 4463 - DNA, 48 bp, synthetic construct
  source 1..48: mol_type = other DNA
  misc_feature 1..48: note = Synthetic
acgctaacaggcgggatgtatctagggagaggtaggggctgccaatga

SEQ ID NO: 4464 - DNA, 15 bp, synthetic construct
  misc_feature 1..15: note = Synthetic
  source 1..15: mol_type = other DNA
atgaaaaggtactag

SEQ ID NO: 4465 - DNA, 24 bp, synthetic construct
  misc_feature 1..24: note = Synthetic
  source 1..24: mol_type = other DNA
atcacaatgattgggaaccagtaa

SEQ ID NO: 4466 - DNA, 42 bp, synthetic construct
  source 1..42: mol_type = other DNA
  misc_feature 1..42: note = Synthetic
atgtcacgagcaattaagcgactcagaggaagaaaacgatga

SEQ ID NO: 4467 - DNA, 207 bp, synthetic construct
  misc_feature 1..207: note = Synthetic
  source 1..207: mol_type = other DNA
atcctcctgactatacgcctcacggaggcgtctgaggtcgccttcaacatgaacgtggacgagagcgcctctggcgctctcggctcctcggccattcctgtgcaccccacgccggcctcggtccgactttttgagatcctgcagggaaagtacgcctacgtccagggacagaccatctacgactcggtccgcactagcctgaggtaa

SEQ ID NO: 4468 - DNA, 207 bp, synthetic construct
  source 1..207: mol_type = other DNA
  misc_feature 1..207: note = Synthetic
atcctcctgactatacgcctcacggaggcgtctgaggtcgcctttaacatgaacgtggacgagagcgcctctggcgccctcggctcctcggccattcctgtgcaccccacaccggcctcggtccgactttttgagatcctgcagggaaagtacgcctacgtccagggacagaccatctacgactcggtccgcactagcctgaggtaa

SEQ ID NO: 4469 - DNA, 42 bp, synthetic construct
  misc_feature 1..42: note = Synthetic
  source 1..42: mol_type = other DNA
atctgcatcggtgccgtaacgactcggtccgcactagcctga

SEQ ID NO: 4470 - DNA, 168 bp, synthetic construct
  source 1..168: mol_type = other DNA
  misc_feature 1..168: note = Synthetic
atgaaaaattatcgcgtacataaaatggaccagaaactgggcttcaagttcctggagcccgaccccaagaagaacgtcttctaccgcccgctgcacttccagtatgaatcctacgcaaacttcatcctctaccgcctgcgcgactcggtccgcactagcctgaggtaa

SEQ ID NO: 4471 - DNA, 144 bp, synthetic construct
  source 1..144: mol_type = other DNA
  misc_feature 1..144: note = Synthetic
atggaccagaaactgggcttcaagttcctggagcccgaccccaagaagaacgtcttctaccgcccgctgcacttccagtatgaatcctacgcaaacttcatcctctaccgcctgcgcgactcggtccgcactagcctgaggtaa

SEQ ID NO: 4472 - DNA, 153 bp, synthetic construct
  source 1..153: mol_type = other DNA
  misc_feature 1..153: note = Synthetic
atcgcgtacataaaatggaccagaaactgggcttcaagttcctggagcccgaccccaagaagaacgtcttctaccgcccgctgcacttccagtatgaatcctacgcaaacttcatcctctaccgcctgcgcgactcggtccgcactagcctga

SEQ ID NO: 4473 - DNA, 33 bp, synthetic construct
  misc_feature 1..33: note = Synthetic
  source 1..33: mol_type = other DNA
atgtttaccagtcccggaatttgtgagagatag

SEQ ID NO: 4474 - DNA, 165 bp, synthetic construct
  misc_feature 1..165: note = Synthetic
  source 1..165: mol_type = other DNA
atgagccggtacacgcccatgccgagcacgttcaccgcaccgtccttggagaagagcgagaggatgttcacgcacttcagctccatctcgccctcgaggcgcgcgagcatgcgccgggtgacctcgcatactgaacaaagagcgactcggtccgcactagcctga

SEQ ID NO: 4475 - DNA, 225 bp, synthetic construct
  misc_feature 1..225: note = Synthetic
  source 1..225: mol_type = other DNA
gtgaccccgggtggcattccctcccttagcagcatgagtgtggtggtagctgcaaccatggagttgctactgctcttggtgttgttggcccctgcgggggccatcctttttccgtcccggcatgcgtgccgggtaggagaccattactacttgtccaattgttgctccgaggacgaagtgtacttctgcttcggagacgactcggtccgcactagcctgaggtaa

SEQ ID NO: 4476 - DNA, 225 bp, synthetic construct
  misc_feature 1..225: note = Synthetic
  source 1..225: mol_type = other DNA
gtgaccccgggtggcattccctcccttagcagcatgagtgtggtggtagctgcaaccgccgagttgctactgctcttggtgttgttggcccctgcgggggccatcctttttccgtcccggcatgcgtgccgggtaggagaccattactacttgtccaattgttgctccgaggacgaagtgtacttctgcttcggagacgactcggtccgcactagcctgaggtaa

SEQ ID NO: 4477 - DNA, 150 bp, synthetic construct
  misc_feature 1..150: note = Synthetic
  source 1..150: mol_type = other DNA
aagaaacggcggccggttatgtcatcggtgtctactttcacagcgttcacgtccactgccgcattattgtctggcaggttaattttctacccctggacccaaacgacggggagactgaatgctacttcgactcggtccgcactagcctga

SEQ ID NO: 4478 - DNA, 165 bp, synthetic construct
  misc_feature 1..165: note = Synthetic
  source 1..165: mol_type = other DNA
acggggaaacccgcaagactgggccgctgggtggtgctgttgttcgtcgcgctcgtcgcgggcgtgcccggggagccgccgaacgcggcaggcgcacgcggcgttatcggggacgcgcaatgccggggcgacagcgccgactcggtccgcactagcctgaggtaa

SEQ ID NO: 4479 - DNA, 120 bp, synthetic construct
  misc_feature 1..120: note = Synthetic
  source 1..120: mol_type = other DNA
ttgaccttgcctgcagcaacgccgttcacggtgatggtcataccactgaccgacacggtggcttttgttttatccgcagacaccgcacgaaagctcttgtcgcgactcggtccgcactag

SEQ ID NO: 4480 - DNA, 183 bp, synthetic construct
  misc_feature 1..183: note = Synthetic
  source 1..183: mol_type = other DNA
ctggcggtggccgtaatttctgcaaccgcagcaaactcaccattaccggatacaaccggaatgttgaccttgcctgcagcaacgccgttcacggtgatggtcataccactgaccgacacggtggcttttgttttatccgcagacaccgcacgaaagctcttgtcgcgactcggtccgcactag

SEQ ID NO: 4481 - DNA, 30 bp, synthetic construct
  misc_feature 1..30: note = Synthetic
  source 1..30: mol_type = other DNA
atgttggcgccaaaaaaatacagtatataa

SEQ ID NO: 4482 - DNA, 24 bp, synthetic construct
  source 1..24: mol_type = other DNA
  misc_feature 1..24: note = Synthetic
ttggtgctaggacttcgttcttga

SEQ ID NO: 4483 - DNA, 30 bp, synthetic construct
  misc_feature 1..30: note = Synthetic
  source 1..30: mol_type = other DNA
atgttggcgccaaaaaaatacagtatatag

SEQ ID NO: 4484 - DNA, 15 bp, synthetic construct
  source 1..15: mol_type = other DNA
  misc_feature 1..15: note = Synthetic
atggcatcattgtga

SEQ ID NO: 4485 - DNA, 129 bp, synthetic construct
  source 1..129: mol_type = other DNA
  misc_feature 1..129: note = Synthetic
atggcgtttatacttggtattattatcacagtcggaatgctaatttattctatgtggggaaagcactgcgcaccccacagagttagcggagtcattcataccaatcatagcgatatttccatgaactaa

SEQ ID NO: 4486 - DNA, 129 bp, synthetic construct
  misc_feature 1..129: note = Synthetic
  source 1..129: mol_type = other DNA
atggcgtttatacttggtattattatcacagtcggaatgctaatttattctatgtggggaaagcactgcgcgccccacagagttagcggagtcattcataccaatcatagcgatatttccatgaactaa

SEQ ID NO: 4487 - DNA, 120 bp, synthetic construct
  misc_feature 1..120: note = Synthetic
  source 1..120: mol_type = other DNA
atacttggtattattatcacagtcggaatgctaatttattctatgtggggaaagcactgcgcaccccacagagttagtggagtcattcataccaatcatagcgatatttccgtaaactaa

SEQ ID NO: 4488 - DNA, 156 bp, synthetic construct
  misc_feature 1..156: note = Synthetic
  source 1..156: mol_type = other DNA
atgagatcaataaaagggggcgtgaggaccgggaggcggccagaaccgccgtgcacgacccggagcgtcccctgctgcgctctcccgggctgctgcccgaaatcgcccccaacgcatccttgggtgtggcacatcgaagaaccggcgggaccgtga

SEQ ID NO: 4489 - DNA, 57 bp, synthetic construct
  misc_feature 1..57: note = Synthetic
  source 1..57: mol_type = other DNA
ataatttcaatcatcgaaagggcaaacacaaaacccccgccggccacttccacttaa

SEQ ID NO: 4490 - DNA, 144 bp, synthetic construct
  misc_feature 1..144: note = Synthetic
  source 1..144: mol_type = other DNA
atcatggaaatcgtaagcaagctgactctgaaaaccattggcgcacaaccgaagccgcatagcgtaaaagaaaataccgcgctggcttccatctatggccgcgttcgcggtaagaaagttggtcaacgactcggtccgcactag

SEQ ID NO: 4491 - DNA, 213 bp, synthetic construct
  source 1..213: mol_type = other DNA
  misc_feature 1..213: note = Synthetic
ttgtcacgacaaaggggttcgtatatcaattatatagtaacgaacatgctgtggatattagttttatttgcacttgccgcatcggcgagtgaaaccactacaggtaccagctctaattccagtcaatctacttctgctggtaccactaacacgactacaccatcgacagcatgtattaatgcttccgactcggtccgcactagcctgaggtaa

SEQ ID NO: 4492 - DNA, 213 bp, synthetic construct
  misc_feature 1..213: note = Synthetic
  source 1..213: mol_type = other DNA
ttgtcacgacaaaggggttcgtatatcaattatatagtaacgaacgccctgtggatattagttttatttgcacttgccgcatcggcgagtgaaaccactacaggtaccagctctaattccagtcaatctacttctgctggtaccactaacacgactacaccatcgacagcatgtattaatgcttccgactcggtccgcactagcctgaggtaa

SEQ ID NO: 4493 - DNA, 195 bp, synthetic construct
  misc_feature 1..195: note = Synthetic
  source 1..195: mol_type = other DNA
ttgatagcgttaactatcaaacaaactgctgaagtggtaggtcatactccatcaatttcaaaaagagcttatatggcaacgactattttagaaatggtaaaggataaaaattttttagacgtagtatctaaaactacgttcgatgaattcctatctatagtcgtagatcacgcgactcggtccgcactagcctga

SEQ ID NO: 4494 - DNA, 168 bp, synthetic construct
  source 1..168: mol_type = other DNA
  misc_feature 1..168: note = Synthetic
atggccaccccatcgatgctgccccaatgggcatacatgcacatcgccggacaggatgcttcggagtacctgagtccgggtctggtgcagttcgcccgcgccacagacacctacttcaatctgggaaataagtttagaaacgactcggtccgcactagcctgaggtaa

SEQ ID NO: 4495 - DNA, 132 bp, synthetic construct
  source 1..132: mol_type = other DNA
  misc_feature 1..132: note = Synthetic
atgcacatcgccggacaggatgcttcggagtacctgagtccgggtctggtgcagttcgcccgcgccacagacacctacttcaatctgggaaataagtttagaaacgactcggtccgcactagcctgaggtaa

SEQ ID NO: 4496 - DNA, 168 bp, synthetic construct
  source 1..168: mol_type = other DNA
  misc_feature 1..168: note = Synthetic
atgaccctcagactgcaaaataaaaacttgtatctgacgtacttggatacagaagaacgaatatttagtgaaacaattttaataacagaactggcagaacgattagacaaatatgtagtaaaatatgctattgcctgtaacgactcggtccgcactagcctgaggtaa

SEQ ID NO: 4497 - DNA, 195 bp, synthetic construct
  misc_feature 1..195: note = Synthetic
  source 1..195: mol_type = other DNA
ctgggtcatttttataataatactagaatgaccctcaggctgcaaaataaaaatttgtatctgacgtacttggacacagaagaacgaatatttagcgaattaattttaataacagaactggcagaacgattagacaaatatggagtaaaatatgctattgcctgtaacgactcggtccgcactagcctgaggtaa

SEQ ID NO: 4498 - DNA, 39 bp, synthetic construct
  source 1..39: mol_type = other DNA
  misc_feature 1..39: note = Synthetic
atgctattgcctgtaacgactcggtccgcactagcctga

SEQ ID NO: 4499 - DNA, 168 bp, synthetic construct
  misc_feature 1..168: note = Synthetic
  source 1..168: mol_type = other DNA
atggcgcaggagtcagagcagtgctcccgtgcgtttgcagtatgcagtagtaaacgacagctcgggcgcggcgagcccgtatgggattccgtcattcaccctagccacatcgtcatctctaatcgagtacccctcttactcgactcggtccgcactagcctgaggtaa

SEQ ID NO: 4500 - DNA, 168 bp, synthetic construct
  source 1..168: mol_type = other DNA
  misc_feature 1..168: note = Synthetic
atggcgcaggagtcagagcagtgctcccgtgcgtttgcagtgtgcagtagtaaacgacagctcgggcgcggcgagcccgtgtgggattccgtcattcacccgagccacatcgtcatctctaatcgagtacccctcttactcgactcggtccgcactagcctgaggtaa

SEQ ID NO: 4501 - DNA, 27 bp, synthetic construct
  source 1..27: mol_type = other DNA
  misc_feature 1..27: note = Synthetic
atgctccaaacatacgtaaacatttag

SEQ ID NO: 4502 - DNA, 48 bp, synthetic construct
  source 1..48: mol_type = other DNA
  misc_feature 1..48: note = Synthetic
atttttactttggactataaactgcgactgcgactcggtccgcactag

SEQ ID NO: 4503 - DNA, 168 bp, synthetic construct
  source 1..168: mol_type = other DNA
  misc_feature 1..168: note = Synthetic
atgagcggctccagcgaacgagagctcgcggccatcgtgcgcgacctgggctgcgggccctactttttgggcacccacgacaagcgcttcccgggcttcctcgccggcgacaagctggcctgcgccattgtcaacacggccgactcggtccgcactagcctgaggtaa

SEQ ID NO: 4504 - DNA, 102 bp, synthetic construct
  source 1..102: mol_type = other DNA
  misc_feature 1..102: note = Synthetic
ttgggcacccacgacaagcgcttcccgggcttcctcgccggcgacaagctggcctgcgccattgtcaacacggccgactcggtccgcactagcctgaggtaa

SEQ ID NO: 4505 - DNA, 114 bp, synthetic construct
  source 1..114: mol_type = other DNA
  misc_feature 1..114: note = Synthetic
atgaagccgttaaacagattgagcaggaagtgcttaccacctggcccacggaggcaatttctcatgctgaaaacgtggtgtaccggctgtctggtatgtatgagtttgtggtga

SEQ ID NO: 4506 - DNA, 102 bp, synthetic construct
  source 1..102: mol_type = other DNA
  misc_feature 1..102: note = Synthetic
atgagtcaattggtagagttttataacgaagtagccagttggctgctacgagacgagacgtcgcctattcctgacgactcggtccgcactagcctgaggtaa

SEQ ID NO: 4507 - DNA, 18 bp, synthetic construct
  misc_feature 1..18: note = Synthetic
  source 1..18: mol_type = other DNA
atgattgggaaccagtaa

SEQ ID NO: 4508 - DNA, 171 bp, synthetic construct
  source 1..171: mol_type = other DNA
  misc_feature 1..171: note = Synthetic
atagccaattcagtgactgtatcacacgcgccatatactattacttatcacgatgattgggaaccagtaatgagtcaattggtagagttttataacgaagtagccagttggctgctacgagacgagacgtcgcctattcctgacgactcggtccgcactagcctgaggtaa

SEQ ID NO: 4509 - DNA, 21 bp, synthetic construct
  misc_feature 1..21: note = Synthetic
  source 1..21: mol_type = other DNA
acgatgattgggaaccagtaa

SEQ ID NO: 4510 - DNA, 171 bp, synthetic construct
  misc_feature 1..171: note = Synthetic
  source 1..171: mol_type = other DNA
ataatgaattcagtgactatatcacacgcaccatatactattacttatcacgatgattgggaaccagtaatgagtcaattggtagagttttataacgaagtagccagttggctgctacgagacgagacgtcgcctattcctgacgactcggtccgcactagcctgaggtaa

SEQ ID NO: 4511 - DNA, 159 bp, synthetic construct
  misc_feature 1..159: note = Synthetic
  source 1..159: mol_type = other DNA
gtgactatatcacacgcaccatatactattacttatcacgatgattgggaaccagtaatgagtcaattggtagagttttataacgaagtagccagttggctgctacgagacgagacgtcgcctattcctgacgactcggtccgcactagcctgaggtaa

SEQ ID NO: 4512 - DNA, 168 bp, synthetic construct
  source 1..168: mol_type = other DNA
  misc_feature 1..168: note = Synthetic
atgaattcagtgactgtatcacacgcaccatatactattacttatcacgatgattgggaaccagtcatgaatcaattagtagagttttataacgaagtagccagttggctgctacgagacgagacgtcgcctattcctgacgactcggtccgcactagcctgaggtaa

SEQ ID NO: 4513 - DNA, 219 bp, synthetic construct
  misc_feature 1..219: note = Synthetic
  source 1..219: mol_type = other DNA
attggtgcgttaatacacagaattctgattatagcgcactattatagcaccatgaattacatccctacgcaaacgttttacggccgccggtggcgcccgcgcccggcggcccgtccttggccgttgcaggccactccggtggctcccgtcgtccccgacttccaggcccagcagatgcagcaactcatcagcgactcggtccgcactagcctgaggtaa

SEQ ID NO: 4514 - DNA, 219 bp, synthetic construct
  misc_feature 1..219: note = Synthetic
  source 1..219: mol_type = other DNA
attggtgcgttaatacacagaattctgattatagcgcactattatagcaccgccaattacatccctacgcaaacgttttacggccgccggtggcgcccgcgcccggcggcccgtccttggccgttgcaggccactccggtggctcccgtcgtccccgacttccaggcccagcagatgcagcaactcatcagcgactcggtccgcactagcctgaggtaa

SEQ ID NO: 4515 - DNA, 36 bp, synthetic construct
  misc_feature 1..36: note = Synthetic
  source 1..36: mol_type = other DNA
atgtatgtcttgttgcagatcatcaagaacacgtag

SEQ ID NO: 4516 - DNA, 42 bp, synthetic construct
  source 1..42: mol_type = other DNA
  misc_feature 1..42: note = Synthetic
atgccggagaagttgctaattttgaatttggtgagcgtttga

SEQ ID NO: 4517 - DNA, 57 bp, synthetic construct
  source 1..57: mol_type = other DNA
  misc_feature 1..57: note = Synthetic
ataatttcaatcatcgaaagggcaaacacaaaacccccgccgataacttccacttaa

SEQ ID NO: 4518 - DNA, 195 bp, synthetic construct
  source 1..195: mol_type = other DNA
  misc_feature 1..195: note = Synthetic
ctgggtcatttttataataatactagaatgaccctcaggctgcaaaataaaaatttgtatctgacgtacttggatacagaagaacgaatatttagtgaattaattttaataacagaactggcagaacgattagacaaatatggagtaaaatatgctattgcctgtaacgactcggtccgcactagcctgaggtaa

SEQ ID NO: 4519 - DNA, 168 bp, synthetic construct
  misc_feature 1..168: note = Synthetic
  source 1..168: mol_type = other DNA
atggccctactacagtggatgttagatcacgttcaggatgaagaaaaaaactgtgaaaacctttcaatagatgatcagcattcactcttcggcataaacagagactggttgagtttcctgcaactctccaagttagaaatcgactcggtccgcactagcctgaggtaa

SEQ ID NO: 4520 - DNA, 84 bp, synthetic construct
  source 1..84: mol_type = other DNA
  misc_feature 1..84: note = Synthetic
atgctcctagggaatttaatccactgcatttcatttcccaaccatggccctactacagtggatgttagatcacgttcaggatga

SEQ ID NO: 4521 - DNA, 168 bp, synthetic construct
  source 1..168: mol_type = other DNA
  misc_feature 1..168: note = Synthetic
atggccctactacagtggatgttagatcacgttcaggatgaagaaaaaaactatgaaaacctttcaatagatgatcagcattcactcttcggcataaacagagactggttgagtttcctgcaactctccaagttagaaatcgactcggtccgcactagcctgaggtaa

SEQ ID NO: 4522 - DNA, 84 bp, synthetic construct
  source 1..84: mol_type = other DNA
  misc_feature 1..84: note = Synthetic
atgctcctagggaatttaatccactgcatttcatttcccaaccgccgccctactacagtggatgttagatcacgttcaggatga

SEQ ID NO: 4523 - DNA, 45 bp, synthetic construct
  source 1..45: mol_type = other DNA
  misc_feature 1..45: note = Synthetic
atgttagcattcacccgtcgatacttggcctttactactctttaa

SEQ ID NO: 4524 - DNA, 51 bp, synthetic construct
  misc_feature 1..51: note = Synthetic
  source 1..51: mol_type = other DNA
aagctgacggccctcccctgtcgcgactcggtccgcactagcctgaggtaa

SEQ ID NO: 4525 - DNA, 60 bp, synthetic construct
  misc_feature 1..60: note = Synthetic
  source 1..60: mol_type = other DNA
atgagatcgaacgtgctgagatttctccgggggttgtaccctcttctaacctcaagctga

SEQ ID NO: 4526 - DNA, 210 bp, synthetic construct
  source 1..210: mol_type = other DNA
  misc_feature 1..210: note = Synthetic
aagatactgagcagtctccgatgttgtgtcccagcggcgaggatgtccaagcgcaaatacaaggaagaaatgctgcaggttatcgcacctgaagtctacggccaaccgttgaaggatgaaaaaaaaccccgcaaaatcaagcgggttaaaaaggacaaaaaagaagaggaagatggcgatgacgactcggtccgcactagcctgaggtaa

SEQ ID NO: 4527 - DNA, 210 bp, synthetic construct
  source 1..210: mol_type = other DNA
  misc_feature 1..210: note = Synthetic
aagatactgagcagtctccgatgttgtgtcccagcggcgagggcctccaagcgcaaatacaaggaagaaatgctgcaggttatcgcacctgaagtctacggccaaccgttgaaggatgaaaaaaaaccccgcaaaatcaagcgggttaaaaaggacaaaaaagaagaggaagatggcgatgacgactcggtccgcactagcctgaggtaa

SEQ ID NO: 4528 - DNA, 57 bp, synthetic construct
  source 1..57: mol_type = other DNA
  misc_feature 1..57: note = Synthetic
atgagggactggcgctgcaagtgtttcagcagcacatcctcctctcctcccaggtag

SEQ ID NO: 4529 - DNA, 168 bp, synthetic construct
  source 1..168: mol_type = other DNA
  misc_feature 1..168: note = Synthetic
atgaccgctcagccgccgctgcaccaccgccaccacccgtacaccctgttcgggaccagctgtcatctcagctggtacggccttctagaggcctcggtgcctatcgtacaatgtctgtttttggatctgggtggcggccgcgactcggtccgcactagcctgaggtaa

SEQ ID NO: 4530 - DNA, 48 bp, synthetic construct
  source 1..48: mol_type = other DNA
  misc_feature 1..48: note = Synthetic
atgtctgtttttggatctgggtggcggccgcgactcggtccgcactag

SEQ ID NO: 4531 - DNA, 171 bp, synthetic construct
  source 1..171: mol_type = other DNA
  misc_feature 1..171: note = Synthetic
agggccaccgctcagccgccgctgcaccaccgccaccacccgtacaccctgttcgggaccagctgtcatctcagctggtacggccttctagaggcctcggtgcctatcgtacaatgtctgtttttggatctgggtggcggccgcgactcggtccgcactagcctgaggtaa

SEQ ID NO: 4532 - DNA, 42 bp, synthetic construct
  misc_feature 1..42: note = Synthetic
  source 1..42: mol_type = other DNA
atgctgagaaagaaaaagttaagttctacaaaagagaactag

SEQ ID NO: 4533 - DNA, 57 bp, synthetic construct
  misc_feature 1..57: note = Synthetic
  source 1..57: mol_type = other DNA
atgagaaaccattaccaaattatacatttcctcgcattaaaaatgtatctccgttga

SEQ ID NO: 4534 - DNA, 126 bp, synthetic construct
  source 1..126: mol_type = other DNA
  misc_feature 1..126: note = Synthetic
aagatggggtctgatccgacatgtaccatttttacgctactcaggcgcggacgcggaattggcgtcaggcatggcatggcgcgctcgcgtgctaggagagacgctcagcgactcggtccgcactag

SEQ ID NO: 4535 - DNA, 72 bp, synthetic construct
  source 1..72: mol_type = other DNA
  misc_feature 1..72: note = Synthetic
ataattaagagtccactgccaaagctgcccgcagctgcgccagtcgcgacgcgcttgcaagatggggtctga

SEQ ID NO: 4536 - DNA, 150 bp, synthetic construct
  misc_feature 1..150: note = Synthetic
  source 1..150: mol_type = other DNA
ctgcgccagtcgcgacgcgcttgcaagatggggtctgatccgacatgtaccatttttacgctactcaggcgcggacgcggaattggcgtcaggcatggcatggcgcgctcgcgtgctaggagagacgctcagcgactcggtccgcactag

SEQ ID NO: 4537 - DNA, 219 bp, synthetic construct
  misc_feature 1..219: note = Synthetic
  source 1..219: mol_type = other DNA
ttgactaccgggaagagggaaaaaacagacaaagggacggacgctgttgctatggctctgagcgtacaagattgcgcccgtctgactggtcaaagcgtgcccgccatggaacgcttctccccgttgcgtaacatctggaaccgcgttcgcgaatacgcccgcgccgccactaccgccgccggcatcacctgcgactcggtccgcactagcctgaggtaa

SEQ ID NO: 4538 - DNA, 219 bp, synthetic construct
  source 1..219: mol_type = other DNA
  misc_feature 1..219: note = Synthetic
ttgactaccgggaagagggaaaaaacagacaaagggacggacgctgttgctgccgctctgagcgtacaagattgcgcccgtctgactggtcaaagcgtgcccgccatggaacgcttctccccgttgcgtaacatctggaaccgcgttcgcgaatacgcccgcgccgccactaccgccgccggcatcacctgcgactcggtccgcactagcctgaggtaa

SEQ ID NO: 4539 - DNA, 207 bp, synthetic construct
  source 1..207: mol_type = other DNA
  misc_feature 1..207: note = Synthetic
ttggagtcgcgacctgtcccgcaagacgaacctaccgatatgggtgccgaactctgcaaacgaatatgttgtgagttcggtaccacgtccggtgagcccctgaaagatgctctgggtcgccaggtgtctctacgctcctacgacaacatccctccgacttcctcctcggacgaaggggacgactcggtccgcactagcctgaggtaa

SEQ ID NO: 4540 - DNA, 90 bp, synthetic construct
  source 1..90: mol_type = other DNA
  misc_feature 1..90: note = Synthetic
ctgtcccgcaagacgaacctaccgatatgggtgccgaactctgcaaacgaatatgttgtgagttcggtaccacgtccggtgagcccctga

SEQ ID NO: 4541 - DNA, 168 bp, synthetic construct
  misc_feature 1..168: note = Synthetic
  source 1..168: mol_type = other DNA
atgtcaaagcgcaaaatcaaggaggagatgctccaggtcgtcgccccggagatttacggaccaccccaggcggaccagaaaccccgcaaaatcaagcgggttaaaaaaaaggatgaggtggacgagggggcagtagagttcgactcggtccgcactagcctgaggtaa

SEQ ID NO: 4542 - DNA, 27 bp, synthetic construct
  source 1..27: mol_type = other DNA
  misc_feature 1..27: note = Synthetic
gtgcgcacccgtcctcctcgtccctga

SEQ ID NO: 4543 - DNA, 129 bp, synthetic construct
  source 1..129: mol_type = other DNA
  misc_feature 1..129: note = Synthetic
atgcttgtgtcctcccccgcaagcgacggcctcaaagcgcaaaatcaaggaggagatgctccaggtcgtcgccccggagatttacggacccccggcggaccagaaaccccgcaaaatcaaacgggttaa

SEQ ID NO: 4544 - DNA, 168 bp, synthetic construct
  misc_feature 1..168: note = Synthetic
  source 1..168: mol_type = other DNA
atggcctccgacgcgtcaccgaccgcggctaagctaacgcttatcttactaggtaagcctctttgttcagtatgcgaggtcacccggcgcatgctcgcgcgcctcgagggcgagatggagctgaagtgcgtgaacatcctcgactcggtccgcactagcctgaggtaa

SEQ ID NO: 4545 - DNA, 54 bp, synthetic construct
  source 1..54: mol_type = other DNA
  misc_feature 1..54: note = Synthetic
atgggaccgactactttgggtgtccgtgtttcgactcggtccgcactagcctga

SEQ ID NO: 4546 - DNA, 39 bp, synthetic construct
  misc_feature 1..39: note = Synthetic
  source 1..39: mol_type = other DNA
atgtccacatcctacaatatcaaacggatacttgtctag

SEQ ID NO: 4547 - DNA, 42 bp, synthetic construct
  misc_feature 1..42: note = Synthetic
  source 1..42: mol_type = other DNA
atgtgtacgctaataaacacgactcggtccgcactagcctga

SEQ ID NO: 4548 - DNA, 201 bp, synthetic construct
  source 1..201: mol_type = other DNA
  misc_feature 1..201: note = Synthetic
atagcaagaaatccacgtcgccacgtctcgagaatgccggccccgcggggtccccttcgcgcaacattcctggccctggtcgcgttcgggttgctgcttcagatagacctcagcgacgttacgaatgtgaccagcagcacaaaagtccctactagcaccagcaacagaaatagcgactcggtccgcactagcctgaggtaa

SEQ ID NO: 4549 - DNA, 216 bp, synthetic construct
  misc_feature 1..216: note = Synthetic
  source 1..216: mol_type = other DNA
acgtcgttcgcggacatagcaagaaatccacgtcgccacgtctcgagagccccggccccgcggggtccccttcgcgcaacattcctggccctggtcgcgttcgggttgctgcttcagatagacctcagcgacgttacgaatgtgaccagcagcacaaaagtccctactagcaccagcaacagaaatagcgactcggtccgcactagcctgaggtaa

SEQ ID NO: 4550 - DNA, 126 bp, synthetic construct
  misc_feature 1..126: note = Synthetic
  source 1..126: mol_type = other DNA
gtgccactccccgcggcaaacaaggcagcgaacagtatcgtaagcagcgccacgagcggcaccgcgcaccgtgcggtgagatctccccgcggcgacatgatgcggccgcgactcggtccgcactag

SEQ ID NO: 4551 - DNA, 183 bp, synthetic construct
  misc_feature 1..183: note = Synthetic
  source 1..183: mol_type = other DNA
atgcatcgcctcgacgcccaaaaagcaccgaggttgagccacccgccgcgcacgcgcttaggacgactctataaaaacccacgtccactcagacacgcaacttttggccgccacacctgtcaccgctgctatatttgcgacagttgccggaacccttcccgacctcgactcggtccgcactag

SEQ ID NO: 4552 - DNA, 165 bp, synthetic construct
  source 1..165: mol_type = other DNA
  misc_feature 1..165: note = Synthetic
acgtcggtcaacaaacagctcttaaaggacgtgatgcgcgtcgaccttgagcgacagcagcatcagtttctgcggcgtacctacggaccgcagcaccggctcaccacgcagcaggctttgacggtgatgcgtgtggccgactcggtccgcactagcctgaggtaa

SEQ ID NO: 4553 - DNA, 36 bp, synthetic construct
  source 1..36: mol_type = other DNA
  misc_feature 1..36: note = Synthetic
ttgaatctgccacgtcggtcaacaaacagctcttaa

SEQ ID NO: 4554 - DNA, 168 bp, synthetic construct
  source 1..168: mol_type = other DNA
  misc_feature 1..168: note = Synthetic
atggccttgcgagcgctgcctgtgctacgcgagcactgcgcgcgcggcgcagtgctctttagtacaacgcgctacgtactctccaactatttcaacccctcggaggaaaagcacgcggccatttacttcggacgcgaactcgactcggtccgcactagcctgaggtaa

SEQ ID NO: 4555 - DNA, 90 bp, synthetic construct
  misc_feature 1..90: note = Synthetic
  source 1..90: mol_type = other DNA
acgtactctccaactatttcaacccctcggaggaaaagcacgcggccatttacttcggacgcgaactcgactcggtccgcactagcctga

SEQ ID NO: 4556 - DNA, 57 bp, synthetic construct
  source 1..57: mol_type = other DNA
  misc_feature 1..57: note = Synthetic
attatttcaggggcttcaaaaatacagctaattaccaaccggcagaacattaattga

SEQ ID NO: 4557 - DNA, 48 bp, synthetic construct
  misc_feature 1..48: note = Synthetic
  source 1..48: mol_type = other DNA
atggcttggtggtcgattggtgctatagaccgactcggtccgcactag

SEQ ID NO: 4558 - DNA, 141 bp, synthetic construct
  misc_feature 1..141: note = Synthetic
  source 1..141: mol_type = other DNA
atgccggtgacgttggagccgcacgagctggggctggaagtgcgcgagcacctgcgcgccgcggtcatgcggcgctacctgcacaaggagtccacaggcatcatgcccaaggacgactcggtccgcactagcctgaggtaa

SEQ ID NO: 4559 - DNA, 150 bp, synthetic construct
  source 1..150: mol_type = other DNA
  misc_feature 1..150: note = Synthetic
atgttgaccatccagcttgtggcgggttattatggtgtggaagttggtatggttgaggtggtttggggggctttgaaggcctgcgccgcagcccgcgagaccctagtgaccaacaggttgccggtactaaacttatctaaggaggactga

SEQ ID NO: 4560 - DNA, 45 bp, synthetic construct
  source 1..45: mol_type = other DNA
  misc_feature 1..45: note = Synthetic
ataacaatcattatgcagtctgcgactcggtccgcactagcctga

SEQ ID NO: 4561 - DNA, 189 bp, synthetic construct
  misc_feature 1..189: note = Synthetic
  source 1..189: mol_type = other DNA
atgtatttaacagagcagattatggacaggccaaaacctagaacagtaaaggaactagcagacactcttgtgattcctttaatagatttgttgataccttgtaaattttgcaatagatttttatcttattttgagctacttaattttgatcacaagtgtttcgactcggtccgcactagcctgaggtaa

SEQ ID NO: 4562 - DNA, 189 bp, synthetic construct
  misc_feature 1..189: note = Synthetic
  source 1..189: mol_type = other DNA
atgtatttaacagagcagattgccgacaggccaaaacctagaacagtaaaggaactagcagacactcttgtgattcctttaatagatttgttgataccttgtaaattttgcaatagatttttatcttattttgagctacttaattttgatcacaagtgtttcgactcggtccgcactagcctgaggtaa

SEQ ID NO: 4563 - DNA, 51 bp, synthetic construct
  source 1..51: mol_type = other DNA
  misc_feature 1..51: note = Synthetic
atgaagattaagaaaaacctacctcggccgactcggtccgcactagcctga

SEQ ID NO: 4564 - DNA, 207 bp, synthetic construct
  misc_feature 1..207: note = Synthetic
  source 1..207: mol_type = other DNA
atgaaacaccgagtgtattctgaagaattgggtattaatactgatttaaactcgataatcagtcaacaatctacaatggatatggatatggaaatagacgaagatgaaatcatggaacttcttaatatattaactgagttaggttgtgatgttgactttgatgaaaattttagcgatatcgactcggtccgcactagcctgaggtaa

SEQ ID NO: 4565 - DNA, 18 bp, synthetic construct
  misc_feature 1..18: note = Synthetic
  source 1..18: mol_type = other DNA
atgtctcacgacctataa

SEQ ID NO: 4566 - DNA, 93 bp, synthetic construct
  misc_feature 1..93: note = Synthetic
  source 1..93: mol_type = other DNA
atgtattttaacaaattgtcggaccaagcacttgcgaatctgctgccggggacgactgtgagttccgactcggtccgcactagcctgaggtaa

SEQ ID NO: 4567 - DNA, 207 bp, synthetic construct
  source 1..207: mol_type = other DNA
  misc_feature 1..207: note = Synthetic
ctggggtctaagatattatgtcgatacaataaaaatattggtgttgtgtttgtggacaatgatactacgtgtaatgtttcctttccgagcggtgtgcagttacaattactaaatcaatcggtgatggagtcaattagaactaaaacgtatgtagtggattacgctaggaaaactacagagagagcgactcggtccgcactagcctga

SEQ ID NO: 4568 - DNA, 15 bp, synthetic construct
  misc_feature 1..15: note = Synthetic
  source 1..15: mol_type = other DNA
atgtcgatacaataa

SEQ ID NO: 4569 - DNA, 39 bp, synthetic construct
  source 1..39: mol_type = other DNA
  misc_feature 1..39: note = Synthetic
atgtcgcacacttccacctcccctaaaagttctatttaa

SEQ ID NO: 4570 - DNA, 156 bp, synthetic construct
  misc_feature 1..156: note = Synthetic
  source 1..156: mol_type = other DNA
atggataaaactttgtccagaaatgaagcaaaagaacttatgcagctgctgggtcttgatatgacctgctggggaaatttaccactaatgagaacaaaataccttagcaaatgcaaagaatttcatcccgactcggtccgcactagcctgaggtaa

SEQ ID NO: 4571 - DNA, 66 bp, synthetic construct
  misc_feature 1..66: note = Synthetic
  source 1..66: mol_type = other DNA
atgctcaacgacatgcagtggctcgccagcagcgactccgactcggtccgcactagcctgaggtaa

SEQ ID NO: 4572 - DNA, 96 bp, synthetic construct
  source 1..96: mol_type = other DNA
  misc_feature 1..96: note = Synthetic
acgcccgccgccccgcacgcctgggggatgctcaacgacatgcagtggctcgccagcagcgactcggacgactcggtccgcactagcctgaggtaa

SEQ ID NO: 4573 - DNA, 69 bp, synthetic construct
  misc_feature 1..69: note = Synthetic
  source 1..69: mol_type = other DNA
atgctcaacgacatgcagtggctcgccagcagcgactcggacgactcggtccgcactagcctgaggtaa

SEQ ID NO: 4574 - DNA, 78 bp, synthetic construct
  source 1..78: mol_type = other DNA
  misc_feature 1..78: note = Synthetic
atgaagacttcaaccccgtctacccctatgacaccacaaccactcctgcagttccctttatatcacccccctttgtaa

SEQ ID NO: 4575 - DNA, 33 bp, synthetic construct
  misc_feature 1..33: note = Synthetic
  source 1..33: mol_type = other DNA
atggtcttcaggaaaaccccccaggtgttttaa

SEQ ID NO: 4576 - DNA, 93 bp, synthetic construct
  source 1..93: mol_type = other DNA
  misc_feature 1..93: note = Synthetic
acgacgactatgatgaagcggccgtggtggccgtgctgggctgggtgcatcgcttcgaggttgtcgtccgcgactcggtccgcactagcctga

SEQ ID NO: 4577 - DNA, 162 bp, synthetic construct
  source 1..162: mol_type = other DNA
  misc_feature 1..162: note = Synthetic
ctgcgctttcccaccgcgacccagcgacagatcgtgtttcggcggctgttcgacagcggcaacaacgacgactatgatgaagcggccgtggtggccgtgctgggctgggtgcatcgcttcgaggttgtcgtccgcgactcggtccgcactagcctgaggtaa

SEQ ID NO: 4578 - DNA, 174 bp, synthetic construct
  source 1..174: mol_type = other DNA
  misc_feature 1..174: note = Synthetic
gtgtttttctcgtttgttgttgttctggtctggaaacacgtggccaaggtctcgagctccagggctcaagatctcctccctccggcctcttccccgagagctgggataacaggcgtgcgctcggaggggctccgggcccttcttgacgcgagactgcgactcggtccgcactag

SEQ ID NO: 4579 - DNA, 174 bp, synthetic construct
  misc_feature 1..174: note = Synthetic
  source 1..174: mol_type = other DNA
ataaccatgactaaaaaaccaggagggcccggtaaaaaccgggctatcaatatgctgaaacgcggcctaccccgcgtattcccactagtgggagtgaagagggtagtaatgagcttgttggacggcagagggccagtacgtttcgtcgactcggtccgcactagcctgaggtaa

SEQ ID NO: 4580 - DNA, 57 bp, synthetic construct
  source 1..57: mol_type = other DNA
  misc_feature 1..57: note = Synthetic
atcgagagattagtgcagtttaaacagttttttagaacggaagataaccgccactaa

SEQ ID NO: 4581 - DNA, 174 bp, synthetic construct
  misc_feature 1..174: note = Synthetic
  source 1..174: mol_type = other DNA
ataaccgccactaaaaaaccaggagggcccggtaaaaaccgggctatcaatatgctgaaacgcggcctaccccgcgtattcccactagtgggagtgaagagggtagtaatgagcttgttggacggcagagggccagtacgtttcgtcgactcggtccgcactagcctgaggtaa

SEQ ID NO: 4582 - DNA, 42 bp, synthetic construct
  source 1..42: mol_type = other DNA
  misc_feature 1..42: note = Synthetic
atgcccatcttaaactatgcgactcggtccgcactagcctga

SEQ ID NO: 4583 - DNA, 69 bp, synthetic construct
  misc_feature 1..69: note = Synthetic
  source 1..69: mol_type = other DNA
atgaggcaactcatgatgtacccgctggtgttgccgttcacttttccgttttacgtgccgcggtcctag

SEQ ID NO: 4584 - DNA, 18 bp, synthetic construct
  misc_feature 1..18: note = Synthetic
  source 1..18: mol_type = other DNA
ttgcaacatggcccatga

SEQ ID NO: 4585 - DNA, 18 bp, synthetic construct
  source 1..18: mol_type = other DNA
  misc_feature 1..18: note = Synthetic
atggtaataaagcgatga

SEQ ID NO: 4586 - DNA, 90 bp, synthetic construct
  misc_feature 1..90: note = Synthetic
  source 1..90: mol_type = other DNA
atgcactggagaagcatgacaccggggcgacgttttttgatggtcgccccgctgtttttgatgaggcggattcgactcggtccgcactag

SEQ ID NO: 4587 - DNA, 90 bp, synthetic construct
  misc_feature 1..90: note = Synthetic
  source 1..90: mol_type = other DNA
atgcactggagaagcatgacaccggggcgacgttttttgatggtcgccccggcctttttgatgaggcggattcgactcggtccgcactag

SEQ ID NO: 4588 - DNA, 30 bp, synthetic construct
  misc_feature 1..30: note = Synthetic
  source 1..30: mol_type = other DNA
atgtcctcgactcggtccgcactagcctga

SEQ ID NO: 4589 - DNA, 87 bp, synthetic construct
  source 1..87: mol_type = other DNA
  misc_feature 1..87: note = Synthetic
atggctatacataggcaggagacgttatgggacatcaaagtcgatcccggatccctatcctccgggattatctggttcggtatttag

SEQ ID NO: 4590 - DNA, 36 bp, synthetic construct
  source 1..36: mol_type = other DNA
  misc_feature 1..36: note = Synthetic
gtggctcctaaagtgctctctagtcgcaccttctaa

SEQ ID NO: 4591 - DNA, 168 bp, synthetic construct
  misc_feature 1..168: note = Synthetic
  source 1..168: mol_type = other DNA
atgtccatcctcatctctcccgataacaacaccggctggggactgggctccggcaagatgtacggcggagccaaaaggcgctccagtcagcacccagttcgagttcggggccacttccgtgctccctggggagcttacaacgactcggtccgcactagcctgaggtaa

SEQ ID NO: 4592 - DNA, 159 bp, synthetic construct
  source 1..159: mol_type = other DNA
  misc_feature 1..159: note = Synthetic
atgtcccaatcaaaagaagtgaaatccttcctttggttacagactctgagaagagagctctccccgttttgcacggacgtgagagccaaagttgtcaaggatgccgtgagtctgatcaacggccttgatttcgactcggtccgcactagcctgaggtaa

SEQ ID NO: 4593 - DNA, 105 bp, synthetic construct
  source 1..105: mol_type = other DNA
  misc_feature 1..105: note = Synthetic
aagaacattaagatagccagggcattcacaatcgcagtccagcacagcatgcatttggaggtcatcgtccaaccctataaaaaaagccgactcggtccgcactag

SEQ ID NO: 4594 - DNA, 45 bp, synthetic construct
  source 1..45: mol_type = other DNA
  misc_feature 1..45: note = Synthetic
atcggcagatccacttcagaaaaaacgaactcgaagcgccactaa

SEQ ID NO: 4595 - DNA, 168 bp, synthetic construct
  misc_feature 1..168: note = Synthetic
  source 1..168: mol_type = other DNA
atggaaatagtcacatacaagacggcttcagcgagatctccgaccgtcacctggtcatcgggattcggacgagctatagcctcaattcaaaaaaggcatcaagaaaatatcaggaaacccctacgcttctacagcggtctcgactcggtccgcactagcctgaggtaa

SEQ ID NO: 4596 - DNA, 162 bp, synthetic construct
  misc_feature 1..162: note = Synthetic
  source 1..162: mol_type = other DNA
atagtcacatacaagacggcttcagcgagatctccgaccgtcacctggtcatcgggattcggacgagctatagcctcaattcaaaaaaggcatcaagaaaatatcaggaaacccctacgcttctacagcggtctcgactcggtccgcactagcctgaggtaa

SEQ ID NO: 4597 - DNA, 84 bp, synthetic construct
  source 1..84: mol_type = other DNA
  misc_feature 1..84: note = Synthetic
ctggccttaaccgaattttttcccatcgatctaattctcccccgcttaatactgacgctctcgcacccatctctctccttctag

SEQ ID NO: 4598 - DNA, 45 bp, synthetic construct
  misc_feature 1..45: note = Synthetic
  source 1..45: mol_type = other DNA
atttgccgcgtactcaccgactcggtccgcactagcctgaggtaa

SEQ ID NO: 4599 - DNA, 111 bp, synthetic construct
  source 1..111: mol_type = other DNA
  misc_feature 1..111: note = Synthetic
atggagtcgaacacgtcgcgagctaagggccatagccactcggtgtatcccccgattgttccctcgattatgaacattgccttggatataacggcttccaaccagacttag

SEQ ID NO: 4600 - DNA, 162 bp, synthetic construct
  source 1..162: mol_type = other DNA
  misc_feature 1..162: note = Synthetic
atcctcgcagagattaacgaaaattcctgctcctcatcttctgtggaccacgaagattgcgaggaaccggacgagatcgttcgcgaagagcaagactatcgggctctgctggccttttccctagtgatttgcggtacgctcctcgtcacttgtgtgatctga

SEQ ID NO: 4601 - DNA, 102 bp, synthetic construct
  misc_feature 1..102: note = Synthetic
  source 1..102: mol_type = other DNA
attcctgctcctcatcttctgtggaccacgaagattgcgaggaaccggacgagatcgttcgcgaagagcaagactatcgggctctgctggccttttccctag

SEQ ID NO: 4602 - DNA, 84 bp, synthetic construct
  misc_feature 1..84: note = Synthetic
  source 1..84: mol_type = other DNA
atgttgggacggactgccaaacggttaacaactggagtaatggaaacggctcgcatctttagggagtgggggagcgatacctag

SEQ ID NO: 4603 - DNA, 18 bp, synthetic construct
  source 1..18: mol_type = other DNA
  misc_feature 1..18: note = Synthetic
atgtcagtgaggcagtag

SEQ ID NO: 4604 - DNA, 54 bp, synthetic construct
  misc_feature 1..54: note = Synthetic
  source 1..54: mol_type = other DNA
atgttcgcaatcaaagatcctttgcattcctttagtatattgatccacgattga

SEQ ID NO: 4605 - DNA, 138 bp, synthetic construct
  source 1..138: mol_type = other DNA
  misc_feature 1..138: note = Synthetic
ctggccctaccgctacccctctttcaacccctcaccatcacccaacccgctgccccacccacatcccccccaccgccaccgctaccgtcacctctgaacttcacctttttcctcccgactcggtccgcactagcctga

SEQ ID NO: 4606 - DNA, 189 bp, synthetic construct
  misc_feature 1..189: note = Synthetic
  source 1..189: mol_type = other DNA
atggccgagctttacctgccgcaacgcaaggatgacctgtcctacaaggacatcccgcgttgtttcgtggctaatgccgagggccgcgcccaggtaggccgttactgtctgcaggacgccgtattggtgcgcgatctgttcaacaccattaattttcactacgaggccgggcgactcggtccgcactag

SEQ ID NO: 4607 - DNA, 189 bp, synthetic construct
  misc_feature 1..189: note = Synthetic
  source 1..189: mol_type = other DNA
atggccgagctttacctgcgccaacgcaaggatgacctgtcctacaaggacatcccgcgttgtttcgtggctaatgccgagggccgcgcccaggtaggccgttactgtctgcaggacgccgtattggtgcgcgatctgttcaacaccattaattttcactacgaggccgggcgactcggtccgcactag

SEQ ID NO: 4608 - DNA, 111 bp, synthetic construct
  source 1..111: mol_type = other DNA
  misc_feature 1..111: note = Synthetic
ataagctcaacactatggccgagctttacctgcggcaacccaaggatgacctgtcctacaaggacatcccgcgttgtttcgtggctaatgccgagggccgcgcccaggtag

SEQ ID NO: 4609 - DNA, 138 bp, synthetic construct
  source 1..138: mol_type = other DNA
  misc_feature 1..138: note = Synthetic
atcccgcgttgtttcgtggctaatgccgagggccgcgcccaggtaggccgttactgtctgcaggacgccgtattggtgcgcgatctgttcaacaccattaattttcactacgaggccgggcgactcggtccgcactag

SEQ ID NO: 4610 - DNA, 111 bp, synthetic construct
  misc_feature 1..111: note = Synthetic
  source 1..111: mol_type = other DNA
ataagctcaacactatggccgagctttacctgcggcagcgcaaggatgacctgtcctacaaggacatcccgcgttgtttcgtggctaatgccgagggccgcgcccaggtag

SEQ ID NO: 4611 - DNA, 189 bp, synthetic construct
  misc_feature 1..189: note = Synthetic
  source 1..189: mol_type = other DNA
atggccgagctttacctgcggcagcgcaaggatgacctgtcctacaaggacatcccgcgttgtttcgtggctaatgccgagggccgcgcccaggtaggccgttactgtctgcaggacgccgtattggtgcgcgatctgttcaacaccattaattttcactacgaggccgggcgactcggtccgcactag

SEQ ID NO: 4612 - DNA, 189 bp, synthetic construct
  source 1..189: mol_type = other DNA
  misc_feature 1..189: note = Synthetic
atggccgagctttacctgcggcgacgcaaggatgacctgtcctacaaggacatcccgcgttgtttcgtggctaatgccgagggccgcgcccaggtaggccgttactgtctgcaggacgccgtattggtgcgcgatctgttcaacaccattaattttcactacgaggccgggcgactcggtccgcactag

SEQ ID NO: 4613 - DNA, 189 bp, synthetic construct
  misc_feature 1..189: note = Synthetic
  source 1..189: mol_type = other DNA
atggccgagctttacctgcgggaacgcaaggatgacctgtcctacaaggacatcccgcgttgtttcgtggctaatgccgagggccgcgcccaggtaggccgttactgtctgcaggacgccgtattggtgcgcgatctgttcaacaccattaattttcactacgaggccgggcgactcggtccgcactag

SEQ ID NO: 4614 - DNA, 156 bp, synthetic construct
  misc_feature 1..156: note = Synthetic
  source 1..156: mol_type = other DNA
atggtgtcttccagcagcttgtgctgctgtacagcctgcaagactcttgccaggaacagccccctctgggctgtcaggagtgggtggctaggtgggaggtcgcagtcgaccccgatggtgttcagtagatgcaccacatcccccacttcgggatag

SEQ ID NO: 4615 - DNA, 78 bp, synthetic construct
  misc_feature 1..78: note = Synthetic
  source 1..78: mol_type = other DNA
atgcgcaagtctgtggcggaaccgactactttgggtgtccgtgtttccttttatttttattatggctgcttatggtga

SEQ ID NO: 4616 - DNA, 75 bp, synthetic construct
  misc_feature 1..75: note = Synthetic
  source 1..75: mol_type = other DNA
attatggctgcttatggtgacaatctgagattgttatcatatagctattggattagccatccggtgatatcttga

SEQ ID NO: 4617 - DNA, 57 bp, synthetic construct
  misc_feature 1..57: note = Synthetic
  source 1..57: mol_type = other DNA
atgatatccgcgaacgatatttgtgaaaatattaaaaaaaaatactttttttattaa

SEQ ID NO: 4618 - DNA, 45 bp, synthetic construct
  source 1..45: mol_type = other DNA
  misc_feature 1..45: note = Synthetic
atgcatcctgggcatgtttttttagaaagtttgcaaaccaattag

SEQ ID NO: 4619 - DNA, 168 bp, synthetic construct
  misc_feature 1..168: note = Synthetic
  source 1..168: mol_type = other DNA
atgatgaggatggaaactcaggagactctaacagaccgtttcaatgcactgcaagatgcaatattgaatctgattgaagaaaaccccagtgatttgaaatctattattcgttattgggaactaaatagaaaagaacacgtcgactcggtccgcactagcctgaggtaa

SEQ ID NO: 4620 - DNA, 57 bp, synthetic construct
  source 1..57: mol_type = other DNA
  misc_feature 1..57: note = Synthetic
aggcagatggaaaatctaaacgagatgctaaaaataatgcagctaaattggctgtag

SEQ ID NO: 4621 - DNA, 123 bp, synthetic construct
  misc_feature 1..123: note = Synthetic
  source 1..123: mol_type = other DNA
atcgtcgtcgtcgttgccggcttcgcctcctcggaagcgcctagaaaaaagacgatcaggaccagagaggaagagaccatcaccgacagcatcgccgcagcatgccgactcggtccgcactag

SEQ ID NO: 4622 - DNA, 135 bp, synthetic construct
  misc_feature 1..135: note = Synthetic
  source 1..135: mol_type = other DNA
acgcccaccaaattaaattttatgaagaccaatcacgacctcccaaagtcccccttacagcctgtgttatcacccaaagccaaattctggcccaattacaagctattcagcaggcgcgtcaggaatttcttttaa

SEQ ID NO: 4623 - DNA, 21 bp, synthetic construct
  source 1..21: mol_type = other DNA
  misc_feature 1..21: note = Synthetic
ctggccgttctcctcttctga

SEQ ID NO: 4624 - DNA, 171 bp, synthetic construct
  misc_feature 1..171: note = Synthetic
  source 1..171: mol_type = other DNA
aaggccatgaggatggaaactcaggagactctaacagaccgtttcaatgcactgcaagatgcaatattgaatctgattgaagaaaaccccagtgatttgaaatctattattcgttattgggaactaaatagaaaagaacacgtcgactcggtccgcactagcctgaggtaa

SEQ ID NO: 4625 - DNA, 213 bp, synthetic construct
  misc_feature 1..213: note = Synthetic
  source 1..213: mol_type = other DNA
ttggctactatatccataatagacatggagacacccttgaaggcgccagagagctcattaaaaccctacaacgagccctcttcgtgcacttcagagcgggatgtaaccgctcaagaattggctaaacaaggagaagaactccttgcccagctgcaccgacccctagagccatgcactaacaaatgctattcgactcggtccgcactagcctga

SEQ ID NO: 4626 - DNA, 36 bp, synthetic construct
  misc_feature 1..36: note = Synthetic
  source 1..36: mol_type = other DNA
ttgttttactatccgttaatgatttccaatcgttaa

SEQ ID NO: 4627 - DNA, 111 bp, synthetic construct
  misc_feature 1..111: note = Synthetic
  source 1..111: mol_type = other DNA
ataagctcaacactatggccgagctttacctgcggcaacgaaaggatgacctgtcctacaaggacatcccgcgttgtttcgtggctaatgccgagggccgcgcccaggtag

SEQ ID NO: 4628 - DNA, 189 bp, synthetic construct
  source 1..189: mol_type = other DNA
  misc_feature 1..189: note = Synthetic
atggccgagctttacctgcggcaacgaaaggatgacctgtcctacaaggacatcccgcgttgtttcgtggctaatgccgagggccgcgcccaggtaggccgttactgtctgcaggacgccgtattggtgcgcgatctgttcaacaccattaattttcactacgaggccgggcgactcggtccgcactag

SEQ ID NO: 4629 - DNA, 189 bp, synthetic construct
  source 1..189: mol_type = other DNA
  misc_feature 1..189: note = Synthetic
atggccgagctttacctgcggcaacgcaacgatgacctgtcctacaaggacatcccgcgttgtttcgtggctaatgccgagggccgcgcccaggtaggccgttactgtctgcaggacgccgtattggtgcgcgatctgttcaacaccattaattttcactacgaggccgggcgactcggtccgcactag

SEQ ID NO: 4630 - DNA, 189 bp, synthetic construct
  misc_feature 1..189: note = Synthetic
  source 1..189: mol_type = other DNA
atggccgagctttacctgcggcaacgcaaggacgacctgtcctacaaggacatcccgcgttgtttcgtggctaatgccgagggccgcgcccaggtaggccgttactgtctgcaggacgccgtattggtgcgcgatctgttcaacaccattaattttcactacgaggccgggcgactcggtccgcactag

SEQ ID NO: 4631 - DNA, 36 bp, synthetic construct
  misc_feature 1..36: note = Synthetic
  source 1..36: mol_type = other DNA
atgacagaaaacgaaagattgcttcatttgatctaa

SEQ ID NO: 4632 - DNA, 180 bp, synthetic construct
  source 1..180: mol_type = other DNA
  misc_feature 1..180: note = Synthetic
ctgaacgaaaagatggctacagtcaactgggctgattcctctgaaccacaacgtggtcgtcagggcagaataccttattccctttatagccctttgcttgttgatagtgaacaaccttggaaggtgatacctcgtaatttggtacccaccaacgactcggtccgcactagcctgaggtaa

SEQ ID NO: 4633 - DNA, 168 bp, synthetic construct
  source 1..168: mol_type = other DNA
  misc_feature 1..168: note = Synthetic
atgctatcaggtaacgcaggagaaggagcaacagcctgcggaggttcggccgccgcgggccaggacctcatcagcgtcccccgcaacacctttatgacactgcttcagaccaacctggacaacaaaccgccgaggcagaccgactcggtccgcactagcctgaggtaa

SEQ ID NO: 4634 - DNA, 75 bp, synthetic construct
  source 1..75: mol_type = other DNA
  misc_feature 1..75: note = Synthetic
atgacactgcttcagaccaacctggacaacaaaccgccgaggcagaccgactcggtccgcactagcctgaggtaa

SEQ ID NO: 4635 - DNA, 168 bp, synthetic construct
  source 1..168: mol_type = other DNA
  misc_feature 1..168: note = Synthetic
atgctatcaggtaacgcaggagaaggagcaacagcctgcggaggttcggccgccgcgggccaggacctcatcagcgtcccccgcaacacctttatgacactgcttcagaccaacctggacaacaaaccgccgaggcaaaccgactcggtccgcactagcctgaggtaa

SEQ ID NO: 4636 - DNA, 189 bp, synthetic construct
  source 1..189: mol_type = other DNA
  misc_feature 1..189: note = Synthetic
atggccgagctttacctgcggcaacgcaaggatgaccggtcctacaaggacatcccgcgttgtttcgtggctaatgccgagggccgcgcccaggtaggccgttactgtctgcaggacgccgtattggtgcgcgatctgttcaacaccattaattttcactacgaggccgggcgactcggtccgcactag

SEQ ID NO: 4637 - DNA, 189 bp, synthetic construct
  source 1..189: mol_type = other DNA
  misc_feature 1..189: note = Synthetic
atggccgagctttacctgcggcaacgcaaggatgacctctcctacaaggacatcccgcgttgtttcgtggctaatgccgagggccgcgcccaggtaggccgttactgtctgcaggacgccgtattggtgcgcgatctgttcaacaccattaattttcactacgaggccgggcgactcggtccgcactag

SEQ ID NO: 4638 - DNA, 189 bp, synthetic construct
  source 1..189: mol_type = other DNA
  misc_feature 1..189: note = Synthetic
atggccgagctttacctgcggcaacgcaaggatgacctggcctacaaggacatcccgcgttgtttcgtggctaatgccgagggccgcgcccaggtaggccgttactgtctgcaggacgccgtattggtgcgcgatctgttcaacaccattaattttcactacgaggccgggcgactcggtccgcactag

SEQ ID NO: 4639 - DNA, 189 bp, synthetic construct
  misc_feature 1..189: note = Synthetic
  source 1..189: mol_type = other DNA
atggccgagctttacctgcggcaacgcaaggatgacctgtactacaaggacatcccgcgttgtttcgtggctaatgccgagggccgcgcccaggtaggccgttactgtctgcaggacgccgtattggtgcgcgatctgttcaacaccattaattttcactacgaggccgggcgactcggtccgcactag

SEQ ID NO: 4640 - DNA, 189 bp, synthetic construct
  misc_feature 1..189: note = Synthetic
  source 1..189: mol_type = other DNA
atggccgagctttacctgcggcaacgcaaggatgacctgtcatacaaggacatcccgcgttgtttcgtggctaatgccgagggccgcgcccaggtaggccgttactgtctgcaggacgccgtattggtgcgcgatctgttcaacaccattaattttcactacgaggccgggcgactcggtccgcactag

SEQ ID NO: 4641 - DNA, 189 bp, synthetic construct
  source 1..189: mol_type = other DNA
  misc_feature 1..189: note = Synthetic
atggccgagctttacctgcggcaacgcaaggatgacctgtccgacaaggacatcccgcgttgtttcgtggctaatgccgagggccgcgcccaggtaggccgttactgtctgcaggacgccgtattggtgcgcgatctgttcaacaccattaattttcactacgaggccgggcgactcggtccgcactag

SEQ ID NO: 4642 - DNA, 189 bp, synthetic construct
  source 1..189: mol_type = other DNA
  misc_feature 1..189: note = Synthetic
atggccgagctttacctgcggcaacgcaaggatgacctgtcctacaaggacatcccgcgttgtttcgtggctaatgccgagggccgcgcccaggtaggccgttactgtctgcaggacgccgtattggtgcgcgatctgttcaacaccattaattttcactacgaggccgggcgactcggtccgcactag

SEQ ID NO: 4643 - DNA, 189 bp, synthetic construct
  source 1..189: mol_type = other DNA
  misc_feature 1..189: note = Synthetic
atggccgagctttacctgcggcaacgcaaggatgacgtgtcctacaaggacatcccgcgttgtttcgtggctaatgccgagggccgcgcccaggtaggccgttactgtctgcaggacgccgtattggtgcgcgatctgttcaacaccattaattttcactacgaggccgggcgactcggtccgcactag

SEQ ID NO: 4644 - DNA, 189 bp, synthetic construct
  source 1..189: mol_type = other DNA
  misc_feature 1..189: note = Synthetic
atggccgagctttacctgcggcaacgcaaggatgagctgtcctacaaggacatcccgcgttgtttcgtggctaatgccgagggccgcgcccaggtaggccgttactgtctgcaggacgccgtattggtgcgcgatctgttcaacaccattaattttcactacgaggccgggcgactcggtccgcactag

SEQ ID NO: 4645 - DNA, 189 bp, synthetic construct
  source 1..189: mol_type = other DNA
  misc_feature 1..189: note = Synthetic
atggccgagctttacctgcggcaacgcaaggatgtcctgtcctacaaggacatcccgcgttgtttcgtggctaatgccgagggccgcgcccaggtaggccgttactgtctgcaggacgccgtattggtgcgcgatctgttcaacaccattaattttcactacgaggccgggcgactcggtccgcactag

SEQ ID NO: 4646 - DNA, 189 bp, synthetic construct
  misc_feature 1..189: note = Synthetic
  source 1..189: mol_type = other DNA
atggccgagctttacctgcggcaacgcaaggattacctgtcctacaaggacatcccgcgttgtttcgtggctaatgccgagggccgcgcccaggtaggccgttactgtctgcaggacgccgtattggtgcgcgatctgttcaacaccattaattttcactacgaggccgggcgactcggtccgcactag

SEQ ID NO: 4647 - DNA, 189 bp, synthetic construct
  source 1..189: mol_type = other DNA
  misc_feature 1..189: note = Synthetic
atggccgagctttacctgcggcaacgcaagggccacctgtcctacaaggacatcccgcgttgtttcgtggctaatgccgagggccgcgcccaggtaggccgttactgtctgcaggacgccgtattggtgcgcgatctgttcaacaccattaattttcactacgaggccgggcgactcggtccgcactag

SEQ ID NO: 4648 - DNA, 189 bp, synthetic construct
  source 1..189: mol_type = other DNA
  misc_feature 1..189: note = Synthetic
atggccgagctttacctgcggcaacgcaaggttgacctgtcctacaaggacatcccgcgttgtttcgtggctaatgccgagggccgcgcccaggtaggccgttactgtctgcaggacgccgtattggtgcgcgatctgttcaacaccattaattttcactacgaggccgggcgactcggtccgcactag

SEQ ID NO: 4649 - DNA, 189 bp, synthetic construct
  source 1..189: mol_type = other DNA
  misc_feature 1..189: note = Synthetic
atggccgagctttacctgcggcaacgccaggatgacctgtcctacaaggacatcccgcgttgtttcgtggctaatgccgagggccgcgcccaggtaggccgttactgtctgcaggacgccgtattggtgcgcgatctgttcaacaccattaattttcactacgaggccgggcgactcggtccgcactag

SEQ ID NO: 4650 - DNA, 111 bp, synthetic construct
  misc_feature 1..111: note = Synthetic
  source 1..111: mol_type = other DNA
ataagctcaacactatggccgagctttacctgcggcaatgcaaggatgacctgtcctacaaggacatcccgcgttgtttcgtggctaatgccgagggccgcgcccaggtag

SEQ ID NO: 4651 - DNA, 189 bp, synthetic construct
  misc_feature 1..189: note = Synthetic
  source 1..189: mol_type = other DNA
atggccgagctttacctgcggcaatgcaaggatgacctgtcctacaaggacatcccgcgttgtttcgtggctaatgccgagggccgcgcccaggtaggccgttactgtctgcaggacgccgtattggtgcgcgatctgttcaacaccattaattttcactacgaggccgggcgactcggtccgcactag

SEQ ID NO: 4652 - DNA, 138 bp, synthetic construct
  misc_feature 1..138: note = Synthetic
  source 1..138: mol_type = other DNA
atgacaattcacagatcagctcaaccagacaccaccagcatacacgaaaccaaccttcacagtggatacctcagcatccaaaactctccttcccgaatggatcaggatgccttctcgactcggtccgcactagcctga

SEQ ID NO: 4653 - DNA, 72 bp, synthetic construct
  misc_feature 1..72: note = Synthetic
  source 1..72: mol_type = other DNA
gtggatacctcagcatccaaaactctccttcccgaatggatcaggatgccttctcgactcggtccgcactag

SEQ ID NO: 4654 - DNA, 42 bp, synthetic construct
  misc_feature 1..42: note = Synthetic
  source 1..42: mol_type = other DNA
atgctcatgttcaaactgaaagtaatcgtttactcaacttga

SEQ ID NO: 4655 - DNA, 168 bp, synthetic construct
  source 1..168: mol_type = other DNA
  misc_feature 1..168: note = Synthetic
atgacagcaaaacaaatttttccagtttggaaagactgtacactttacgttaacaatgagacagcaactgtgcatgaaatcttgaattccgatttaagtgaactgttacagttaaagacggaatttgtatctatgacagacgactcggtccgcactagcctgaggtaa

SEQ ID NO: 4656 - DNA, 153 bp, synthetic construct
  misc_feature 1..153: note = Synthetic
  source 1..153: mol_type = other DNA
atttttccagtttggaaagactgtacactttacgttaacaatgagacagcaactgtgcatgaaatcttgaattccgatttaagtgaactgttacagttaaagacggaatttgtatctatgacagacgactcggtccgcactagcctgaggtaa

SEQ ID NO: 4657 - DNA, 183 bp, synthetic construct
  misc_feature 1..183: note = Synthetic
  source 1..183: mol_type = other DNA
aggaaatcacccgccatgaacagcaaattgtcattgcccggcaaaaacttaaagatgcagaaaagacggtggaagccgacccggatgatgttaacaagagcacactacagagtagacgggcagctgtgtcagcattggaggacaaactggcagaccgactcggtccgcactagcctgaggtaa

SEQ ID NO: 4658 - DNA, 183 bp, synthetic construct
  source 1..183: mol_type = other DNA
  misc_feature 1..183: note = Synthetic
aggaaatcacccgccgccaacagcaaattgtcattgcccggcaaaaacttaaagatgcagaaaagacggtggaagccgacccggatgatgttaacaagagcacactacagagtagacgggcagctgtgtcagcattggaggacaaactggcagaccgactcggtccgcactagcctgaggtaa

SEQ ID NO: 4659 - DNA, 51 bp, synthetic construct
  misc_feature 1..51: note = Synthetic
  source 1..51: mol_type = other DNA
ctggccgcgattctgctctttttgtatttaaagctagcgaggagaaagtaa

SEQ ID NO: 4660 - DNA, 168 bp, synthetic construct
  misc_feature 1..168: note = Synthetic
  source 1..168: mol_type = other DNA
atggaaggcgaccagctggtcctgaacagcattagcgccaaggcgctgaaggcatacctgtgccagcgcctctgcgagatcgtggacgagatggtcacgcgcaaggccgcgcccaagaagaagcagcagaccaagaagcccgactcggtccgcactagcctgaggtaa

SEQ ID NO: 4661 - DNA, 153 bp, synthetic construct
  misc_feature 1..153: note = Synthetic
  source 1..153: mol_type = other DNA
ctggtcctgaacagcattagcgccaaggcgctgaaggcatacctgtgccagcgcctctgcgagatcgtggacgagatggtcacgcgcaaggccgcgcccaagaagaagcagcagaccaagaagcccgactcggtccgcactagcctgaggtaa

SEQ ID NO: 4662 - DNA, 75 bp, synthetic construct
  source 1..75: mol_type = other DNA
  misc_feature 1..75: note = Synthetic
atgacactgcttcagaccaacctggacaacaaaccgccgaggcaaaccgactcggtccgcactagcctgaggtaa

SEQ ID NO: 4663 - DNA, 204 bp, synthetic construct
  source 1..204: mol_type = other DNA
  misc_feature 1..204: note = Synthetic
acgcagctcagcgaatcgcttggttgctacataaggatggaggaatccctgatggatgttccctctacctccggcactcaagtttattcgcgcaaagcgaggaagaggagccattctccaactaagaaactgcgctacgttaagcgtagattttctcttctgcgccatgaagacctcgactcggtccgcactagcctgaggtaa

SEQ ID NO: 4664 - DNA, 204 bp, synthetic construct
  source 1..204: mol_type = other DNA
  misc_feature 1..204: note = Synthetic
acgcagctcagcgaatcgcttggttgctacataaggatggaggaatccctgatggatgttccctctacctccggcactcaagtttattcgcgcaaagcgaggaagaggagtcattctccaactaagaaactgcgctacgttaagcgtagattttctcttctgcgccctgaagacctcgactcggtccgcactagcctgaggtaa

SEQ ID NO: 4665 - DNA, 204 bp, synthetic construct
  misc_feature 1..204: note = Synthetic
  source 1..204: mol_type = other DNA
acgcagctcagcgaatcgcttggttgctacataagggccgaggaatccctgatggatgttccctctacctccggcactcaagtttattcgcgcaaagcgaggaagaggagccattctccaactaagaaactgcgctacgttaagcgtagattttctcttctgcgccatgaagacctcgactcggtccgcactagcctgaggtaa

SEQ ID NO: 4666 - DNA, 204 bp, synthetic construct
  source 1..204: mol_type = other DNA
  misc_feature 1..204: note = Synthetic
acgcagctcagcgaatcgcttggttgctacataagggccgaggaatccctgatggatgttccctctacctccggcactcaagtttattcgcgcaaagcgaggaagaggagtcattctccaactaagaaactgcgctacgttaagcgtagattttctcttctgcgccctgaagacctcgactcggtccgcactagcctgaggtaa

SEQ ID NO: 4667 - DNA, 183 bp, synthetic construct
  misc_feature 1..183: note = Synthetic
  source 1..183: mol_type = other DNA
ctgactacgaaccacctgtggtccatggctgcccgctaccacctccacggtcccctcctgtgcctccgcctcggaaaaagcgtacggtggtcctcaccgaatcaaccctatctactgccttggccgagcttgccaccaaaagttttggcagctcctcaacttccgcgactcggtccgcactag

SEQ ID NO: 4668 - DNA, 159 bp, synthetic construct
  source 1..159: mol_type = other DNA
  misc_feature 1..159: note = Synthetic
atggctgcccgctaccacctccacggtcccctcctgtgcctccgcctcggaaaaagcgtacggtggtcctcaccgaatcaaccctatctactgccttggccgagcttgccaccaaaagttttggcagctcctcaacttccgcgactcggtccgcactag

SEQ ID NO: 4669 - DNA, 51 bp, synthetic construct
  misc_feature 1..51: note = Synthetic
  source 1..51: mol_type = other DNA
atagaacctcaacgtaacttaacagtgcaacctctattggatataaactaa

SEQ ID NO: 4670 - DNA, 57 bp, synthetic construct
  misc_feature 1..57: note = Synthetic
  source 1..57: mol_type = other DNA
atgtgggtatttattatggtacgttattatcggacgactcggtccgcactagcctga

SEQ ID NO: 4671 - DNA, 57 bp, synthetic construct
  source 1..57: mol_type = other DNA
  misc_feature 1..57: note = Synthetic
atgaaaggaaccaggttagttcagtcaagatcaacgcccgtcgggcgcctaacgtga

SEQ ID NO: 4672 - DNA, 81 bp, synthetic construct
  source 1..81: mol_type = other DNA
  misc_feature 1..81: note = Synthetic
acgtcccaccataataacttcttggatatgaaaacagtggtgtttaaaccacagtacatgacggcgactaggccacactga

SEQ ID NO: 4673 - DNA, 168 bp, synthetic construct
  misc_feature 1..168: note = Synthetic
  source 1..168: mol_type = other DNA
atgaacagcaacttattgttgccagacaaaaacttaaggatgcagagagagcagtggaagtggacccagatgacgttaataaaaacacactgcaagccaggcaacaaacagtgtcagcactggaggacaaactcgcagaccgactcggtccgcactagcctgaggtaa

SEQ ID NO: 4674 - DNA, 150 bp, synthetic construct
  source 1..150: mol_type = other DNA
  misc_feature 1..150: note = Synthetic
ttgccagacaaaaacttaaggatgcagagagagcagtggaagtggacccagatgacgttaataaaaacacactgcaagccaggcaacaaacagtgtcagcactggaggacaaactcgcagaccgactcggtccgcactagcctgaggtaa

SEQ ID NO: 4675 - DNA, 45 bp, synthetic construct
  source 1..45: mol_type = other DNA
  misc_feature 1..45: note = Synthetic
atcacgctgtacgttcacttctttactgactcagaggaagtgtga

SEQ ID NO: 4676 - DNA, 51 bp, synthetic construct
  misc_feature 1..51: note = Synthetic
  source 1..51: mol_type = other DNA
ctgctcttgactttcacaaagttgctcacgactcggtccgcactagcctga

SEQ ID NO: 4677 - DNA, 81 bp, synthetic construct
  misc_feature 1..81: note = Synthetic
  source 1..81: mol_type = other DNA
atgtgctgtcagacacaagagcactgttgtctgctcttgactttcacaaagttgctcacgactcggtccgcactagcctga

SEQ ID NO: 4678 - DNA, 63 bp, synthetic construct
  source 1..63: mol_type = other DNA
  misc_feature 1..63: note = Synthetic
atgtctatagttctcatctttcccaacggcctcgcattaaatggaggaggagacaatgactga

SEQ ID NO: 4679 - DNA, 75 bp, synthetic construct
  misc_feature 1..75: note = Synthetic
  source 1..75: mol_type = other DNA
attgtctcgtcaatgtctatagttctcatctttcccatcggcctcgcattaaatggaggaggagataatgactga

SEQ ID NO: 4680 - DNA, 30 bp, synthetic construct
  misc_feature 1..30: note = Synthetic
  source 1..30: mol_type = other DNA
atgacttcgactcggtccgcactagcctga

SEQ ID NO: 4681 - DNA, 30 bp, synthetic construct
  misc_feature 1..30: note = Synthetic
  source 1..30: mol_type = other DNA
atatttcttatgatgtccatgaacgtttga

SEQ ID NO: 4682 - DNA, 168 bp, synthetic construct
  misc_feature 1..168: note = Synthetic
  source 1..168: mol_type = other DNA
atgggcaattcaaaatctaaatccaacccatccagttcctcagagtctcaaaaaggggcaccaacagtcacagaatttaggaggactgccattcacagtctctatgggaggtacaactgcaagtgttgctggtttgctgacgactcggtccgcactagcctgaggtaa

SEQ ID NO: 4683 - DNA, 168 bp, synthetic construct
  source 1..168: mol_type = other DNA
  misc_feature 1..168: note = Synthetic
atgggacagttaatcagtttctttcaggacataccgatcttctttgaagaagcactcaatgtagccttggctgtggttacactgcttgctattataaagggcattgtgaatgtttggaaatcaggaattcttcagctgttcgactcggtccgcactagcctgaggtaa

SEQ ID NO: 4684 - DNA, 54 bp, synthetic construct
  source 1..54: mol_type = other DNA
  misc_feature 1..54: note = Synthetic
atgtttggaaatcaggaattcttcagctgttcgactcggtccgcactagcctga

SEQ ID NO: 4685 - DNA, 168 bp, synthetic construct
  misc_feature 1..168: note = Synthetic
  source 1..168: mol_type = other DNA
atggatgtcgtgcaggaggtgcgcttcaagcgggagagcctcatcgaggcgcccttcaggatggcgctcgtcggcggctccggctccggcaagaccgcatacctgctttcgctcttccgcacgctcgtgcggcgcttcaacgactcggtccgcactagcctgaggtaa

SEQ ID NO: 4686 - DNA, 210 bp, synthetic construct
  misc_feature 1..210: note = Synthetic
  source 1..210: mol_type = other DNA
atttctatatttctcggagccggtaatttagtgacagtaaatatacggccgatgtcgtgcaggaggtgcgcttcaagcgggagagcctcatcgaggcgcccttcaggatggcgctcgtcggcggctccggctccggcaagaccgcatacctgctttcgctcttccgcacgctcgtgcggcgcttcaacgactcggtccgcactagcctga

SEQ ID NO: 4687 - DNA, 168 bp, synthetic construct
  source 1..168: mol_type = other DNA
  misc_feature 1..168: note = Synthetic
atgggtaactccaagtcaaaatcaaagctgtctgctaaccagtatgaacagcaaacagtcaatagcaccaaacaggtagccattttaaagagacaggctgaacctagtctgtatggaagacacaactgcaggtgctgctgcgactcggtccgcactagcctgaggtaa

SEQ ID NO: 4688 - DNA, 36 bp, synthetic construct
  misc_feature 1..36: note = Synthetic
  source 1..36: mol_type = other DNA
atgaacagcaaacagtcaatagcaccaaacaggtag

SEQ ID NO: 4689 - DNA, 30 bp, synthetic construct
  misc_feature 1..30: note = Synthetic
  source 1..30: mol_type = other DNA
ctggagcaccagatttcatctagccggtaa

SEQ ID NO: 4690 - DNA, 156 bp, synthetic construct
  misc_feature 1..156: note = Synthetic
  source 1..156: mol_type = other DNA
aagtcaaaatcaaagctgtctgctaaccagtatgaacagcaaacagtcaatagcaccaaacaggtagccattttaaagagacaggctgaacctagtctgtatggaagacacaactgcaggtgctgctgcgactcggtccgcactagcctgaggtaa

SEQ ID NO: 4691 - DNA, 96 bp, synthetic construct
  misc_feature 1..96: note = Synthetic
  source 1..96: mol_type = other DNA
atcatcatcatcatcatcatcttcaacttcgatatttattttgctatcttgatgatgtcctgtatcagttgcattttccgactcggtccgcactag

SEQ ID NO: 4692 - DNA, 120 bp, synthetic construct
  source 1..120: mol_type = other DNA
  misc_feature 1..120: note = Synthetic
atgacatcatcatcatcatcatcatcatcatcatcatcatcatcatcatcatcatcatcatcatcatcatcatcatcatcatcatcatcttcaacttcgatatttattttgctatcttga

SEQ ID NO: 4693 - DNA, 63 bp, synthetic construct
  misc_feature 1..63: note = Synthetic
  source 1..63: mol_type = other DNA
aagggaggggctaaaactatccgcggaacaagcaacgtcatagaatcctggggtagtgactga

SEQ ID NO: 4694 - DNA, 153 bp, synthetic construct
  source 1..153: mol_type = other DNA
  misc_feature 1..153: note = Synthetic
atgtctcaaaatccaagtgatatactataccctgaatgccatttgaactctccaattgtgaaagggaagatcgctcagctacatgtcttgttggacattaatcagccatatgaaatgagggaccccgactcggtccgcactagcctgaggtaa

SEQ ID NO: 4695 - DNA, 90 bp, synthetic construct
  misc_feature 1..90: note = Synthetic
  source 1..90: mol_type = other DNA
gtgcgcgcttcagcaagccgagtcctgcgtcgagagagctcctctggtttccctttcgctttcaggtccctgttcgggcgccactgctag

SEQ ID NO: 4696 - DNA, 24 bp, synthetic construct
  misc_feature 1..24: note = Synthetic
  source 1..24: mol_type = other DNA
atgtatgcgctcgcccaatgctga

SEQ ID NO: 4697 - DNA, 30 bp, synthetic construct
  source 1..30: mol_type = other DNA
  misc_feature 1..30: note = Synthetic
ataacgtcgactcggtccgcactagcctga

SEQ ID NO: 4698 - DNA, 213 bp, synthetic construct
  misc_feature 1..213: note = Synthetic
  source 1..213: mol_type = other DNA
atcgcaacaattaggtacaaaactttgcaccggcgtaagcagaccgaaagtaaaacatatagcacggggcgaaacataggaattctcctactagcttcctcaatgtgcgcgattcccaccgctctctttgtgcagattaacggagcaaaaaaaacgacgggaaaatgcgtcgtttatctatcctctccgaaagctcgactcggtccgcactag

SEQ ID NO: 4699 - DNA, 27 bp, synthetic construct
  source 1..27: mol_type = other DNA
  misc_feature 1..27: note = Synthetic
atggtgacgatgcaacggctggtctga

SEQ ID NO: 4700 - DNA, 42 bp, synthetic construct
  source 1..42: mol_type = other DNA
  misc_feature 1..42: note = Synthetic
atgcaaatcctaacacacgcctgtggaacacgcagaccgtaa

SEQ ID NO: 4701 - DNA, 36 bp, synthetic construct
  source 1..36: mol_type = other DNA
  misc_feature 1..36: note = Synthetic
atggccaattacttccctagtaccatgtatacctaa

SEQ ID NO: 4702 - DNA, 33 bp, synthetic construct
  misc_feature 1..33: note = Synthetic
  source 1..33: mol_type = other DNA
atgatacctgcatatgtatgtaccataggttaa

SEQ ID NO: 4703 - DNA, 57 bp, synthetic construct
  source 1..57: mol_type = other DNA
  misc_feature 1..57: note = Synthetic
atgtgtattttgatggtgtcgagcatgtttattttgttcttattttcacacagataa

SEQ ID NO: 4704 - DNA, 63 bp, synthetic construct
  misc_feature 1..63: note = Synthetic
  source 1..63: mol_type = other DNA
atgggtcatttgacaatgttatacaggcttatgaacaaattattagtcagtctcttcatttga

SEQ ID NO: 4705 - DNA, 195 bp, synthetic construct
  source 1..195: mol_type = other DNA
  misc_feature 1..195: note = Synthetic
atgtgtttatttttagcaatggtcgccagaattcaaggatctcaaaagggcctgccagatggccgggtttactctgaagggggggacttcgggggatcttgtattctcatcgcatgcgaacttgctcttttcaacctcgatgggatatttcctccatgcaggcagtccaaggtcgacagcggggacggggggtga

SEQ ID NO: 4706 - DNA, 192 bp, synthetic construct
  misc_feature 1..192: note = Synthetic
  source 1..192: mol_type = other DNA
aaggatctcaaaagggcctgccagatggccgggtttactctgaagggggggacttcgggggatcttgtattctcatcgcatgcgaacttgctcttttcaacctcgatgggatatttcctccatgcaggcagtccaaggtcgacagcggggacggggggtgagcccgactcggtccgcactagcctgaggtaa

SEQ ID NO: 4707 - DNA, 195 bp, synthetic construct
  source 1..195: mol_type = other DNA
  misc_feature 1..195: note = Synthetic
atgtgtttatttttagcaatggtcgccagaattcaaggatctcaaaagggcctgccaggccgccgggtttactctgaagggggggacttcgggggatcttgtattctcatcgcatgcgaacttgctcttttcaacctcgatgggatatttcctccatgcaggcagtccaaggtcgacagcggggacggggggtga

SEQ ID NO: 4708 - DNA, 24 bp, synthetic construct
  source 1..24: mol_type = other DNA
  misc_feature 1..24: note = Synthetic
atgttgatcacagccaatccatga

SEQ ID NO: 4709 - DNA, 21 bp, synthetic construct
  misc_feature 1..21: note = Synthetic
  source 1..21: mol_type = other DNA
atgacaaatctgaatgtatga

SEQ ID NO: 4710 - DNA, 48 bp, synthetic construct
  misc_feature 1..48: note = Synthetic
  source 1..48: mol_type = other DNA
acgatgtcattggccgctgcgaagggagaagaggggacacgcgagtaa

SEQ ID NO: 4711 - DNA, 87 bp, synthetic construct
  source 1..87: mol_type = other DNA
  misc_feature 1..87: note = Synthetic
atacctctagtgatgatcagatttctctctttgatcaatctctcacagagcttttgcaaagagacccagaagaatttaggactctaa

SEQ ID NO: 4712 - DNA, 195 bp, synthetic construct
  source 1..195: mol_type = other DNA
  misc_feature 1..195: note = Synthetic
ctggctggcatctctccgatgttccaaccttgcgtagttcctcctaagccgtggactggcattactggtggtggctattgggctaacggtcgtcgtcctctggcgctggtgcgtactcacagtaagaaagcactgatgcgctacgaagacgtttacatgcctgaggtgtacaaagcgcgactcggtccgcactag

SEQ ID NO: 4713 - DNA, 195 bp, synthetic construct
  source 1..195: mol_type = other DNA
  misc_feature 1..195: note = Synthetic
ctggctggcatctctccgatgttccaaccttgcgtagttcctcctaagccgtggactggcattactggtggtggctattgggctaacggtcgtcgtcctctggcgctggtgcgtactcacagtaagaaagcactggcccgctacgaagacgtttacatgcctgaggtgtacaaagcgcgactcggtccgcactag

SEQ ID NO: 4714 - DNA, 138 bp, synthetic construct
  source 1..138: mol_type = other DNA
  misc_feature 1..138: note = Synthetic
atgcggcacccccggtatcaaacctcagcgaggcgctatcgggaatcgtggttaagacaaaatgtccagtaccggaagttatactttggtttaaagacaaacaaatggcgtactggacaaatccatacgtcaccttaa

SEQ ID NO: 4715 - DNA, 36 bp, synthetic construct
  misc_feature 1..36: note = Synthetic
  source 1..36: mol_type = other DNA
atgctttgcttgcagatgacctccctccaaccataa

SEQ ID NO: 4716 - DNA, 87 bp, synthetic construct
  misc_feature 1..87: note = Synthetic
  source 1..87: mol_type = other DNA
atggaactccttatgtacatgcagatgttgaagggcagccatgtgatgaaattgaacaattcctggatcgatgctacagtgtactaa

SEQ ID NO: 4717 - DNA, 69 bp, synthetic construct
  source 1..69: mol_type = other DNA
  misc_feature 1..69: note = Synthetic
atgcagatgttgaagggcagccatgtgatgaaattgaacaattcctggatcgatgctacagtgtactaa

SEQ ID NO: 4718 - DNA, 168 bp, synthetic construct
  misc_feature 1..168: note = Synthetic
  source 1..168: mol_type = other DNA
atgaaacaccgagtgtattctgaagaattgggtattaatactgatttaaactcgataatcagtcaacaatctacaatggatatggatatggaaatagacgaagatgaaatcatggaacttcttaatatattaactgagttcgactcggtccgcactagcctgaggtaa

SEQ ID NO: 4719 - DNA, 171 bp, synthetic construct
  misc_feature 1..171: note = Synthetic
  source 1..171: mol_type = other DNA
acggccaaacaccgagtgtattctgaagaattgggtattaatactgatttaaactcgataatcagtcaacaatctacaatggatatggatatggaaatagacgaagatgaaatcatggaacttcttaatatattaactgagttcgactcggtccgcactagcctgaggtaa

SEQ ID NO: 4720 - DNA, 21 bp, synthetic construct
  source 1..21: mol_type = other DNA
  misc_feature 1..21: note = Synthetic
acggcccccggcgtgagatag

SEQ ID NO: 4721 - DNA, 30 bp, synthetic construct
  source 1..30: mol_type = other DNA
  misc_feature 1..30: note = Synthetic
ctgcttggggaggcagagactgagttttaa

SEQ ID NO: 4722 - DNA, 30 bp, synthetic construct
  misc_feature 1..30: note = Synthetic
  source 1..30: mol_type = other DNA
ttgaaaacgggacgttatccaagaacataa

SEQ ID NO: 4723 - DNA, 117 bp, synthetic construct
  source 1..117: mol_type = other DNA
  misc_feature 1..117: note = Synthetic
atagtacctgcaatatctgaaaaaatgagacgagaacgagccgcatacgtaaactacaaacgtctaaacaagaatttcatttgtgtcgacgactcggtccgcactagcctgaggtaa

SEQ ID NO: 4724 - DNA, 120 bp, synthetic construct
  misc_feature 1..120: note = Synthetic
  source 1..120: mol_type = other DNA
attatagtacctgcaatatctgaaaaaatgagacgagaacgagccgcatacgtaaactacaaacgtttaaacaaaaatttcatttgtgtcgacgactcggtccgcactagcctgaggtaa

SEQ ID NO: 4725 - DNA, 117 bp, synthetic construct
  source 1..117: mol_type = other DNA
  misc_feature 1..117: note = Synthetic
atagtacctgcaatatctgaaaaaatgagacgcgaacgagccgcatacgtaaactacaaacgtctaaacaagaatttcatttgtgtcgacgactcggtccgcactagcctgaggtaa

SEQ ID NO: 4726 - DNA, 117 bp, synthetic construct
  misc_feature 1..117: note = Synthetic
  source 1..117: mol_type = other DNA
atagtacctgcaatatctgaaaaaatgagacgagaacgagccgcatacgtaaactacaaacgtttaaacaaaaatttcatttgtgtcgacgactcggtccgcactagcctgaggtaa

SEQ ID NO: 4727 - DNA, 120 bp, synthetic construct
  source 1..120: mol_type = other DNA
  misc_feature 1..120: note = Synthetic
atgagcctgaagagaaccctggcaagcgcccaacccggagcgcgcccctttaccgtcaccgaaaccaacctaacgcgaaccctgcgaccctggaaagcgactcggtccgcactagcctga

SEQ ID NO: 4728 - DNA, 63 bp, synthetic construct
  misc_feature 1..63: note = Synthetic
  source 1..63: mol_type = other DNA
atgagctgcgtgtccattatgtctatactgcgagcgtgctctggcctcaacatttgtgggtga

SEQ ID NO: 4729 - DNA, 222 bp, synthetic construct
  misc_feature 1..222: note = Synthetic
  source 1..222: mol_type = other DNA
acgagtgcgggcaaccgtaaacacagtttgaacgttttttggagagagactactatgtcaaacaaaaaaccaggaagacccggggcaacccgggttgtcaatatgctaaagcgcggcgcatcccgcggaaatccgatatctcggatcaagaggatgttggatgggctattcaagggaataggacccatcaggatcgactcggtccgcactagcctgaggtaa

SEQ ID NO: 4730 - DNA, 222 bp, synthetic construct
  source 1..222: mol_type = other DNA
  misc_feature 1..222: note = Synthetic
acgagtgcgggcaaccgtaaacacagtttgaacgttttttggagagagactactgcctcaaacaaaaaaccaggaagacccggggcaacccgggttgtcaatatgctaaagcgcggcgcatcccgcggaaatccgatatctcggatcaagaggatgttggatgggctattcaagggaataggacccatcaggatcgactcggtccgcactagcctgaggtaa

SEQ ID NO: 4731 - DNA, 75 bp, synthetic construct
  misc_feature 1..75: note = Synthetic
  source 1..75: mol_type = other DNA
atgtgcaacttacagtacaagcaaacaacccgctttaatttcgctcgcccaggtgagcggagtatttgtaactag

SEQ ID NO: 4732 - DNA, 210 bp, synthetic construct
  source 1..210: mol_type = other DNA
  misc_feature 1..210: note = Synthetic
acggggataccgacagcctttttgtcacggaagcgggacacagactcatggagacgcaagggagacgacgcccgcttcagcaccagcaggatgagcctgaagcgcaccctcgcaagcgcccagcccggggctcatcccttcaccgtcaccgagaccaccctcacccgaacgctgagaccctggaaggcgactcggtccgcactagcctga

SEQ ID NO: 4733 - DNA, 189 bp, synthetic construct
  source 1..189: mol_type = other DNA
  misc_feature 1..189: note = Synthetic
acggaagcgggacacagactcatggagacgcaagggagacgacgcccgcttcagcaccagcaggatgagcctgaagcgcaccctcgcaagcgcccagcccggggctcatcccttcaccgtcaccgagaccaccctcacccgaacgctgagaccctggaaggcgactcggtccgcactagcctgaggtaa

SEQ ID NO: 4734 - DNA, 189 bp, synthetic construct
  misc_feature 1..189: note = Synthetic
  source 1..189: mol_type = other DNA
acggaagcgggacacagactcgccgagacgcaagggagacgacgcccgcttcagcaccagcaggatgagcctgaagcgcaccctcgcaagcgcccagcccggggctcatcccttcaccgtcaccgagaccaccctcacccgaacgctgagaccctggaaggcgactcggtccgcactagcctgaggtaa

SEQ ID NO: 4735 - DNA, 177 bp, synthetic construct
  misc_feature 1..177: note = Synthetic
  source 1..177: mol_type = other DNA
gtggacaccggctcatggaaaccagagggcgaagaccggcagcgcttcagcaccagcaggaccagcctcaagcgcaccctggccagcgcgcagcccggagcgcaccccttcaccgtgacccagactacgctgacgaggaccctgcgcccgtggacgactcggtccgcactagcctga

SEQ ID NO: 4736 - DNA, 177 bp, synthetic construct
  source 1..177: mol_type = other DNA
  misc_feature 1..177: note = Synthetic
gtggacaccggctcgccgaaaccagagggcgaagaccggcagcgcttcagcaccagcaggaccagcctcaagcgcaccctggccagcgcgcagcccggagcgcaccccttcaccgtgacccagactacgctgacgaggaccctgcgcccgtggacgactcggtccgcactagcctga

SEQ ID NO: 4737 - DNA, 168 bp, synthetic construct
  misc_feature 1..168: note = Synthetic
  source 1..168: mol_type = other DNA
atggcggcgcccatatgcgataactctcacgtgttcctcctcaagcgcctgggcgtgccgtcttcctgccggcgctcggaggacccgcgcttcgtggagatcctgactcccttcgagctctcgaactacatcgagcggcacgactcggtccgcactagcctgaggtaa

SEQ ID NO: 4738 - DNA, 156 bp, synthetic construct
  misc_feature 1..156: note = Synthetic
  source 1..156: mol_type = other DNA
atatgcgataactctcacgtgttcctcctcaagcgcctgggcgtgccgtcttcctgccggcgctcggaggacccgcgcttcgtggagatcctgactcccttcgagctctcgaactacatcgagcggcacgactcggtccgcactagcctgaggtaa

SEQ ID NO: 4739 - DNA, 219 bp, synthetic construct
  misc_feature 1..219: note = Synthetic
  source 1..219: mol_type = other DNA
atggttagacaagtagctgaaagggaaggtacccgtgtacattttggccatacttatagtatagatgatgctgacagtatagaagaagttacacaaagaatggacttaagaaatcaacaaagtgtacattcaggagagtttatagaaaaaactattgccccaggaggtgctaatcaaagaactgctcctcaatggacgactcggtccgcactagcctga

SEQ ID NO: 4740 - DNA, 63 bp, synthetic construct
  misc_feature 1..63: note = Synthetic
  source 1..63: mol_type = other DNA
atgaatagtattgtgttaaaaatgaaaatggatttttattttatgctgttatcatggatatga

SEQ ID NO: 4741 - DNA, 63 bp, synthetic construct
  source 1..63: mol_type = other DNA
  misc_feature 1..63: note = Synthetic
atgaatagtattgtgttaaaaatgaaaatggatttttattttatgctgttatcgccgatatga

SEQ ID NO: 4742 - DNA, 168 bp, synthetic construct
  source 1..168: mol_type = other DNA
  misc_feature 1..168: note = Synthetic
atgtgtccaccagttcgccagcaccccgcccaggcaccaccagccaagcgtcaggccctggaaacagttccacatccacaaaaccgggggaggttaatgtcaccaaaggcacgcccccccaaaatgcaacgtcgccccagcgactcggtccgcactagcctgaggtaa

SEQ ID NO: 4743 - DNA, 168 bp, synthetic construct
  source 1..168: mol_type = other DNA
  misc_feature 1..168: note = Synthetic
atgtgtccaccagttcgccagcgccccgcccaggcaccaccagccaagcgtcaggccctggaaacagttccacatccacaaaaccgggggaggttaatgtcaccaaaggcacgccccccaaaaatgcaacgtcgccccagcgactcggtccgcactagcctgaggtaa

SEQ ID NO: 4744 - DNA, 111 bp, synthetic construct
  source 1..111: mol_type = other DNA
  misc_feature 1..111: note = Synthetic
ctggaaacagttccacatccacaaaaccgggggaggttaatgtcaccaaaggcacgcccccccaaaatgcaacgtcgccccagcgactcggtccgcactagcctgaggtaa

SEQ ID NO: 4745 - DNA, 111 bp, synthetic construct
  source 1..111: mol_type = other DNA
  misc_feature 1..111: note = Synthetic
ctggaaacagttccacatccacaaaaccgggggaggttaatgtcaccaaaggcacgccccccaaaaatgcaacgtcgccccagcgactcggtccgcactagcctgaggtaa

SEQ ID NO: 4746 - DNA, 24 bp, synthetic construct
  source 1..24: mol_type = other DNA
  misc_feature 1..24: note = Synthetic
atggcgatcggcgccgctgattga

SEQ ID NO: 4747 - DNA, 66 bp, synthetic construct
  misc_feature 1..66: note = Synthetic
  source 1..66: mol_type = other DNA
acggagaggaggaaaacgacgtgcaggatgacgtggattctccggtgccgacgcgaccgctggtga

SEQ ID NO: 4748 - DNA, 57 bp, synthetic construct
  source 1..57: mol_type = other DNA
  misc_feature 1..57: note = Synthetic
atgcctgaacaactaccttacggcgggaccattcgtggccttgaccgagaatggtag

SEQ ID NO: 4749 - DNA, 15 bp, synthetic construct
  source 1..15: mol_type = other DNA
  misc_feature 1..15: note = Synthetic
attctggttcgctag

SEQ ID NO: 4750 - DNA, 39 bp, synthetic construct
  misc_feature 1..39: note = Synthetic
  source 1..39: mol_type = other DNA
ataatggcatctatgattttactgcaatatgtatgctaa

SEQ ID NO: 4751 - DNA, 225 bp, synthetic construct
  source 1..225: mol_type = other DNA
  misc_feature 1..225: note = Synthetic
atacatcgccgcgcgctgcatactaaggggaatacaagaaaaccaacgctcggtgccatggccttgagcgtcaacgactgcgcacgcctcaccggccagagcgtcccgaccatggagcactttttgccgctgcgcaacatctggaaccgcgtccgcgactttccgcgcgcctccaccaccgccgccggcatcacctgcgactcggtccgcactagcctgaggtaa

SEQ ID NO: 4752 - DNA, 210 bp, synthetic construct
  misc_feature 1..210: note = Synthetic
  source 1..210: mol_type = other DNA
ctgcatactaaggggaatacaagaaaaccaacgctcggtgccgccgccttgagcgtcaacgactgcgcacgcctcaccggccagagcgtcccgaccatggagcactttttgccgctgcgcaacatctggaaccgcgtccgcgactttccgcgcgcctccaccaccgccgccggcatcacctgcgactcggtccgcactagcctgaggtaa

SEQ ID NO: 4753 - DNA, 81 bp, synthetic construct
  misc_feature 1..81: note = Synthetic
  source 1..81: mol_type = other DNA
acggcgtccatgcaccgagggcagaactggtgctatcatgacaccgacgacgacgaccgcggaactcacgacggagtttga

SEQ ID NO: 4754 - DNA, 135 bp, synthetic construct
  misc_feature 1..135: note = Synthetic
  source 1..135: mol_type = other DNA
atgacaccgacgacgacgaccgcggaactcacgacggagtttgactacgatgaagacgcgactccttgtgttttcaccgacgtgcttaatcagtcaaagccagttacgttgtcgactcggtccgcactagcctga

SEQ ID NO: 4755 - DNA, 75 bp, synthetic construct
  source 1..75: mol_type = other DNA
  misc_feature 1..75: note = Synthetic
acgcgactccttgtgttttcaccgacgtgcttaatcagtcaaagccagttacgttgtcgactcggtccgcactag

SEQ ID NO: 4756 - DNA, 93 bp, synthetic construct
  source 1..93: mol_type = other DNA
  misc_feature 1..93: note = Synthetic
acggtgccttcgccctcgctgtcggagacaatctccggggatggcggcggcgcgggtgtcgccttgcgagccttcttcttgggagggagctga

SEQ ID NO: 4757 - DNA, 168 bp, synthetic construct
  source 1..168: mol_type = other DNA
  misc_feature 1..168: note = Synthetic
atggaaatagtaaatccgggtccagagagtccgtctgccgagctcatggcctcgatcgacatgcgcgaggtactggcgcgctacgttgaggacacggacaccgcggagcaactactgcgctgggccaccgacaaggcagccgactcggtccgcactagcctgaggtaa

SEQ ID NO: 4758 - DNA, 171 bp, synthetic construct
  source 1..171: mol_type = other DNA
  misc_feature 1..171: note = Synthetic
atagccgaaatagtaaatccgggtccagagagtccgtctgccgagctcatggcctcgatcgacatgcgcgaggtactggcgcgctacgttgaggacacggacaccgcggagcaactactgcgctgggccaccgacaaggcagccgactcggtccgcactagcctgaggtaa

SEQ ID NO: 4759 - DNA, 123 bp, synthetic construct
  source 1..123: mol_type = other DNA
  misc_feature 1..123: note = Synthetic
atgtggcatttattgctaaacatggggcccaactcaatttcgataccgttagagtcttcttcctcaatcagaagaaggccaagatggtactcagtaagacggcaccgactcggtccgcactag

SEQ ID NO: 4760 - DNA, 90 bp, synthetic construct
  misc_feature 1..90: note = Synthetic
  source 1..90: mol_type = other DNA
gtggaccagacggcgtacatgcaccgagggcagaactggtgctatcatgacaccgacgacgacgaccgcggaactcacgacggagtttga

SEQ ID NO: 4761 - DNA, 81 bp, synthetic construct
  source 1..81: mol_type = other DNA
  misc_feature 1..81: note = Synthetic
atgaagacgcgactccttgtgttttcaccgacgtgcttaatcagtcaaagccagttacgttgtcgactcggtccgcactag

SEQ ID NO: 4762 - DNA, 105 bp, synthetic construct
  source 1..105: mol_type = other DNA
  misc_feature 1..105: note = Synthetic
atcactgtgctgctctttttcgacgcggcgaaccccagggaagccatcacccccacactgtccgtcagctcgccacggtacttcacgttaatccctttcagatga

SEQ ID NO: 4763 - DNA, 117 bp, synthetic construct
  source 1..117: mol_type = other DNA
  misc_feature 1..117: note = Synthetic
atgactcacaccggtatccccgcccgacaacgacggcaatgtacccggtttcacttgaaaatagcccaccgtaaacgtaccatgtccaccgactcggtccgcactagcctgaggtaa

SEQ ID NO: 4764 - DNA, 36 bp, synthetic construct
  source 1..36: mol_type = other DNA
  misc_feature 1..36: note = Synthetic
atgtacccggtttcacttgaaaatagcccaccgtaa

SEQ ID NO: 4765 - DNA, 69 bp, synthetic construct
  source 1..69: mol_type = other DNA
  misc_feature 1..69: note = Synthetic
gtgctgctctttttcgacgcggcgaaccccagggaagccatcacccccacactgtccgtcagctcataa

SEQ ID NO: 4766 - DNA, 144 bp, synthetic construct
  source 1..144: mol_type = other DNA
  misc_feature 1..144: note = Synthetic
acggtacttcacgttaatccctttcagatgactcacaccggtatccccgcccgacaacgacggcaatgtacccggtttcacttgaaaatagcccaccgtaaacgtaccatgtccaccgactcggtccgcactagcctgaggtaa

SEQ ID NO: 4767 - DNA, 168 bp, synthetic construct
  misc_feature 1..168: note = Synthetic
  source 1..168: mol_type = other DNA
atgatcctgtggtccccgtccacctgttccttcttctggcactggtgtctgatcgcagtaagtgtactctcgagccgctccaaggagtcgctccggttgtcgtggtccagcgacgagtcgtctgcgtcctcgtcgtctcgcgactcggtccgcactagcctgaggtaa

SEQ ID NO: 4768 - DNA, 171 bp, synthetic construct
  source 1..171: mol_type = other DNA
  misc_feature 1..171: note = Synthetic
atgcggccggtggtcctgcggggggtgacggtcaggcagctcctgtatttaactttgcggacagaggccagagccgtttgctccatctgtcagcaacgccaagctccagaggacgcccgcgacgagcctcacctgttctcctcctgttcgactcggtccgcactagcctga

SEQ ID NO: 4769 - DNA, 18 bp, synthetic construct
  misc_feature 1..18: note = Synthetic
  source 1..18: mol_type = other DNA
acgacgattactacgtaa

SEQ ID NO: 4770 - DNA, 138 bp, synthetic construct
  misc_feature 1..138: note = Synthetic
  source 1..138: mol_type = other DNA
aagataatagcctactgcctattaagggacgagtcattcgcggaactacatagtaaattctgtttaaacgaggactataaaagtgtatttatgaaaaatatatcattcgataagatagattccatcatcgtgacataa

SEQ ID NO: 4771 - DNA, 171 bp, synthetic construct
  source 1..171: mol_type = other DNA
  misc_feature 1..171: note = Synthetic
acggccgacaccatcatccacaacaccacgaaccgcagtaccgatactccgcatgtcaacatcacctgtaacataacggagccgctatccgccatccgtaccacagaagccgtgatcaacacgttcatcattttcgtaggcggcgactcggtccgcactagcctgaggtaa

SEQ ID NO: 4772 - DNA, 198 bp, synthetic construct
  source 1..198: mol_type = other DNA
  misc_feature 1..198: note = Synthetic
atggcaaaccaatttattttccaaggccttcctcaacggaatctcgctacgtttaacccggaggtcgggtatgtggcatttattgctaaacatggggcccaactcaatttcgataccgttagagtcttcttcctcaatcagaagaaggccaagatggtactcagtaagacggcaccgactcggtccgcactagcctga

SEQ ID NO: 4773 - DNA, 204 bp, synthetic construct
  misc_feature 1..204: note = Synthetic
  source 1..204: mol_type = other DNA
atggcaaaccaattcatttttgaggatgtacctcaacggaacttatctacatttagtccggaggcagggtatgtggcatttattggtcggtatgggcaacaacttaacttcagtgttgttagagtcttcttcctcaaccagaagaaggccaaaatggtcttacataagacggcacacgactcggtccgcactagcctgaggtaa

SEQ ID NO: 4774 - DNA, 174 bp, synthetic construct
  misc_feature 1..174: note = Synthetic
  source 1..174: mol_type = other DNA
atgtacctcaacggaacttatctacatttagtccggaggcagggtatgtggcatttattggtcggtatgggcaacaacttaacttcagtgttgttagagtcttcttcctcaaccagaagaaggccaaaatggtcttacataagacggcacacgactcggtccgcactagcctga

SEQ ID NO: 4775 - DNA, 177 bp, synthetic construct
  source 1..177: mol_type = other DNA
  misc_feature 1..177: note = Synthetic
agggcctacctcaacggaacttatctacatttagtccggaggcagggtatgtggcatttattggtcggtatgggcaacaacttaacttcagtgttgttagagtcttcttcctcaaccagaagaaggccaaaatggtcttacataagacggcacacgactcggtccgcactagcctga

SEQ ID NO: 4776 - DNA, 168 bp, synthetic construct
  source 1..168: mol_type = other DNA
  misc_feature 1..168: note = Synthetic
atggacaccatcatccacaacaccacgaaccgcagtaccgatactccgcatgtcaacatcacctgtaacataacggagccgctatccgccatccgtaccacagaagccgtgatcaacacgttcatcattttcgtaggcggcgactcggtccgcactagcctgaggtaa

SEQ ID NO: 4777 - DNA, 72 bp, synthetic construct
  source 1..72: mol_type = other DNA
  misc_feature 1..72: note = Synthetic
atgcaccgagggcagaactggtgctatcatgacaccgacgacgacgaccgcggaactcacgacggagtttga

SEQ ID NO: 4778 - DNA, 90 bp, synthetic construct
  source 1..90: mol_type = other DNA
  misc_feature 1..90: note = Synthetic
ttgttaatggacgacggtacggtgcgcgagcacgcgtttcgcaacggaccgttgtcgcaactcgactcggtccgcactagcctgaggtaa

SEQ ID NO: 4779 - DNA, 84 bp, synthetic construct
  misc_feature 1..84: note = Synthetic
  source 1..84: mol_type = other DNA
atggcaggaagaagcggagacagcgacgaagagctcatcagaacagtcagactcatcaagcttctctatcaaagcagtaagtag

SEQ ID NO: 4780 - DNA, 126 bp, synthetic construct
  source 1..126: mol_type = other DNA
  misc_feature 1..126: note = Synthetic
atgcaacctataccaatagtagcaatagtagcattagtagtagcaataataatagcaatagttgtgtggtccatagtaatcatagaatataggaaaatattaacgactcggtccgcactagcctga

SEQ ID NO: 4781 - DNA, 168 bp, synthetic construct
  source 1..168: mol_type = other DNA
  misc_feature 1..168: note = Synthetic
atggccactccctcgatgatgccgcagtggtcttacatgcacatcgccggtcaggatgcctcggagtacctgagtcccggtctggtgcaattcgcccgcgccacggacacctacttcaccctgggaaacaagtttagaaacgactcggtccgcactagcctgaggtaa

SEQ ID NO: 4782 - DNA, 72 bp, synthetic construct
  source 1..72: mol_type = other DNA
  misc_feature 1..72: note = Synthetic
atggctgttgctcttctcccaaccattgtgaactcttcatatccctcatgcactcttatcttcaatgtttga

SEQ ID NO: 4783 - DNA, 48 bp, synthetic construct
  misc_feature 1..48: note = Synthetic
  source 1..48: mol_type = other DNA
ctgaatccaccaaaactgaacgactcggtccgcactagcctgaggtaa

SEQ ID NO: 4784 - DNA, 12 bp, synthetic construct
  misc_feature 1..12: note = Synthetic
  source 1..12: mol_type = other DNA
ctggacccctag

SEQ ID NO: 4785 - DNA, 75 bp, synthetic construct
  source 1..75: mol_type = other DNA
  misc_feature 1..75: note = Synthetic
atcactgtgctgctctttttcgacgcggcgaaccccagggaagccatcacccccacactgtccgtcagctcataa

SEQ ID NO: 4786 - DNA, 81 bp, synthetic construct
  source 1..81: mol_type = other DNA
  misc_feature 1..81: note = Synthetic
acggcttccatgcaccgagggcagaactggtgctatcatgacaccgacgacgacgaccgcggaactcacgacggagtttga

SEQ ID NO: 4787 - DNA, 81 bp, synthetic construct
  misc_feature 1..81: note = Synthetic
  source 1..81: mol_type = other DNA
agggcgtccatgcaccgagggcagaactggtgctatcatgacaccgacgacgacgaccgcggaactcacgacggagtttga

SEQ ID NO: 4788 - DNA, 141 bp, synthetic construct
  source 1..141: mol_type = other DNA
  misc_feature 1..141: note = Synthetic
atgagccggcccgaaggaaggaaaaaccgcggggggagagaagaggttctcgagcagtgggtgagcggaagaaagaagttagaggaactcgagagagacctccggaaggttaagaagacgactcggtccgcactagcctga

SEQ ID NO: 4789 - DNA, 168 bp, synthetic construct
  misc_feature 1..168: note = Synthetic
  source 1..168: mol_type = other DNA
atggaaacgaaggccggtcctgactccgtttttctgtgctcgcgcctgaacctgggcgcgcactaccgcaaccagctgctgtcgctcgtggatcgcgcgcacctgcacgagccggcgccgtcaatactctgtagcatctgcgactcggtccgcactagcctgaggtaa

SEQ ID NO: 4790 - DNA, 162 bp, synthetic construct
  misc_feature 1..162: note = Synthetic
  source 1..162: mol_type = other DNA
acgaaggccggtcctgactccgtttttctgtgctcgcgcctgaacctgggcgcgcactaccgcaaccagctgctgtcgctcgtggatcgcgcgcacctgcacgagccggcgccgtcaatactctgtagcatctgcgactcggtccgcactagcctgaggtaa

SEQ ID NO: 4791 - DNA, 51 bp, synthetic construct
  misc_feature 1..51: note = Synthetic
  source 1..51: mol_type = other DNA
atgcctcatctgtattcaatgagtatcaggcgcttcaagaacaacttgtaa

SEQ ID NO: 4792 - DNA, 60 bp, synthetic construct
  misc_feature 1..60: note = Synthetic
  source 1..60: mol_type = other DNA
atgccgggggggcatctggctccgaggacccaccagattatggagatcaaggtaatgtga

SEQ ID NO: 4793 - DNA, 123 bp, synthetic construct
  source 1..123: mol_type = other DNA
  misc_feature 1..123: note = Synthetic
gtgtccatcatctcttcggacagcagcagcgtagtcggcgggcctttcgaaagttcgtcgtcgactctttcggaagaagtgcgcctgctgcgctccggctgctattgctgcgtgctcatgtaa

SEQ ID NO: 4794 - DNA, 174 bp, synthetic construct
  source 1..174: mol_type = other DNA
  misc_feature 1..174: note = Synthetic
attcagttttacgaagaccaatctcgaccaccgaaagcccccctcacggcctgcgtcatcacccagagcaagatcctggcccaattgcaatccatcaaccaagcgcgccgcgatttccttttgaaaaagggtcggggggtgtacctggacccgactcggtccgcactagcctga

SEQ ID NO: 4795 - DNA, 168 bp, synthetic construct
  source 1..168: mol_type = other DNA
  misc_feature 1..168: note = Synthetic
atggacgcatggttgcaacagacggtctttaggggcaccctatccatcagtcagggggtggacgaccgggatctgttactggcacctaagtggatttcctttctgagcctctcatcatttctgaaacagaaactgctctccgactcggtccgcactagcctgaggtaa

SEQ ID NO: 4796 - DNA, 156 bp, synthetic construct
  source 1..156: mol_type = other DNA
  misc_feature 1..156: note = Synthetic
ttgcaacagacggtctttaggggcaccctatccatcagtcagggggtggacgaccgggatctgttactggcacctaagtggatttcctttctgagcctctcatcatttctgaaacagaaactgctctccgactcggtccgcactagcctgaggtaa

SEQ ID NO: 4797 - DNA, 168 bp, synthetic construct
  misc_feature 1..168: note = Synthetic
  source 1..168: mol_type = other DNA
atgggtgtcaaaggtttatctttaattatgattgggttattaatctcaccaattaccaatctggatataactcatttaatgaatctaggaacggtaccgactgcaattagatctctagtttactacacttataccaaacccgactcggtccgcactagcctgaggtaa

SEQ ID NO: 4798 - DNA, 141 bp, synthetic construct
  misc_feature 1..141: note = Synthetic
  source 1..141: mol_type = other DNA
atgattgggttattaatctcaccaattaccaatctggatataactcatttaatgaatctaggaacggtaccgactgcaattagatctctagtttactacacttataccaaacccgactcggtccgcactagcctgaggtaa

SEQ ID NO: 4799 - DNA, 12 bp, synthetic construct
  misc_feature 1..12: note = Synthetic
  source 1..12: mol_type = other DNA
atggaggcttaa

SEQ ID NO: 4800 - DNA, 24 bp, synthetic construct
  source 1..24: mol_type = other DNA
  misc_feature 1..24: note = Synthetic
atggtgatcagccgccattcctag

SEQ ID NO: 4801 - DNA, 168 bp, synthetic construct
  source 1..168: mol_type = other DNA
  misc_feature 1..168: note = Synthetic
atggctcatcttcccggcggtgcggccgccgcccccctttcggaggacgcgatcccgtcgccgcgcgagcggacggaagactggccgccctgccagatagtgctgcagggcgccgagctgaacgggatcctgcaggccttcgactcggtccgcactagcctgaggtaa

SEQ ID NO: 4802 - DNA, 72 bp, synthetic construct
  misc_feature 1..72: note = Synthetic
  source 1..72: mol_type = other DNA
atagtgctgcagggcgccgagctgaacgggatcctgcaggccttcgactcggtccgcactagcctgaggtaa

SEQ ID NO: 4803 - DNA, 165 bp, synthetic construct
  misc_feature 1..165: note = Synthetic
  source 1..165: mol_type = other DNA
ctgtgccgcgtacttggcacagagctcggaaaagcgcgggaagcgggccccggaaccgtctgccatttaaggacgcggaaaaccgcgaacggatttggacacgtgtccgcgcggaagctgtttctggcgagatccctacgcccgactcggtccgcactagcctga

SEQ ID NO: 4804 - DNA, 216 bp, synthetic construct
  misc_feature 1..216: note = Synthetic
  source 1..216: mol_type = other DNA
ataaccttaaaaattctccagacttatatagtcatcattttcaaagtcgccgacagttatctgaccacccccatgccttatcatccagtagcagtcatgcagaacctagaggagaagatgcagtattatctagtgaagacttacacaagcctgggcaagttagcgtacaactacccggtactaactatcgactcggtccgcactagcctgaggtaa

SEQ ID NO: 4805 - DNA, 108 bp, synthetic construct
  source 1..108: mol_type = other DNA
  misc_feature 1..108: note = Synthetic
atggacatagacgtcgaatatctggtttgcaaagccctcaccttcgacggcgcgcttcgccccagcgccgcagagctgctttgtttgccgctgtttcaacagaaatga

SEQ ID NO: 4806 - DNA, 84 bp, synthetic construct
  misc_feature 1..84: note = Synthetic
  source 1..84: mol_type = other DNA
ctggataccagaaaccaggaggaactgcggcaaggttcgaccattattcgcccgcacgactcggtccgcactagcctgaggtaa

SEQ ID NO: 4807 - DNA, 168 bp, synthetic construct
  source 1..168: mol_type = other DNA
  misc_feature 1..168: note = Synthetic
atgtttcgaaagttcgtcgtcgactctttcggaagaagtgcgcctgctgcgctccggctgctattgctgcgtgctcatgtaatcgccgcgagctcgcgtcatcgctgcacgcgaatgtccggcgctggagaaagaagtgtcgactcggtccgcactagcctgaggtaa

SEQ ID NO: 4808 - DNA, 54 bp, synthetic construct
  source 1..54: mol_type = other DNA
  misc_feature 1..54: note = Synthetic
atgtttccactgttttcgtgcctgcaacgcgcgattcagttcctcttcacataa

SEQ ID NO: 4809 - DNA, 48 bp, synthetic construct
  source 1..48: mol_type = other DNA
  misc_feature 1..48: note = Synthetic
gtgtaccccaccgtttcgtttttttcaggccaaacgggcgagagttga

SEQ ID NO: 4810 - DNA, 138 bp, synthetic construct
  source 1..138: mol_type = other DNA
  misc_feature 1..138: note = Synthetic
aggccaaacgggcgagagttgatgaagacttcaacccagtgtacccttatgaccccccacatgctcctgttatgcccttcattactccaccttttacctcctcggatgggttgcaggaaaaaccacttggagtgttaa

SEQ ID NO: 4811 - DNA, 39 bp, synthetic construct
  misc_feature 1..39: note = Synthetic
  source 1..39: mol_type = other DNA
atgagacataaagaaaaaaccaagccagaacaaacttag

SEQ ID NO: 4812 - DNA, 45 bp, synthetic construct
  misc_feature 1..45: note = Synthetic
  source 1..45: mol_type = other DNA
atggagccctcgaaattcttcacgactcggtccgcactagcctga

SEQ ID NO: 4813 - DNA, 141 bp, synthetic construct
  source 1..141: mol_type = other DNA
  misc_feature 1..141: note = Synthetic
aagtccagcagcgccgccagcgggatgcacgagacgcgaccggccgtcgcagattcgtcgaagcgccgcaccacgtacccgttgcagttggtcttgaagttggacacgtccaggtgcgcgctgagccccaccaccgagtag

SEQ ID NO: 4814 - DNA, 39 bp, synthetic construct
  source 1..39: mol_type = other DNA
  misc_feature 1..39: note = Synthetic
atgtggcacagaaggtcgactcggtccgcactagcctga

SEQ ID NO: 4815 - DNA, 129 bp, synthetic construct
  misc_feature 1..129: note = Synthetic
  source 1..129: mol_type = other DNA
atggcgtttatacttggtattattatcacagtcggaatgctaatttattctatgtggggaaagcactgtgcaccccacagagttagcggagtcattcacaccaatcatagcgatatttccatgaactaa

SEQ ID NO: 4816 - DNA, 21 bp, synthetic construct
  misc_feature 1..21: note = Synthetic
  source 1..21: mol_type = other DNA
atggagatcaaggtaatgtga

SEQ ID NO: 4817 - DNA, 216 bp, synthetic construct
  source 1..216: mol_type = other DNA
  misc_feature 1..216: note = Synthetic
acgccaataacaaagaaaaaatgccttaacctctttctgtttacagacatggcttctcttacatctctcatatttgtcagcattgtcactgccgctcatggacaaacagtcgtctctatccctctaggacataattacactctcataggacccccaatcacttcagaggtcatctggaccaaactgggcgactcggtccgcactagcctgaggtaa

SEQ ID NO: 4818 - DNA, 39 bp, synthetic construct
  misc_feature 1..39: note = Synthetic
  source 1..39: mol_type = other DNA
ctgccgctcatggacaaacagtcgtctctatccctctag

SEQ ID NO: 4819 - DNA, 216 bp, synthetic construct
  misc_feature 1..216: note = Synthetic
  source 1..216: mol_type = other DNA
ataaccttaaaaattctccagacttatatagtcatcattttcaaagtcatggacagttatctgaccacccccatgccttatcatccagtagcagtcatgcagaacctagaggagaagatgcagtattatctagtgaagacttacacaagcctgggcaagttagcgtacaactacccggtactaactatcgactcggtccgcactagcctgaggtaa

SEQ ID NO: 4820 - DNA, 99 bp, synthetic construct
  misc_feature 1..99: note = Synthetic
  source 1..99: mol_type = other DNA
atgttcgaccggcctcagctattctcttacccccgaagcgtgcagttggccgaattgatatacggcgcgcgaaagggaaatgtgtacgggctcaagtag

SEQ ID NO: 4821 - DNA, 63 bp, synthetic construct
  misc_feature 1..63: note = Synthetic
  source 1..63: mol_type = other DNA
atgtgtacgggctcaagtagcttcatcggattgatcgataggctagtgttaacacgatactag

SEQ ID NO: 4822 - DNA, 57 bp, synthetic construct
  source 1..57: mol_type = other DNA
  misc_feature 1..57: note = Synthetic
atgaacgctctccaagaagatactccacccggaccgactcggtccgcactagcctga

SEQ ID NO: 4823 - DNA, 27 bp, synthetic construct
  misc_feature 1..27: note = Synthetic
  source 1..27: mol_type = other DNA
atcaccatactcgaacctcggatgtag

SEQ ID NO: 4824 - DNA, 84 bp, synthetic construct
  misc_feature 1..84: note = Synthetic
  source 1..84: mol_type = other DNA
atgtatttttttgccaatgttttaatgtcttctaaagtagccatgttatatgttacccttgtacattttacatttattttatga

SEQ ID NO: 4825 - DNA, 177 bp, synthetic construct
  source 1..177: mol_type = other DNA
  misc_feature 1..177: note = Synthetic
atcaaacaaatggccgagatctacaagttccccaagctatcgtatgaggaacatggatatatggaacctctaccactaaagaccggcccagacaagaaggcagtcccacacataaggataatcaagataggggacccaccgaagcatggcgactcggtccgcactagcctgaggtaa

SEQ ID NO: 4826 - DNA, 36 bp, synthetic construct
  misc_feature 1..36: note = Synthetic
  source 1..36: mol_type = other DNA
atgaggaacatggatatatggaacctctaccactaa

SEQ ID NO: 4827 - DNA, 177 bp, synthetic construct
  misc_feature 1..177: note = Synthetic
  source 1..177: mol_type = other DNA
atcaaacaagccgccgagatctacaagttccccaagctatcgtatgaggaacatggatatatggaacctctaccactaaagaccggcccagacaagaaggcagtcccacacataaggataatcaagataggggacccaccgaagcatggcgactcggtccgcactagcctgaggtaa

SEQ ID NO: 4828 - DNA, 168 bp, synthetic construct
  misc_feature 1..168: note = Synthetic
  source 1..168: mol_type = other DNA
atggagacagtttccacgcagcgggaaaccgcgtcgtcggaaacggagcgtaccagggaagccgcgtccgcggaaacgacggacgctactttccgatccttggaagagggaagcacgatctcctcccggtattcggaaaccgactcggtccgcactagcctgaggtaa

SEQ ID NO: 4829 - DNA, 126 bp, synthetic construct
  misc_feature 1..126: note = Synthetic
  source 1..126: mol_type = other DNA
acggagcgtaccagggaagccgcgtccgcggaaacgacggacgctactttccgatccttggaagagggaagcacgatctcctcccggtattcggaaaccgactcggtccgcactagcctgaggtaa

SEQ ID NO: 4830 - DNA, 39 bp, synthetic construct
  source 1..39: mol_type = other DNA
  misc_feature 1..39: note = Synthetic
atgacccaggggggggtagcttatcttgccaaaccatag

SEQ ID NO: 4831 - DNA, 168 bp, synthetic construct
  source 1..168: mol_type = other DNA
  misc_feature 1..168: note = Synthetic
atgatggatccggctgcgggttctggccctgacggcgctgcagttgtgccgccggagctccccgcgctgcctgtggcggctgaggatcccatggcgttataccgacaagtgttgcgggattttaaggaactgttcttttgcgactcggtccgcactagcctgaggtaa

SEQ ID NO: 4832 - DNA, 81 bp, synthetic construct
  misc_feature 1..81: note = Synthetic
  source 1..81: mol_type = other DNA
aggatcccatggcgttataccgacaagtgttgcgggattttaaggaactgttcttttgcgactcggtccgcactagcctga

SEQ ID NO: 4833 - DNA, 192 bp, synthetic construct
  source 1..192: mol_type = other DNA
  misc_feature 1..192: note = Synthetic
atgttagcgccagaggaccaacgcgtgaatcgcagtcaccaccagcgctttcaaggccgccactccctcgatgatgccgcagtggtcttacatgcacatcgccggtcaggatgcctcggagtacctgagtcccggtctggtgcaattcgcccgcgccacggacacctacttcaccctgggaaacaagtttag

SEQ ID NO: 4834 - DNA, 150 bp, synthetic construct
  misc_feature 1..150: note = Synthetic
  source 1..150: mol_type = other DNA
atgccgcagtggtcttacatgcacatcgccggtcaggatgcctcggagtacctgagtcccggtctggtgcaattcgcccgcgccacggacacctacttcaccctgggaaacaagtttagaaacgactcggtccgcactagcctgaggtaa

SEQ ID NO: 4835 - DNA, 174 bp, synthetic construct
  misc_feature 1..174: note = Synthetic
  source 1..174: mol_type = other DNA
gtggagatgactgactctcaggacattaatattagtgtggaaagaatagctgctcagcgtcagcgagaaacgcgagtgttggaatacctggaactacagcaacttaaagagtcccactggtgtgagaaaggagtgctgtgccatgtcgactcggtccgcactagcctgaggtaa

SEQ ID NO: 4836 - DNA, 174 bp, synthetic construct
  source 1..174: mol_type = other DNA
  misc_feature 1..174: note = Synthetic
gtggaggccactgactctcaggacattaatattagtgtggaaagaatagctgctcagcgtcagcgagaaacgcgagtgttggaatacctggaactacagcaacttaaagagtcccactggtgtgagaaaggagtgctgtgccatgtcgactcggtccgcactagcctgaggtaa

SEQ ID NO: 4837 - DNA, 87 bp, synthetic construct
  misc_feature 1..87: note = Synthetic
  source 1..87: mol_type = other DNA
aggaacagaatgagcggagtcccgctgagcagatgccgcctcgtcccatggaaccggcgcaggttgcggggccggttgacatcatga

SEQ ID NO: 4838 - DNA, 78 bp, synthetic construct
  source 1..78: mol_type = other DNA
  misc_feature 1..78: note = Synthetic
atgagcggagtcccgctgagcagatgccgcctcgtcccatggaaccggcgcaggttgcggggccggttgacatcatga

SEQ ID NO: 4839 - DNA, 168 bp, synthetic construct
  source 1..168: mol_type = other DNA
  misc_feature 1..168: note = Synthetic
atggctaccgacattgatatgctaatcgacctaggattggacctgtccgacagcgagctcgaggaggacgctctggagcgggacgaggagggccgccgcgacgaccccgagtccgacagcagcggggagtgttcctcgtccgactcggtccgcactagcctgaggtaa

SEQ ID NO: 4840 - DNA, 75 bp, synthetic construct
  source 1..75: mol_type = other DNA
  misc_feature 1..75: note = Synthetic
acgcgccccctcggaggacacccgccatcccagccccggcgacctacaacgccgctaccgacattgatatgctaa

SEQ ID NO: 4841 - DNA, 132 bp, synthetic construct
  source 1..132: mol_type = other DNA
  misc_feature 1..132: note = Synthetic
ttggacctgtccgacagcgagctcgaggaggacgctctggagcgggacgaggagggccgccgcgacgaccccgagtccgacagcagcggggagtgttcctcgtccgactcggtccgcactagcctgaggtaa

SEQ ID NO: 4842 - DNA, 114 bp, synthetic construct
  misc_feature 1..114: note = Synthetic
  source 1..114: mol_type = other DNA
atggagcgctttcgccccctgcgcaacatctggaaccgcgtccgcgaattcaccagggccgcgaccacctcggccggcatcacctgcgactcggtccgcactagcctgaggtaa

SEQ ID NO: 4843 - DNA, 186 bp, synthetic construct
  source 1..186: mol_type = other DNA
  misc_feature 1..186: note = Synthetic
aggacacacgctgtggccgccgctctggttcaggacccgggggccggtggtcttcacgcagagacggcacatccaggacctcaaccgccgcgtcgtcgcccacgccagcagtctccgggctcgtcatcaaccgctgccgaatcctcacgaaaacgtgccgactcggtccgcactagcctgaggtaa

SEQ ID NO: 4844 - DNA, 36 bp, synthetic construct
  source 1..36: mol_type = other DNA
  misc_feature 1..36: note = Synthetic
atgatgcgaacctgtggcaaactccgtgaattataa

SEQ ID NO: 4845 - DNA, 174 bp, synthetic construct
  source 1..174: mol_type = other DNA
  misc_feature 1..174: note = Synthetic
ctgaaaatgagacatattatctgccacggaggtgttattaccgaagaaatggccgccagtcttttggaccagctgatcgaagaggtactggctgataatcttccacctcctagccattttgaaccacctacccttcacgaactgtacgactcggtccgcactagcctgaggtaa

SEQ ID NO: 4846 - DNA, 159 bp, synthetic construct
  source 1..159: mol_type = other DNA
  misc_feature 1..159: note = Synthetic
attatctgccacggaggtgttattaccgaagaaatggccgccagtcttttggaccagctgatcgaagaggtactggctgataatcttccacctcctagccattttgaaccacctacccttcacgaactgtacgactcggtccgcactagcctgaggtaa

SEQ ID NO: 4847 - DNA, 129 bp, synthetic construct
  source 1..129: mol_type = other DNA
  misc_feature 1..129: note = Synthetic
attgcacgaaggctggccgacagaaaacagagactaagccaggcaaacaataaacgagacaccagcagtgatgctgactatgagaatgatgatgatgctacagcggctgcagggataggaggaatttaa

SEQ ID NO: 4848 - DNA, 30 bp, synthetic construct
  misc_feature 1..30: note = Synthetic
  source 1..30: mol_type = other DNA
atgatgatgctacagcggctgcagggatag

SEQ ID NO: 4849 - DNA, 39 bp, synthetic construct
  misc_feature 1..39: note = Synthetic
  source 1..39: mol_type = other DNA
attcaaagaaaaagtgcgatgaactggccagacaactga

SEQ ID NO: 4850 - DNA, 33 bp, synthetic construct
  source 1..33: mol_type = other DNA
  misc_feature 1..33: note = Synthetic
atgagaaaatatttttgtgtaaaatctttttag

SEQ ID NO: 4851 - DNA, 54 bp, synthetic construct
  source 1..54: mol_type = other DNA
  misc_feature 1..54: note = Synthetic
acgcaaggaagcagaacggagaatcttgctcagccccgactcggtccgcactag

SEQ ID NO: 4852 - DNA, 30 bp, synthetic construct
  misc_feature 1..30: note = Synthetic
  source 1..30: mol_type = other DNA
atgacggcaaactgtgacatccggagctga

SEQ ID NO: 4853 - DNA, 123 bp, synthetic construct
  misc_feature 1..123: note = Synthetic
  source 1..123: mol_type = other DNA
gtgcccaccatggagcgctttcgccccctgcgcaacatctggaaccgcgtccgcgaattcaccagggccgcgaccacctcggccggcatcacctgcgactcggtccgcactagcctgaggtaa

SEQ ID NO: 4854 - DNA, 174 bp, synthetic construct
  source 1..174: mol_type = other DNA
  misc_feature 1..174: note = Synthetic
gtggccatggctctggttcaggacccgggggccggtggtcttcacgcagagacggcacatccaggacctcaaccgccgcgtcgtcgcccacgccagcagtctccgggctcgtcatcaaccgctgccgaatcctcacgaaaacgtgccgactcggtccgcactagcctgaggtaa

SEQ ID NO: 4855 - DNA, 45 bp, synthetic construct
  misc_feature 1..45: note = Synthetic
  source 1..45: mol_type = other DNA
atgtcgaaaatgtggctttattcatcggcatgtaccatcttctga

SEQ ID NO: 4856 - DNA, 168 bp, synthetic construct
  misc_feature 1..168: note = Synthetic
  source 1..168: mol_type = other DNA
atgccaacttcaacactgctaattattacaaccataattatggcatctttctgccaaatagatatcacaaaactacagcatgtaggtgtattggtcaacagtcccaaagggatgaagatatcacaaaacttcgaaacaagcgactcggtccgcactagcctgaggtaa

SEQ ID NO: 4857 - DNA, 39 bp, synthetic construct
  source 1..39: mol_type = other DNA
  misc_feature 1..39: note = Synthetic
ctgatgatatccgcgaacgatatttgtgaaaatatttaa

SEQ ID NO: 4858 - DNA, 27 bp, synthetic construct
  misc_feature 1..27: note = Synthetic
  source 1..27: mol_type = other DNA
atagagatgctacagatacgtatttga

SEQ ID NO: 4859 - DNA, 99 bp, synthetic construct
  source 1..99: mol_type = other DNA
  misc_feature 1..99: note = Synthetic
ctggggacctgcctccgaacaccccaacaggaagtgcaagtggactccatcccacctcaggatacaatccccgactcggtccgcactagcctgaggtaa

SEQ ID NO: 4860 - DNA, 201 bp, synthetic construct
  source 1..201: mol_type = other DNA
  misc_feature 1..201: note = Synthetic
gtgttggtgagtcacactttcgttgcagacaaaatggacaaggacaggccgggtctcccggccccggatgacaacatagaagaagtaccatctacctcgggtgttcaggaacgggcgtctgagggagattgggaaaatgtcctcatagagatatcagatagcagctcagaagacgactcggtccgcactagcctgaggtaa

SEQ ID NO: 4861 - DNA, 201 bp, synthetic construct
  misc_feature 1..201: note = Synthetic
  source 1..201: mol_type = other DNA
gtgttggtgagtcacactttcgttgcagacaaagccgacaaggacaggccgggtctcccggccccggatgacaacatagaagaagtaccatctacctcgggtgttcaggaacgggcgtctgagggagattgggaaaatgtcctcatagagatatcagatagcagctcagaagacgactcggtccgcactagcctgaggtaa

SEQ ID NO: 4862 - DNA, 24 bp, synthetic construct
  misc_feature 1..24: note = Synthetic
  source 1..24: mol_type = other DNA
ttgatgaagattaagaaaaagtga

SEQ ID NO: 4863 - DNA, 114 bp, synthetic construct
  misc_feature 1..114: note = Synthetic
  source 1..114: mol_type = other DNA
attgttgaaagtctctccctgggggaattgcatatcttattgatgaagaagaaatccctgccatatgtgttgtcaaactatcattatttctctatatgggtattttttttctaa

SEQ ID NO: 4864 - DNA, 96 bp, synthetic construct
  source 1..96: mol_type = other DNA
  misc_feature 1..96: note = Synthetic
atgggtattttttttctaagaagcaaaagactagcagcagccaaaataaacctgatgaaatctttaaccgactcggtccgcactagcctgaggtaa

SEQ ID NO: 4865 - DNA, 132 bp, synthetic construct
  misc_feature 1..132: note = Synthetic
  source 1..132: mol_type = other DNA
atgggagacagtccgacacactccagtcaattcctggttgggaaacatcatagtctacgctcccacaatatgggtgcgcatgatattgatgacccactttttctcaatactccagagccaggaagcccttga

SEQ ID NO: 4866 - DNA, 201 bp, synthetic construct
  source 1..201: mol_type = other DNA
  misc_feature 1..201: note = Synthetic
ctgtcaacgcttacccagcgcggtctggcaaagatgattggctgtcatgaatcgaagataagcagaacggactggagatttattgcttcggtcttgtgtgctttcggaatggcatcagacatcagtccgattagcagggcttttaagtatgcgcttgatggactcacaaagaaaaaacgcccgcgactcggtccgcactag

SEQ ID NO: 4867 - DNA, 177 bp, synthetic construct
  source 1..177: mol_type = other DNA
  misc_feature 1..177: note = Synthetic
ctggcaaagatgattggctgtcatgaatcgaagataagcagaacggactggagatttattgcttcggtcttgtgtgctttcggaatggcatcagacatcagtccgattagcagggcttttaagtatgcgcttgatggactcacaaagaaaaaacgcccgcgactcggtccgcactag

SEQ ID NO: 4868 - DNA, 12 bp, synthetic construct
  misc_feature 1..12: note = Synthetic
  source 1..12: mol_type = other DNA
atagcactttag

SEQ ID NO: 4869 - DNA, 27 bp, synthetic construct
  source 1..27: mol_type = other DNA
  misc_feature 1..27: note = Synthetic
atgatacaagttacgcaagaatggtga

SEQ ID NO: 4870 - DNA, 78 bp, synthetic construct
  misc_feature 1..78: note = Synthetic
  source 1..78: mol_type = other DNA
atgtgtattttctttgtgattttgcttcgtaagctgtcagcctctcacggtccgctatgtttttcaacccgtatctga

SEQ ID NO: 4871 - DNA, 168 bp, synthetic construct
  misc_feature 1..168: note = Synthetic
  source 1..168: mol_type = other DNA
atgtttttcaacccgtatctgagcggcggcgtgaccggcggtgcggtcgcgggtggccggcgtcagcgttcgcagcccggctccgcgcagggctcgggcaagcggccgccacagaaacagtttttgcagatcgtgccgcgcgactcggtccgcactagcctgaggtaa

SEQ ID NO: 4872 - DNA, 78 bp, synthetic construct
  misc_feature 1..78: note = Synthetic
  source 1..78: mol_type = other DNA
atgtgtattttctttgtgattttgcttcgtaagctgtcagcctctcacggtccgctgcctttttcaacccgtatctga

SEQ ID NO: 4873 - DNA, 171 bp, synthetic construct
  misc_feature 1..171: note = Synthetic
  source 1..171: mol_type = other DNA
attatggcagcaaccgttccgcgttttgacgatgtgtacaaaaatgcacaaagaagaattctagatcaagaaacattttttagtagaggtctaagtagaccgttaatgaaaaacacatatctatttgataattacgcgtatggcgactcggtccgcactagcctgaggtaa

SEQ ID NO: 4874 - DNA, 66 bp, synthetic construct
  source 1..66: mol_type = other DNA
  misc_feature 1..66: note = Synthetic
atgaaaaacacatatctatttgataattacgcgtatggcgactcggtccgcactagcctgaggtaa

SEQ ID NO: 4875 - DNA, 24 bp, synthetic construct
  misc_feature 1..24: note = Synthetic
  source 1..24: mol_type = other DNA
atggctgctccggtgtgggaatga

SEQ ID NO: 4876 - DNA, 108 bp, synthetic construct
  source 1..108: mol_type = other DNA
  misc_feature 1..108: note = Synthetic
ctgcaggcgtatgccgtctacgagaatttcgacagcatcctggagtttaatgacgcgcacgccagcctggagtactcgaacgactcggtccgcactagcctgaggtaa

SEQ ID NO: 4877 - DNA, 93 bp, synthetic construct
  source 1..93: mol_type = other DNA
  misc_feature 1..93: note = Synthetic
atgccgtctacgagaatttcgacagcatcctggagtttaatgacgcgcacgccagcctggagtactcgaacgactcggtccgcactagcctga

SEQ ID NO: 4878 - DNA, 156 bp, synthetic construct
  misc_feature 1..156: note = Synthetic
  source 1..156: mol_type = other DNA
atgttgttggcgatccgacgcatctgctcacggtcaaagttaaccatctgtgcggcgatgtttttcatagatccaccccgtaaatccagtctgtgtttgtcaggtcgagttttggtttgctggctgtcacgcctgcctgttgcttgttacggttga

SEQ ID NO: 4879 - DNA, 51 bp, synthetic construct
  misc_feature 1..51: note = Synthetic
  source 1..51: mol_type = other DNA
ttgcttgttacggttgatttcgagttgggtccacgactcggtccgcactag

SEQ ID NO: 4880 - DNA, 144 bp, synthetic construct
  source 1..144: mol_type = other DNA
  misc_feature 1..144: note = Synthetic
atccgacgcatctgctcacggtcaaagttaaccatctgtgcggcgatgtttttcatagatccaccccgtaaatccagtctgtgtttgtcaggtcgagttttggtttgctggctgtcacgcctgcctgttgcttgttacggttga

SEQ ID NO: 4881 - DNA, 42 bp, synthetic construct
  misc_feature 1..42: note = Synthetic
  source 1..42: mol_type = other DNA
acggttgatttcgagttgggtccacgactcggtccgcactag

SEQ ID NO: 4882 - DNA, 195 bp, synthetic construct
  misc_feature 1..195: note = Synthetic
  source 1..195: mol_type = other DNA
gtggaatacactactgaaatgcctcaagccaattcatttttgaagatgtaccacaacggaatgcagctacatttaacccggaggttgggtatgtggcatttattggtaagtatgggcagcaactcaacttcggtgttgctagagtcttcttcctcaaccagaagaaggccaagatggcgactcggtccgcactag

SEQ ID NO: 4883 - DNA, 165 bp, synthetic construct
  source 1..165: mol_type = other DNA
  misc_feature 1..165: note = Synthetic
atcacggttcagttgttcacccagcgagcggagacgggcaatcagttcatctttcgtcatggactcctccacagagaaacaatggccccgaagggccatgattacgccagttgtacggacacgaactcatcagggtcagccagcagcatcagcggtgctgactga

SEQ ID NO: 4884 - DNA, 165 bp, synthetic construct
  source 1..165: mol_type = other DNA
  misc_feature 1..165: note = Synthetic
atcacggttcagttgttcacccagcgagcggagacgggcaatcagttcatctttcgtcgccgactcctccacagagaaacaatggccccgaagggccatgattacgccagttgtacggacacgaactcatcagggtcagccagcagcatcagcggtgctgactga

SEQ ID NO: 4885 - DNA, 225 bp, synthetic construct
  misc_feature 1..225: note = Synthetic
  source 1..225: mol_type = other DNA
atgggcagcagaagcaattactgcccagatggtatttttactatcttggcacagggccccatgctggagccagttatggagacagcattgaaggtgtcttctgggttgcaaacagccaagcggacaccaatacccgctctgatattgtcgaaagggacccaagcagtcatgaggctattcctactaggtttgcgccccgactcggtccgcactagcctgaggtaa

SEQ ID NO: 4886 - DNA, 63 bp, synthetic construct
  misc_feature 1..63: note = Synthetic
  source 1..63: mol_type = other DNA
atggtatttttactatcttggcacagggccccatgctggagccagttatggagacagcattga

SEQ ID NO: 4887 - DNA, 225 bp, synthetic construct
  misc_feature 1..225: note = Synthetic
  source 1..225: mol_type = other DNA
atgggcagcagaagcaattactgcccagatggtatttttactatcttggcacagggccccatgctggagccagttgccgagacagcattgaaggtgtcttctgggttgcaaacagccaagcggacaccaatacccgctctgatattgtcgaaagggacccaagcagtcatgaggctattcctactaggtttgcgccccgactcggtccgcactagcctgaggtaa

SEQ ID NO: 4888 - DNA, 63 bp, synthetic construct
  source 1..63: mol_type = other DNA
  misc_feature 1..63: note = Synthetic
atggtatttttactatcttggcacagggccccatgctggagccagttgccgagacagcattga

SEQ ID NO: 4889 - DNA, 93 bp, synthetic construct
  source 1..93: mol_type = other DNA
  misc_feature 1..93: note = Synthetic
atcgggcgcagcaggatggtggtcttgttgaccaaggtgagccgccctacactagcctgctggagcaacagcttgtcattctggaaggcgtag

SEQ ID NO: 4890 - DNA, 21 bp, synthetic construct
  misc_feature 1..21: note = Synthetic
  source 1..21: mol_type = other DNA
atgacctccctccaaccataa

SEQ ID NO: 4891 - DNA, 228 bp, synthetic construct
  misc_feature 1..228: note = Synthetic
  source 1..228: mol_type = other DNA
ctgactactgcctctcccttatcgtcaatcttctcgaggattggggaccctgcgctgaacatggagaacatcacatcaggattcctaggaccccttctcgtgttacaggcggggtttttcttgttgacaagaatcctcacaataccgcagagtctagactcgtggtggacttctctcaattttctagggggaactaccgtcgactcggtccgcactagcctgaggtaa

SEQ ID NO: 4892 - DNA, 228 bp, synthetic construct
  misc_feature 1..228: note = Synthetic
  source 1..228: mol_type = other DNA
ctgactactgcctctcccttatcgtcaatcttctcgaggattggggaccctgcgctgaacgccgagaacatcacatcaggattcctaggaccccttctcgtgttacaggcggggtttttcttgttgacaagaatcctcacaataccgcagagtctagactcgtggtggacttctctcaattttctagggggaactaccgtcgactcggtccgcactagcctgaggtaa

SEQ ID NO: 4893 - DNA, 216 bp, synthetic construct
  source 1..216: mol_type = other DNA
  misc_feature 1..216: note = Synthetic
gtgcgccttcccgttccgcactatcgaggaagatctcgtcgtaggagaggcatggcgggtagtggtcgccggcgggctttgcgcaggcgcatgaaaggcggaattttacccgctctgatacccataatcgccgccgccatcggtgccatacccggcgtcgcttcagtggccttgcaagcagctcgtaacgactcggtccgcactagcctgaggtaa

SEQ ID NO: 4894 - DNA, 57 bp, synthetic construct
  misc_feature 1..57: note = Synthetic
  source 1..57: mol_type = other DNA
atggtgtctttgatatcagatctgaagagtttgaggattacatggaagatcccttga

SEQ ID NO: 4895 - DNA, 54 bp, synthetic construct
  source 1..54: mol_type = other DNA
  misc_feature 1..54: note = Synthetic
gtgtctttgatatcagatctgaagagtttgaggattacatggaagatcccttga

SEQ ID NO: 4896 - DNA, 24 bp, synthetic construct
  misc_feature 1..24: note = Synthetic
  source 1..24: mol_type = other DNA
ataatcgtgctcaccttcatctaa

SEQ ID NO: 4897 - DNA, 33 bp, synthetic construct
  misc_feature 1..33: note = Synthetic
  source 1..33: mol_type = other DNA
ttggcgccttcgactcggtccgcactagcctga

SEQ ID NO: 4898 - DNA, 204 bp, synthetic construct
  misc_feature 1..204: note = Synthetic
  source 1..204: mol_type = other DNA
atcctaaaaaaacgcacgccccgtaaatacgccacagccgcctgcgagtgcgcgtctctgatcctcgagcttctcagaaaatccgacgacaagctgccggccaagcagatcgcgaaggagctcggcatatctaaacacgaggcgaaccgccagctgtaccgcatgctggaattggacgactcggtccgcactagcctgaggtaa

SEQ ID NO: 4899 - DNA, 39 bp, synthetic construct
  misc_feature 1..39: note = Synthetic
  source 1..39: mol_type = other DNA
atcttggagaataatcactctaataaattctcggcatga

SEQ ID NO: 4900 - DNA, 168 bp, synthetic construct
  misc_feature 1..168: note = Synthetic
  source 1..168: mol_type = other DNA
atgaacggcgcgcagttcgagctgctgcgcgagtacctgggcaggccgcccacgctcaaccagtacttcatcttcaagccgcaggcgcgcgccatccagcgcatcatgcgcttcgataccgacgttttctttgcgctcatcgactcggtccgcactagcctgaggtaa

SEQ ID NO: 4901 - DNA, 147 bp, synthetic construct
  misc_feature 1..147: note = Synthetic
  source 1..147: mol_type = other DNA
ctgctgcgcgagtacctgggcaggccgcccacgctcaaccagtacttcatcttcaagccgcaggcgcgcgccatccagcgcatcatgcgcttcgataccgacgttttctttgcgctcatcgactcggtccgcactagcctgaggtaa

SEQ ID NO: 4902 - DNA, 168 bp, synthetic construct
  misc_feature 1..168: note = Synthetic
  source 1..168: mol_type = other DNA
atggacccgctctcggtcttcttcctcgtggtcgccgcggccgccgtgtgcacattgctgctgcaggcgtatgccgtctacgagaatttcgacagcatcctggagtttaatgacgcgcacgccagcctggagtactcgaacgactcggtccgcactagcctgaggtaa

SEQ ID NO: 4903 - DNA, 54 bp, synthetic construct
  misc_feature 1..54: note = Synthetic
  source 1..54: mol_type = other DNA
atgacgcgcacgccagcctggagtactcgaacgactcggtccgcactagcctga

SEQ ID NO: 4904 - DNA, 201 bp, synthetic construct
  source 1..201: mol_type = other DNA
  misc_feature 1..201: note = Synthetic
acgctcgccaggaccccggggggcgaagttgccatggctgggcgggaggggcgcacgcgccagcgaactttacgggacacaatccccgactgcgcgctgcggtcccagaccctggagagtctagacgcgcgctacgtctcgcgagacggcgcgcatgacgcggccgtctggttcgactcggtccgcactagcctgaggtaa

SEQ ID NO: 4905 - DNA, 108 bp, synthetic construct
  source 1..108: mol_type = other DNA
  misc_feature 1..108: note = Synthetic
atgcaagtgcttttttctcgatgcgtgtccgctctgtgcacgtctgtagaaacaatgtggcctctcttcagcctgtacccgtgcacgactcggtccgcactagcctga

SEQ ID NO: 4906 - DNA, 123 bp, synthetic construct
  source 1..123: mol_type = other DNA
  misc_feature 1..123: note = Synthetic
atgattaagtccagcaatcttgaatcagaacacaaacgaagcatgatagggctcttgaatgatgtcaaaagtggcaaggatcttggagaattttatcagatggtgaaaaaaatcatcaagtaa

SEQ ID NO: 4907 - DNA, 51 bp, synthetic construct
  misc_feature 1..51: note = Synthetic
  source 1..51: mol_type = other DNA
agggggcacccggagtccgtagaagtgaaagattattccgacacggcgtga

SEQ ID NO: 4908 - DNA, 174 bp, synthetic construct
  misc_feature 1..174: note = Synthetic
  source 1..174: mol_type = other DNA
gtgaccatgttccagcgcgtgcccgacctcgaggtggacgccgtgctagagctgggagacttctgcatccaggatacgcgcggcgcgccgcgcgagagcgctcactacgtggcacgccaccgacgcctcttcgtcaaccgcagcaacgactcggtccgcactagcctgaggtaa

SEQ ID NO: 4909 - DNA, 174 bp, synthetic construct
  source 1..174: mol_type = other DNA
  misc_feature 1..174: note = Synthetic
gtgaccgccttccagcgcgtgcccgacctcgaggtggacgccgtgctagagctgggagacttctgcatccaggatacgcgcggcgcgccgcgcgagagcgctcactacgtggcacgccaccgacgcctcttcgtcaaccgcagcaacgactcggtccgcactagcctgaggtaa

SEQ ID NO: 4910 - DNA, 24 bp, synthetic construct
  misc_feature 1..24: note = Synthetic
  source 1..24: mol_type = other DNA
ataatacaaacagctagtatataa

SEQ ID NO: 4911 - DNA, 177 bp, synthetic construct
  source 1..177: mol_type = other DNA
  misc_feature 1..177: note = Synthetic
atcatctctgtcatggttttttgcagtaccatttttgccctagccatatatccataccttgacattggctggaatgccatagatgccatgaaccaccctactttcccagtgcccgctgtcataccactgcaacaggttattgccccaatcaatccgactcggtccgcactagcctga

SEQ ID NO: 4912 - DNA, 204 bp, synthetic construct
  source 1..204: mol_type = other DNA
  misc_feature 1..204: note = Synthetic
atcctaaaaaaacgcacgccccgtaaatacgccacaatggcctgcgagtgcgcgtctctgatcctcgagcttctcagaaaatccgacgacaagctgccggccaagcagatcgcgaaggagctcggcatatctaaacacgaggcgaaccgccagctgtaccgcatgctggaattggacgactcggtccgcactagcctgaggtaa

SEQ ID NO: 4913 - DNA, 57 bp, synthetic construct
  misc_feature 1..57: note = Synthetic
  source 1..57: mol_type = other DNA
ctgctacctatacctcccttgcttttcctacttagtggtgctttgttgctggtttaa

SEQ ID NO: 4914 - DNA, 159 bp, synthetic construct
  source 1..159: mol_type = other DNA
  misc_feature 1..159: note = Synthetic
atcaccctagtgtgcggtgtgctggtgacggtggtgctttcgattctgggagggggaagcgcggctgtagtgacggagaagaaggccgatccctgcttgactttcaaccccgataaatgccggctgagtttcgactcggtccgcactagcctgaggtaa

SEQ ID NO: 4915 - DNA, 39 bp, synthetic construct
  source 1..39: mol_type = other DNA
  misc_feature 1..39: note = Synthetic
atgtaccctgtcgactcggtccgcactagcctgaggtaa

SEQ ID NO: 4916 - DNA, 168 bp, synthetic construct
  source 1..168: mol_type = other DNA
  misc_feature 1..168: note = Synthetic
atgtccggtttcctcgcaatggacgacaaactgtacacggacttgaaaaaactcgtgggcgcacagccactgtatttgttcacggcgcgcggcgatttcgtggaagtcgcgcgccgctcagagttccgcttccgcgtacccgactcggtccgcactagcctgaggtaa

SEQ ID NO: 4917 - DNA, 117 bp, synthetic construct
  source 1..117: mol_type = other DNA
  misc_feature 1..117: note = Synthetic
atgacttccgtcaatgcaacggaagatgcgtgcactaaatcctacagcgccttcctcagcggcatgacaagcctgctgctcgtcctgctcgactcggtccgcactagcctgaggtaa

SEQ ID NO: 4918 - DNA, 168 bp, synthetic construct
  misc_feature 1..168: note = Synthetic
  source 1..168: mol_type = other DNA
atgctctccaccatggcccccgggtccactgtggggaccctggtggccaacatgacttccgtcaatgcaacggaagatgcgtgcactaaatcctacagcgccttcctcagcggcatgacaagcctgctgctcgtcctgctcgactcggtccgcactagcctgaggtaa

SEQ ID NO: 4919 - DNA, 186 bp, synthetic construct
  misc_feature 1..186: note = Synthetic
  source 1..186: mol_type = other DNA
ctggctctgaccagcaaggccctctccaccatggcccccgggtccactgtggggaccctggtggccaacatgacttccgtcaatgcaacggaagatgcgtgcactaaatcctacagcgccttcctcagcggcatgacaagcctgctgctcgtcctgctcgactcggtccgcactagcctgaggtaa

SEQ ID NO: 4920 - DNA, 15 bp, synthetic construct
  misc_feature 1..15: note = Synthetic
  source 1..15: mol_type = other DNA
ctgtccaggatctga

SEQ ID NO: 4921 - DNA, 135 bp, synthetic construct
  source 1..135: mol_type = other DNA
  misc_feature 1..135: note = Synthetic
gtgcccaacccttacaacctcttgagcgggctcccaccgtcccaccagtggtacactgtgcttgatttaaaggatgcctttttctgcctgagactccaccccaccagcgactcggtccgcactagcctgaggtaa

SEQ ID NO: 4922 - DNA, 135 bp, synthetic construct
  source 1..135: mol_type = other DNA
  misc_feature 1..135: note = Synthetic
gtgcccaacccttacaacctcttgagcgggctcccaccgtcccaccagtggtacactgtgcttgatttaaagggcccctttttctgcctgagactccaccccaccagcgactcggtccgcactagcctgaggtaa

SEQ ID NO: 4923 - DNA, 168 bp, synthetic construct
  misc_feature 1..168: note = Synthetic
  source 1..168: mol_type = other DNA
atggggaagatcaccctagtgtgcggtgtgctggtgacggtggtgctttcgattctgggagggggaagcgcggctgtagtgacggagaagaaggccgatccctgcttgactttcaaccccgataaatgccggctgagtttcgactcggtccgcactagcctgaggtaa

SEQ ID NO: 4924 - DNA, 81 bp, synthetic construct
  source 1..81: mol_type = other DNA
  misc_feature 1..81: note = Synthetic
ctgccaaaaaggttgagtttaaggaaccagcttgcaatgttacatttaaatcagaagctaatgaatgcactactcttataa

SEQ ID NO: 4925 - DNA, 168 bp, synthetic construct
  misc_feature 1..168: note = Synthetic
  source 1..168: mol_type = other DNA
atgagcaaaatctttgtaaatcctagtgcaattcgtgcaggactggcagaccttgagatggctgaagagacagttgatttgatcaacaggaatcttgaggacaaccaggctcatcttcaaggagagcccatcgaagtggacgactcggtccgcactagcctgaggtaa

SEQ ID NO: 4926 - DNA, 159 bp, synthetic construct
  source 1..159: mol_type = other DNA
  misc_feature 1..159: note = Synthetic
atctttgtaaatcctagtgcaattcgtgcaggactggcagaccttgagatggctgaagagacagttgatttgatcaacaggaatcttgaggacaaccaggctcatcttcaaggagagcccatcgaagtggacgactcggtccgcactagcctgaggtaa

SEQ ID NO: 4927 - DNA, 45 bp, synthetic construct
  source 1..45: mol_type = other DNA
  misc_feature 1..45: note = Synthetic
atcatcatctcgggttcaataaaggttttgaccttggacagttaa

SEQ ID NO: 4928 - DNA, 93 bp, synthetic construct
  misc_feature 1..93: note = Synthetic
  source 1..93: mol_type = other DNA
atggataacaattttattttacacatcaaaatcccagtattggaactatatgacaataccatgtacccctacagttggatacggcagtcataa

SEQ ID NO: 4929 - DNA, 63 bp, synthetic construct
  source 1..63: mol_type = other DNA
  misc_feature 1..63: note = Synthetic
atgggcacgatgcccacgacccaaatcgcccaccaccgccctgcggtctgggtgacattataa

SEQ ID NO: 4930 - DNA, 150 bp, synthetic construct
  misc_feature 1..150: note = Synthetic
  source 1..150: mol_type = other DNA
atgctgggcttccgagtaggcccggcgcccgggctactagccgtgtgcttgcaacgccgcgacgtactgctgtgcttcgagggcgccttctactttagcgaccgcttcattattgaaaagagagcgcccgtgataaatatctgcgcctag

SEQ ID NO: 4931 - DNA, 228 bp, synthetic construct
  misc_feature 1..228: note = Synthetic
  source 1..228: mol_type = other DNA
ctggcggcaaatgagcagaaatttaagtttgatccgctgtttctgcgtctctttttccgtgagagctatcccttcaccacggagaaagtctatctctcacaaattccgggactggtaaacatggcgctgtacgtttcgccgattgtttccggtgaggttatccgttcccgtggcggctccacctctgaatttacgccgggcgactcggtccgcactagcctgaggtaa

SEQ ID NO: 4932 - DNA, 108 bp, synthetic construct
  misc_feature 1..108: note = Synthetic
  source 1..108: mol_type = other DNA
atgagcagaaatttaagtttgatccgctgtttctgcgtctctttttccgtgagagctatcccttcaccacggagaaagtctatctctcacaaattccgggactggtaa

SEQ ID NO: 4933 - DNA, 228 bp, synthetic construct
  source 1..228: mol_type = other DNA
  misc_feature 1..228: note = Synthetic
ctggcggcaaatgagcagaaatttaagtttgatccgctgtttctgcgtctctttttccgtgagagctatcccttcaccgccgagaaagtctatctctcacaaattccgggactggtaaacatggcgctgtacgtttcgccgattgtttccggtgaggttatccgttcccgtggcggctccacctctgaatttacgccgggcgactcggtccgcactagcctgaggtaa

SEQ ID NO: 4934 - DNA, 108 bp, synthetic construct
  misc_feature 1..108: note = Synthetic
  source 1..108: mol_type = other DNA
atgagcagaaatttaagtttgatccgctgtttctgcgtctctttttccgtgagagctatcccttcaccgccgagaaagtctatctctcacaaattccgggactggtaa

SEQ ID NO: 4935 - DNA, 204 bp, synthetic construct
  misc_feature 1..204: note = Synthetic
  source 1..204: mol_type = other DNA
aagtttgatccgctgtttctgcgtctctttttccgtgagagctatcccttcaccacggagaaagtctatctctcacaaattccgggactggtaaacatggcgctgtacgtttcgccgattgtttccggtgaggttatccgttcccgtggcggctccacctctgaatttacgccgggcgactcggtccgcactagcctgaggtaa

SEQ ID NO: 4936 - DNA, 90 bp, synthetic construct
  misc_feature 1..90: note = Synthetic
  source 1..90: mol_type = other DNA
ttgatccgctgtttctgcgtctctttttccgtgagagctatcccttcaccacggagaaagtctatctctcacaaattccgggactggtaa

SEQ ID NO: 4937 - DNA, 30 bp, synthetic construct
  source 1..30: mol_type = other DNA
  misc_feature 1..30: note = Synthetic
ctgtgttacctggctaatcagaatttataa

SEQ ID NO: 4938 - DNA, 57 bp, synthetic construct
  source 1..57: mol_type = other DNA
  misc_feature 1..57: note = Synthetic
acggccaatccgtcagtacgccagtcgccactgccgactcggtccgcactagcctga

SEQ ID NO: 4939 - DNA, 72 bp, synthetic construct
  source 1..72: mol_type = other DNA
  misc_feature 1..72: note = Synthetic
atgaacctggccattgctctggactctcctcacccaggcctcgcgtcttatactcgactcggtccgcactag

SEQ ID NO: 4940 - DNA, 168 bp, synthetic construct
  misc_feature 1..168: note = Synthetic
  source 1..168: mol_type = other DNA
atgacacatctgggtggcaaggtgaggtcttctgggtttttaataccggggtcggcaccagtttctgggacaccgccacaaggacaaggtgggctagcaagttctcgagtctacgaagactccgggggcagtcttttgagcgactcggtccgcactagcctgaggtaa

SEQ ID NO: 4941 - DNA, 36 bp, synthetic construct
  source 1..36: mol_type = other DNA
  misc_feature 1..36: note = Synthetic
atggagtcctctgtcattggccgcattcaccggtga

SEQ ID NO: 4942 - DNA, 63 bp, synthetic construct
  source 1..63: mol_type = other DNA
  misc_feature 1..63: note = Synthetic
atgggcacgatgcccacgacccaaatcgcccaccaccgccctgcggtctgggtaacattataa

SEQ ID NO: 4943 - DNA, 21 bp, synthetic construct
  source 1..21: mol_type = other DNA
  misc_feature 1..21: note = Synthetic
atgtcccggatgtgttactaa

SEQ ID NO: 4944 - DNA, 168 bp, synthetic construct
  misc_feature 1..168: note = Synthetic
  source 1..168: mol_type = other DNA
atgcgaccgggtagaccactggctggattctacgctactctccgccgttccttcagaagaatgtccaaaaggtcaaagaacaaggccaagaaggagcgtgtccccgtggaggaccgcccaccgactccgatgcccaccagcgactcggtccgcactagcctgaggtaa

SEQ ID NO: 4945 - DNA, 42 bp, synthetic construct
  misc_feature 1..42: note = Synthetic
  source 1..42: mol_type = other DNA
atgcctgctcctcatctaagaagccaccgcccgaccgggtag

SEQ ID NO: 4946 - DNA, 150 bp, synthetic construct
  misc_feature 1..150: note = Synthetic
  source 1..150: mol_type = other DNA
ctggctggattctacgctactctccgccgttccttcagaagaatgtccaaaaggtcaaagaacaaggccaagaaggagcgtgtccccgtggaggaccgcccaccgactccgatgcccaccagcgactcggtccgcactagcctgaggtaa

SEQ ID NO: 4947 - DNA, 45 bp, synthetic construct
  misc_feature 1..45: note = Synthetic
  source 1..45: mol_type = other DNA
attaaatcgttttgtatatccgtcactggtacggtcgtcatttaa

SEQ ID NO: 4948 - DNA, 168 bp, synthetic construct
  misc_feature 1..168: note = Synthetic
  source 1..168: mol_type = other DNA
atgatgcctattaagtcaatagttactcttgatcaattagaggactctgaatatttatttcgtatagtttctaccgttcttccgcatctatgtctagattacaaagtatgtgaccaacttaaaacaaccttcgttcatcccgactcggtccgcactagcctgaggtaa

SEQ ID NO: 4949 - DNA, 165 bp, synthetic construct
  misc_feature 1..165: note = Synthetic
  source 1..165: mol_type = other DNA
atgcctattaagtcaatagttactcttgatcaattagaggactctgaatatttatttcgtatagtttctaccgttcttccgcatctatgtctagattacaaagtatgtgaccaacttaaaacaaccttcgttcatcccgactcggtccgcactagcctgaggtaa

SEQ ID NO: 4950 - DNA, 57 bp, synthetic construct
  misc_feature 1..57: note = Synthetic
  source 1..57: mol_type = other DNA
atgacaagcacggcatcgtgctcatcccccaaaccgatctgtaagcaagtcgcgtag

SEQ ID NO: 4951 - DNA, 207 bp, synthetic construct
  source 1..207: mol_type = other DNA
  misc_feature 1..207: note = Synthetic
ataactttctcaaaaatgttgttgcttataatagtcctaggaattgcagacgcagtgcctttagataataggtgcttcacagatggagtcatttccatgtctaaagacatggaccatggcatagctgagatttgcattaaggacgatataagtattgtgaaaactacctcacagcagtacgactcggtccgcactagcctgaggtaa

SEQ ID NO: 4952 - DNA, 180 bp, synthetic construct
  misc_feature 1..180: note = Synthetic
  source 1..180: mol_type = other DNA
ataatagtcctaggaattgcagacgcagtgcctttagataataggtgcttcacagatggagtcatttccatgtctaaagacatggaccatggcatagctgagatttgcattaaggacgatataagtattgtgaaaactacctcacagcagtacgactcggtccgcactagcctgaggtaa

SEQ ID NO: 4953 - DNA, 222 bp, synthetic construct
  source 1..222: mol_type = other DNA
  misc_feature 1..222: note = Synthetic
atggacatgatcgcgctggagaacctgaaggcgctgctgctgatcgtgcgccgcagcggccggtacgtgggcgacgcggagatcggcgttgcggagatgcagaaggcctacgagctggtgcgagaaaaaatatcgcggctgacggcgtactactcgagcatcggcgagatgtactggaacaacatgaagcgcaacgactcggtccgcactagcctgaggtaa

SEQ ID NO: 4954 - DNA, 42 bp, synthetic construct
  source 1..42: mol_type = other DNA
  misc_feature 1..42: note = Synthetic
atgaatgcagatgtgactatcatgctaaatttgactctgtaa

SEQ ID NO: 4955 - DNA, 99 bp, synthetic construct
  misc_feature 1..99: note = Synthetic
  source 1..99: mol_type = other DNA
atggctgtatctttcataatgctacacattgtcaaatttgtcacgctgttcctccatgggaaaaggaaaatcgactcggtccgcactagcctgaggtaa

SEQ ID NO: 4956 - DNA, 168 bp, synthetic construct
  source 1..168: mol_type = other DNA
  misc_feature 1..168: note = Synthetic
atgatgcctattaagtcaatagttactcttgatcaattagaggactctgaatatctatttcgtatagtttctaccgttcttccacatctatgtctagattacaaagtatgtgatcaacttaaaacaaccttcgttcatcccgactcggtccgcactagcctgaggtaa

SEQ ID NO: 4957 - DNA, 168 bp, synthetic construct
  misc_feature 1..168: note = Synthetic
  source 1..168: mol_type = other DNA
atgatgcctattaagtcaatagttactcttgatcaattagaggactctgaatatctatttcgtatagtttctaccgttcttccgcatctatgtctagattacaaagtatgtgaccaacttaaaacaaccttcgttcatcccgactcggtccgcactagcctgaggtaa

SEQ ID NO: 4958 - DNA, 165 bp, synthetic construct
  source 1..165: mol_type = other DNA
  misc_feature 1..165: note = Synthetic
atgcctattaagtcaatagttactcttgatcaattagaggactctgaatatctatttcgtatagtttctaccgttcttccgcatctatgtctagattacaaagtatgtgaccaacttaaaacaaccttcgttcatcccgactcggtccgcactagcctgaggtaa

SEQ ID NO: 4959 - DNA, 21 bp, synthetic construct
  source 1..21: mol_type = other DNA
  misc_feature 1..21: note = Synthetic
atgacgattcatcgcacctga

SEQ ID NO: 4960 - DNA, 102 bp, synthetic construct
  misc_feature 1..102: note = Synthetic
  source 1..102: mol_type = other DNA
ctgcgaacttcaaaaagcatcgggaataacaccatgaaaaaaatgctactcgctactgcgctggccctgcttatcgactcggtccgcactagcctgaggtaa

SEQ ID NO: 4961 - DNA, 174 bp, synthetic construct
  misc_feature 1..174: note = Synthetic
  source 1..174: mol_type = other DNA
ctggcagacgacatggaaaaaggcctgccccagcacctgtttgaatcgctatgcatcgatcatttgcaacgccacggggccagcaaaaaatccattacccgtgcgtttgatgacgatgttgagtttcaggagcgcatggcagaacacatcccgactcggtccgcactagcctga

SEQ ID NO: 4962 - DNA, 69 bp, synthetic construct
  misc_feature 1..69: note = Synthetic
  source 1..69: mol_type = other DNA
gtgcgtttgatgacgatgttgagtttcaggagcgcatggcagaacacatcccgactcggtccgcactag

SEQ ID NO: 4963 - DNA, 162 bp, synthetic construct
  misc_feature 1..162: note = Synthetic
  source 1..162: mol_type = other DNA
atggaaaaaggcctgccccagcacctgtttgaatcgctatgcatcgatcatttgcaacgccacggggccagcaaaaaatccattacccgtgcgtttgatgacgatgttgagtttcaggagcgcatggcagaacacatcccgactcggtccgcactagcctga

SEQ ID NO: 4964 - DNA, 57 bp, synthetic construct
  misc_feature 1..57: note = Synthetic
  source 1..57: mol_type = other DNA
aaggatatcatgtcggatttgttgatggaacgccacaaccgactcggtccgcactag

SEQ ID NO: 4965 - DNA, 45 bp, synthetic construct
  source 1..45: mol_type = other DNA
  misc_feature 1..45: note = Synthetic
ctgacgacccagaagatgcaaaggatatcatgtcggatttgttga

SEQ ID NO: 4966 - DNA, 204 bp, synthetic construct
  misc_feature 1..204: note = Synthetic
  source 1..204: mol_type = other DNA
atggggagcgcgcacaaaggaccgtcaggcgccggcatggagcgtcgccgaggtacggtaccgctgggatgggtgttttttgttctttgcttatctgcctcttccccgtgtgctgttgatctgggtagcaagtcctccaactcgacctgccgcttgaatgtgactgagttggcctccgactcggtccgcactagcctgaggtaa

SEQ ID NO: 4967 - DNA, 204 bp, synthetic construct
  misc_feature 1..204: note = Synthetic
  source 1..204: mol_type = other DNA
atggggagcgcgcacaaaggaccgtcaggcgccggcgccgagcgtcgccgaggtacggtaccgctgggatgggtgttttttgttctttgcttatctgcctcttccccgtgtgctgttgatctgggtagcaagtcctccaactcgacctgccgcttgaatgtgactgagttggcctccgactcggtccgcactagcctgaggtaa

SEQ ID NO: 4968 - DNA, 30 bp, synthetic construct
  misc_feature 1..30: note = Synthetic
  source 1..30: mol_type = other DNA
atcaacgtcttgtcgctaccgtgtagctag

SEQ ID NO: 4969 - DNA, 162 bp, synthetic construct
  misc_feature 1..162: note = Synthetic
  source 1..162: mol_type = other DNA
acggggagtagttttgatatattcgctaatatcctctttaataatatccacacacgccaattgttcggctatactcgatgcgtgagtcttgcattcatctccagatatctgagtaagggtcagatccaaatattgagaacgactcggtccgcactagcctga

SEQ ID NO: 4970 - DNA, 39 bp, synthetic construct
  source 1..39: mol_type = other DNA
  misc_feature 1..39: note = Synthetic
atttatattttagtgacgactcggtccgcactagcctga

SEQ ID NO: 4971 - DNA, 21 bp, synthetic construct
  source 1..21: mol_type = other DNA
  misc_feature 1..21: note = Synthetic
atggacaggtcgcatcgttag

SEQ ID NO: 4972 - DNA, 48 bp, synthetic construct
  misc_feature 1..48: note = Synthetic
  source 1..48: mol_type = other DNA
attttgccagtgttgtcctcgggaacgccgccgggcttggtattatag

SEQ ID NO: 4973 - DNA, 165 bp, synthetic construct
  source 1..165: mol_type = other DNA
  misc_feature 1..165: note = Synthetic
atgtacaaaggtcgagcccccaaccttgagctgtttgctgctgctgaaagttatgcacggacattgagagagaacaacaagatcaacctagcggccttagggctcactgatgatgagagggaagcagcaacatcctacctagcgactcggtccgcactagcctga

SEQ ID NO: 4974 - DNA, 141 bp, synthetic construct
  source 1..141: mol_type = other DNA
  misc_feature 1..141: note = Synthetic
atttattctacatggcccagtacattgtccgattcatcaggtagggtcatcgttatgccagataatagatcattcacgtttaaggaagggtttaaattagatgaatcgataaacgactcggtccgcactagcctgaggtaa

SEQ ID NO: 4975 - DNA, 93 bp, synthetic construct
  misc_feature 1..93: note = Synthetic
  source 1..93: mol_type = other DNA
atcgttatgccagataatagatcattcacgtttaaggaagggtttaaattagatgaatcgataaacgactcggtccgcactagcctgaggtaa

SEQ ID NO: 4976 - DNA, 36 bp, synthetic construct
  source 1..36: mol_type = other DNA
  misc_feature 1..36: note = Synthetic
atgagggagatgaagagtattttaaagattttctaa

SEQ ID NO: 4977 - DNA, 42 bp, synthetic construct
  source 1..42: mol_type = other DNA
  misc_feature 1..42: note = Synthetic
atacacatgagggagatgaggagtattttaaagattttctaa

SEQ ID NO: 4978 - DNA, 18 bp, synthetic construct
  misc_feature 1..18: note = Synthetic
  source 1..18: mol_type = other DNA
ttggatcggcgggattag

SEQ ID NO: 4979 - DNA, 141 bp, synthetic construct
  misc_feature 1..141: note = Synthetic
  source 1..141: mol_type = other DNA
atgtcctcgcgcgcctcaatctgctcctcgacctcgatgcgcacttccaggcgcgagaagagaacggactgctctgcggccaagctgcgcgaagtgcggcccaggctctcggccatggcgactcggtccgcactagcctga

SEQ ID NO: 4980 - DNA, 168 bp, synthetic construct
  misc_feature 1..168: note = Synthetic
  source 1..168: mol_type = other DNA
atgaataggaatcctgatcagaatactcttcctaatattacattaaagattatagaaacctatttaggcagagtacctagtgtgaacgaatatcatatgttaaaattacaagctagaaatattcaaaaaataactgttttcgactcggtccgcactagcctgaggtaa

SEQ ID NO: 4981 - DNA, 72 bp, synthetic construct
  misc_feature 1..72: note = Synthetic
  source 1..72: mol_type = other DNA
atgttaaaattacaagctagaaatattcaaaaaataactgttttcgactcggtccgcactagcctgaggtaa

SEQ ID NO: 4982 - DNA, 168 bp, synthetic construct
  source 1..168: mol_type = other DNA
  misc_feature 1..168: note = Synthetic
atgaataggaatcctgatcagaatactcttcctaatattacattaaagattatagaaacctatttaggcagaatacctagtgtaaacgaatatcatatgttaaaattacaagctagaaatattcagaaaataactgttttcgactcggtccgcactagcctgaggtaa

SEQ ID NO: 4983 - DNA, 69 bp, synthetic construct
  misc_feature 1..69: note = Synthetic
  source 1..69: mol_type = other DNA
atgcggttttccagccggccatccctcgtgatttccgctactaccctaatgtcgtggcaaagaacatag

SEQ ID NO: 4984 - DNA, 36 bp, synthetic construct
  misc_feature 1..36: note = Synthetic
  source 1..36: mol_type = other DNA
ttggatatttcacgaccctatcgtttatttacgtaa

SEQ ID NO: 4985 - DNA, 72 bp, synthetic construct
  misc_feature 1..72: note = Synthetic
  source 1..72: mol_type = other DNA
atgcagtgcgtcgtaaaacaacgcctagttattccggacaatatcgaaccgcgcggcgaagtgtggtcgtag

SEQ ID NO: 4986 - DNA, 69 bp, synthetic construct
  source 1..69: mol_type = other DNA
  misc_feature 1..69: note = Synthetic
attagtttaatagtctctattttctctttgattagatacatgcgctgccgacatggacactctaattga

SEQ ID NO: 4987 - DNA, 168 bp, synthetic construct
  source 1..168: mol_type = other DNA
  misc_feature 1..168: note = Synthetic
atggacactctaattgatttccaaaaaatcctgcatgatgaagagtacaagtacaattatacgtgtattacgccaacagtacggaaagcccaaagacttgaaagcgtaattaacggaattatgctaacgctgatacttcccgactcggtccgcactagcctgaggtaa

SEQ ID NO: 4988 - DNA, 72 bp, synthetic construct
  source 1..72: mol_type = other DNA
  misc_feature 1..72: note = Synthetic
atgaagagtacaagtacaattatacgtgtattacgccaacagtacggaaagcccaaagacttgaaagcgtaa

SEQ ID NO: 4989 - DNA, 69 bp, synthetic construct
  source 1..69: mol_type = other DNA
  misc_feature 1..69: note = Synthetic
attagtttaatagtctctattttctctttgattagatacatgcgctgccgacgccgacactctaattga

SEQ ID NO: 4990 - DNA, 168 bp, synthetic construct
  misc_feature 1..168: note = Synthetic
  source 1..168: mol_type = other DNA
atggcctgtcgtaagttctgtggggtctaccgtagacccgacaagagacaggaggcgtccgtcccgccggagacaaacacggccccggccttcccggcgagcaccttttatacccccgcggaggatgcgtacctggcccccgactcggtccgcactagcctgaggtaa

SEQ ID NO: 4991 - DNA, 39 bp, synthetic construct
  misc_feature 1..39: note = Synthetic
  source 1..39: mol_type = other DNA
atgcgtacctggcccccgactcggtccgcactagcctga

SEQ ID NO: 4992 - DNA, 156 bp, synthetic construct
  misc_feature 1..156: note = Synthetic
  source 1..156: mol_type = other DNA
aagttctgtggggtctaccgtagacccgacaagagacaggaggcgtccgtcccgccggagacaaacacggccccggccttcccggcgagcaccttttatacccccgcggaggatgcgtacctggcccccgactcggtccgcactagcctgaggtaa

SEQ ID NO: 4993 - DNA, 66 bp, synthetic construct
  misc_feature 1..66: note = Synthetic
  source 1..66: mol_type = other DNA
atggccccttttataccccagccgaggacgcgtgcctggactccgactcggtccgcactagcctga

SEQ ID NO: 4994 - DNA, 24 bp, synthetic construct
  misc_feature 1..24: note = Synthetic
  source 1..24: mol_type = other DNA
atggtcagtcttaggaaagtttag

SEQ ID NO: 4995 - DNA, 114 bp, synthetic construct
  source 1..114: mol_type = other DNA
  misc_feature 1..114: note = Synthetic
atgtcttcaagggagactatctccgtccccacaacctcaaacagccaggcaaagaaagagaagaagagcccgactcagaaaaacagagtaccaaatcagacagctccaaagtag

SEQ ID NO: 4996 - DNA, 132 bp, synthetic construct
  misc_feature 1..132: note = Synthetic
  source 1..132: mol_type = other DNA
aggcaaagaaagagaagaagagcccgactcagaaaaacagagtaccaaatcagacagctccaaagtagaatttgggaagccttggagcaaagagcaaatcagagcgactcggtccgcactagcctgaggtaa

SEQ ID NO: 4997 - DNA, 168 bp, synthetic construct
  source 1..168: mol_type = other DNA
  misc_feature 1..168: note = Synthetic
atgagcaaggagattcccacaccttacatgtggagctatcagccccagatgggcctagccgcgggcgcctcccaggactactccacccgcatgaactggcttagtgccgggccctcgatgatctcacaagtcaacgggatcgactcggtccgcactagcctgaggtaa

SEQ ID NO: 4998 - DNA, 141 bp, synthetic construct
  source 1..141: mol_type = other DNA
  misc_feature 1..141: note = Synthetic
atgtggagctatcagccccagatgggcctagccgcgggcgcctcccaggactactccacccgcatgaactggcttagtgccgggccctcgatgatctcacaagtcaacgggatcgactcggtccgcactagcctgaggtaa

SEQ ID NO: 4999 - DNA, 84 bp, synthetic construct
  misc_feature 1..84: note = Synthetic
  source 1..84: mol_type = other DNA
atggaaggtcagattcttcttcccaatccctacccaccatcttcatcttttctagatgaagcgcagcagaacccagtatgctga

SEQ ID NO: 5000 - DNA, 141 bp, synthetic construct
  misc_feature 1..141: note = Synthetic
  source 1..141: mol_type = other DNA
atgctgaagaaacagaagaaaatgatgacttcaaccccgtttacccttttgacccatttgacacatcagacgtaccctttgttacacccccttttacttcttccaatggtcttcaagacgactcggtccgcactagcctga

SEQ ID NO: 5001 - DNA, 84 bp, synthetic construct
  source 1..84: mol_type = other DNA
  misc_feature 1..84: note = Synthetic
atggaaggtcagattcttcttcccaatccctacccaccatcttcatcttttctaggccaagcgcagcagaacccagtatgctga

SEQ ID NO: 5002 - DNA, 33 bp, synthetic construct
  source 1..33: mol_type = other DNA
  misc_feature 1..33: note = Synthetic
atgggcgggcaagtgcggcaacagctactttga

SEQ ID NO: 5003 - DNA, 159 bp, synthetic construct
  source 1..159: mol_type = other DNA
  misc_feature 1..159: note = Synthetic
atatttgacgaggcggctagtttcagaagctatcaatcgaaactcggtcgagatgggcgggcaagtgcggcaacagctactttgactactaagataagaatttttgtaccagcaactaatagcccagaactcgactcggtccgcactagcctgaggtaa

SEQ ID NO: 5004 - DNA, 168 bp, synthetic construct
  source 1..168: mol_type = other DNA
  misc_feature 1..168: note = Synthetic
atggatgtgtggagtattcttggggaatttaacaagacacgccggcttgtggaggatagttcagacgggtgctccgggttttggagacactggtttggaactcctctatctcgcctggtgtacacagttaagaaggattacgactcggtccgcactagcctgaggtaa

SEQ ID NO: 5005 - DNA, 102 bp, synthetic construct
  misc_feature 1..102: note = Synthetic
  source 1..102: mol_type = other DNA
attaataaaataaatcctttttataaagaagaaaaaaaggaaggaatattaaactggttagggatgaagaagactgaaaccaagtcgtggaagctgttttga

SEQ ID NO: 5006 - DNA, 216 bp, synthetic construct
  source 1..216: mol_type = other DNA
  misc_feature 1..216: note = Synthetic
atgtggtcgcgtgtggtctttttaaggagctctgaaacacagacaggtatggggggtggccggctgccgccgctgtggctgccgctgctgatcgcctggagcgagtggggcaactgctgtctcgatgcgcctccggtggtgcgttcgccctgtctgcagccggtgcgcgaccgcaaccgcgagcggaacgactcggtccgcactagcctgaggtaa

SEQ ID NO: 5007 - DNA, 216 bp, synthetic construct
  misc_feature 1..216: note = Synthetic
  source 1..216: mol_type = other DNA
atgtggtcgcgtgtggtctttttaaggagctctgaaacacagacaggtgccgggggtggccggctgccgccgctgtggctgccgctgctgatcgcctggagcgagtggggcaactgctgtctcgatgcgcctccggtggtgcgttcgccctgtctgcagccggtgcgcgaccgcaaccgcgagcggaacgactcggtccgcactagcctgaggtaa

SEQ ID NO: 5008 - DNA, 201 bp, synthetic construct
  misc_feature 1..201: note = Synthetic
  source 1..201: mol_type = other DNA
gtggatcccgtggcggctcctgaaaaagactgtgcccccaaggccagacggcagcgaactcgtcgcacacgcagcaacagaccaccaacaccatggcccactttccaggtttcggacagagcctcctctatggatacccagtctacgtgtttggcgattgtgttcaagccgatcgactcggtccgcactagcctgaggtaa

SEQ ID NO: 5009 - DNA, 162 bp, synthetic construct
  source 1..162: mol_type = other DNA
  misc_feature 1..162: note = Synthetic
ctgtgcccccaaggccagacggcagcgaactcgtcgcacacgcagcaacagaccaccaacaccatggcccactttccaggtttcggacagagcctcctctatggatacccagtctacgtgtttggcgattgtgttcaagccgatcgactcggtccgcactag

SEQ ID NO: 5010 - DNA, 120 bp, synthetic construct
  misc_feature 1..120: note = Synthetic
  source 1..120: mol_type = other DNA
ctgtgcccccaaggccagacggcagcgaactcgtcgcacacgcagcaacagaccaccaacaccatggccgctcccttctgcgctgctccttctcctcgcgttgtttcagaatttccatga

SEQ ID NO: 5011 - DNA, 192 bp, synthetic construct
  misc_feature 1..192: note = Synthetic
  source 1..192: mol_type = other DNA
ctgtttcacgcttccttaaacaacatggctatgccatttgagatagaggtattgttaccaggagaactatccccggcggaaacatctgcattacagaaatgtgagggaaaaattattaccttctcaaccctgcgtcatcgagcttcactggtggatatagcgctcgactcggtccgcactagcctgaggtaa

SEQ ID NO: 5012 - DNA, 162 bp, synthetic construct
  source 1..162: mol_type = other DNA
  misc_feature 1..162: note = Synthetic
atgccatttgagatagaggtattgttaccaggagaactatccccggcggaaacatctgcattacagaaatgtgagggaaaaattattaccttctcaaccctgcgtcatcgagcttcactggtggatatagcgctcgactcggtccgcactagcctgaggtaa

SEQ ID NO: 5013 - DNA, 78 bp, synthetic construct
  source 1..78: mol_type = other DNA
  misc_feature 1..78: note = Synthetic
atgtgcttcaacacgctcgttcctcttatttttttccttagagacgtcctgagcgcccacttcggccgtatacattga

SEQ ID NO: 5014 - DNA, 168 bp, synthetic construct
  misc_feature 1..168: note = Synthetic
  source 1..168: mol_type = other DNA
atgagtagttcaagtaacgagcccacccctaagcccaagccccctgctcccatgactcaggaggagtttaacaaagaagtagagaaacgaagagaacaaaaaaaggaaaaatctagaaccgttgaacgtgagtcagaaaccgactcggtccgcactagcctgaggtaa

SEQ ID NO: 5015 - DNA, 126 bp, synthetic construct
  misc_feature 1..126: note = Synthetic
  source 1..126: mol_type = other DNA
aggatgatacattggaaatatctcccctgttttacagaacaagcaataagacaagccctgctaggaaagagactaacagtgtgctacttccactggggacatacgactcggtccgcactagcctga

SEQ ID NO: 5016 - DNA, 105 bp, synthetic construct
  source 1..105: mol_type = other DNA
  misc_feature 1..105: note = Synthetic
acggacatcaaagacgaattaaaaaaaatcaaatcagtcttaactatgatcgaccaaattaattctttgaccaacgagaaaacgtatcgactcggtccgcactag

SEQ ID NO: 5017 - DNA, 75 bp, synthetic construct
  misc_feature 1..75: note = Synthetic
  source 1..75: mol_type = other DNA
gtgcatatccagcagaacatcatgaaaataatgggtactgtaaaagcggtgccagtcggcatactccgccgatga

SEQ ID NO: 5018 - DNA, 75 bp, synthetic construct
  misc_feature 1..75: note = Synthetic
  source 1..75: mol_type = other DNA
gtgcatatccagcagaacatcatgaaaataatgggtactgtaaaagcggtgccagtcggcatactccgtggatga

SEQ ID NO: 5019 - DNA, 198 bp, synthetic construct
  source 1..198: mol_type = other DNA
  misc_feature 1..198: note = Synthetic
acgcgtattcaccgacccccccctcgcaacatgacaacgacgcccctctcgaacctgtttttacgggccccggacatcacccacgtcgcccccccgtactgtctgaatgccacgtggcaggccgaaaacgccctgcacacgaccaaaacggaccccgcgtgcctggccgccgactcggtccgcactagcctgaggtaa

SEQ ID NO: 5020 - DNA, 162 bp, synthetic construct
  misc_feature 1..162: note = Synthetic
  source 1..162: mol_type = other DNA
acgacgcccctctcgaacctgtttttacgggccccggacatcacccacgtcgcccccccgtactgtctgaatgccacgtggcaggccgaaaacgccctgcacacgaccaaaacggaccccgcgtgcctggccgccgactcggtccgcactagcctgaggtaa

SEQ ID NO: 5021 - DNA, 207 bp, synthetic construct
  source 1..207: mol_type = other DNA
  misc_feature 1..207: note = Synthetic
atgtccgattttttaaaaattggatgtctgcgttataatgagaatcgtcggttgcatacgcaatggtttacgcaagatacggactatattaagcaggtggatgagatgttttctagagacgtcctctgtcctctccgtgagcactgtcagaggtcgcgccgagagcgaggattattaaagatatcgactcggtccgcactagcctga

SEQ ID NO: 5022 - DNA, 225 bp, synthetic construct
  misc_feature 1..225: note = Synthetic
  source 1..225: mol_type = other DNA
ctggccatcttagggcccctccacatactccaggcctcgctcctacgcatcccttactttgtgagggcacaagcgctggttaagatctgcagcttgttgcgtggggtagtttatggcaagtacttccaaatggtcgtgcttaaaagcaggggcctgactggtacttacatctatgaccaccttactcccatgtcagacgactcggtccgcactagcctgaggtaa

SEQ ID NO: 5023 - DNA, 48 bp, synthetic construct
  source 1..48: mol_type = other DNA
  misc_feature 1..48: note = Synthetic
atgaccaccttactcccatgtcagacgactcggtccgcactagcctga

SEQ ID NO: 5024 - DNA, 225 bp, synthetic construct
  source 1..225: mol_type = other DNA
  misc_feature 1..225: note = Synthetic
ctggccatcttagggcccctccacatactccaggcctcgctcctacgcatcccttactttgtgagggcacaagcgctggttaagatctgcagcttgttgcgtggggtagtttatggcaagtacttccaagccgtcgtgcttaaaagcaggggcctgactggtacttacatctatgaccaccttactcccatgtcagacgactcggtccgcactagcctgaggtaa

SEQ ID NO: 5025 - DNA, 45 bp, synthetic construct
  source 1..45: mol_type = other DNA
  misc_feature 1..45: note = Synthetic
atggcaagtacttccaagccgtcgtgcttaaaagcaggggcctga

SEQ ID NO: 5026 - DNA, 90 bp, synthetic construct
  misc_feature 1..90: note = Synthetic
  source 1..90: mol_type = other DNA
atgtcaaacattttgtatccaaagtgttacacactgtcatggaagcatgtggcgtactgttttcatacattaaagttaatgacaaaatag

SEQ ID NO: 5027 - DNA, 138 bp, synthetic construct
  misc_feature 1..138: note = Synthetic
  source 1..138: mol_type = other DNA
aggagtcttcccaggatggcgaacaacaagaaactggtttccgtcttcacggacttcgttgctttccagtttagcaatacgcttactcccatccgagataacaccttcgtaatactcacgctgctcgttgagttttga

SEQ ID NO: 5028 - DNA, 150 bp, synthetic construct
  misc_feature 1..150: note = Synthetic
  source 1..150: mol_type = other DNA
gtgcttgataacaggagtcttcccaggatggcgaacaacaagaaactggtttccgtcttcacggacttcgttgctttccagtttagcaatacgcttactcccatccgagataacaccttcgtaatactcacgctgctcgttgagttttga

SEQ ID NO: 5029 - DNA, 45 bp, synthetic construct
  source 1..45: mol_type = other DNA
  misc_feature 1..45: note = Synthetic
atgctgctgccgttgaggaatacgaagctaatccacctgctgtag

SEQ ID NO: 5030 - DNA, 33 bp, synthetic construct
  misc_feature 1..33: note = Synthetic
  source 1..33: mol_type = other DNA
ttgaggaatacgaagctaatccacctgctgtag

SEQ ID NO: 5031 - DNA, 201 bp, synthetic construct
  misc_feature 1..201: note = Synthetic
  source 1..201: mol_type = other DNA
gtggatcccgtggcggctcctgaaaaagactgtatgcccaaggccagacggcagcgaactcgtcgcacacgcagcaacagaccaccaacaccatggcccactttccaggtttcggacagagcctcctctatggatacccagtctacgtgtttggcgattgtgttcaagccgatcgactcggtccgcactagcctgaggtaa

SEQ ID NO: 5032 - DNA, 201 bp, synthetic construct
  source 1..201: mol_type = other DNA
  misc_feature 1..201: note = Synthetic
gtggatcccgtggcggctcctgaaaaagactgtatgcccaaggccagacggcagcgaactcgtcgcacacgcagcaacagaccaccaacaccatggccgctcccttctgcgctgctccttctcctcgcgttgtttcagaatttccatgatttccttctgctcttccgccagcgcgactcggtccgcactagcctgaggtaa

SEQ ID NO: 5033 - DNA, 81 bp, synthetic construct
  source 1..81: mol_type = other DNA
  misc_feature 1..81: note = Synthetic
acgcagcaacagaccaccaacaccatggccgctcccttctgcgctgctccttctcctcgcgttgtttcagaatttccatga

SEQ ID NO: 5034 - DNA, 18 bp, synthetic construct
  misc_feature 1..18: note = Synthetic
  source 1..18: mol_type = other DNA
atggttggatctacctga

SEQ ID NO: 5035 - DNA, 147 bp, synthetic construct
  misc_feature 1..147: note = Synthetic
  source 1..147: mol_type = other DNA
atggccagactcataacaattcatctcaaagaggtaatagaaatcctaaaaggccaatcatcagatcatgacaccctattatttacttcatacaatgtaggtcccctcgggaaaataaacgactcggtccgcactagcctgaggtaa

SEQ ID NO: 5036 - DNA, 147 bp, synthetic construct
  source 1..147: mol_type = other DNA
  misc_feature 1..147: note = Synthetic
atggccagactcataacaattcatctcaaagaggtaatagaaatcctaaaaggccaatcatcagatcatgacaccctattatttacttcatacagcctaggtcccctcgggaaaataaacgactcggtccgcactagcctgaggtaa

SEQ ID NO: 5037 - DNA, 183 bp, synthetic construct
  source 1..183: mol_type = other DNA
  misc_feature 1..183: note = Synthetic
ctgccgttttttcagatggctcttacttgccgaatgcgcatacccattccaggatacagaggacgaccccgccggaggaaagggctgaccgggaacggtcgatttcggcggcgtagtatgcgcagacgcatgaagggtggggtgctgcccttcctcgactcggtccgcactagcctgaggtaa

SEQ ID NO: 5038 - DNA, 150 bp, synthetic construct
  misc_feature 1..150: note = Synthetic
  source 1..150: mol_type = other DNA
atgcgcatacccattccaggatacagaggacgaccccgccggaggaaagggctgaccgggaacggtcgatttcggcggcgtagtatgcgcagacgcatgaagggtggggtgctgcccttcctcgactcggtccgcactagcctgaggtaa

SEQ ID NO: 5039 - DNA, 45 bp, synthetic construct
  source 1..45: mol_type = other DNA
  misc_feature 1..45: note = Synthetic
gtggattttgtagttacgcgcgtgtatctcacgttaactaattag

SEQ ID NO: 5040 - DNA, 69 bp, synthetic construct
  misc_feature 1..69: note = Synthetic
  source 1..69: mol_type = other DNA
atttcggcgctgtgcgcccagcgagccaccaagacgggtagactgttgtcaaatgtagcaacctcataa

SEQ ID NO: 5041 - DNA, 27 bp, synthetic construct
  source 1..27: mol_type = other DNA
  misc_feature 1..27: note = Synthetic
atgtcgccatcagacatttcgtattaa

SEQ ID NO: 5042 - DNA, 168 bp, synthetic construct
  source 1..168: mol_type = other DNA
  misc_feature 1..168: note = Synthetic
atggccagttccagcaattataatacgtatatgcaatacctgaaccctcccccttatgctgatcatggtgcaaatcagttaatcccagcagaccagctatcaaatcaacatggtataactccgaattatgtgggcgacttcgactcggtccgcactagcctgaggtaa

SEQ ID NO: 5043 - DNA, 15 bp, synthetic construct
  source 1..15: mol_type = other DNA
  misc_feature 1..15: note = Synthetic
attcgtttttgttga

SEQ ID NO: 5044 - DNA, 144 bp, synthetic construct
  source 1..144: mol_type = other DNA
  misc_feature 1..144: note = Synthetic
acgtatatgcaatacctgaaccctcccccttatgctgatcatggtgcaaatcagttaatcccagcagaccagctatcaaatcaacatggtataactccgaattatgtgggcgacttcgactcggtccgcactagcctgaggtaa

SEQ ID NO: 5045 - DNA, 207 bp, synthetic construct
  misc_feature 1..207: note = Synthetic
  source 1..207: mol_type = other DNA
ttggagtacctcttcgtggtctcgctgtatcggctcgttgtcatgcgtgcacactggcgctttcgcgagttcgtgagcaagatgattaactgctttctcgagggcttcggcgtttgcttctgcgccatgcgcgtgaacgactgcgtggacaacgagctcgcagaatacatgcaggacaacggcgcgactcggtccgcactagcctga

SEQ ID NO: 5046 - DNA, 192 bp, synthetic construct
  misc_feature 1..192: note = Synthetic
  source 1..192: mol_type = other DNA
gtgcgcagacgaatggctgagtttatgccgctggtggtagacacgaacagagctgagtgtctaaccgcctgggcgggtgccggagctcctgagagcggagtcaaggggcctatcgggcaggcggtaatccagcggaaccgggcccccctcgatggaagaaagatggctgacggtcgactcggtccgcactag

SEQ ID NO: 5047 - DNA, 213 bp, synthetic construct
  misc_feature 1..213: note = Synthetic
  source 1..213: mol_type = other DNA
acggtaaacaacacttttatttttgagcacatgtgcaataccgccatgttcatgagcaggcagtaccatatgtggcccccacggaaagagaatatcgtggtcttctccatcgcttacagcttgtgcacggtgctaatcaccgcgatcgtgtgcctgagcattcacatgctcatcgctattcgccccagaacgactcggtccgcactagcctga

SEQ ID NO: 5048 - DNA, 42 bp, synthetic construct
  misc_feature 1..42: note = Synthetic
  source 1..42: mol_type = other DNA
atgattgtagcgttaaaaacatcaatagatgggaatagataa

SEQ ID NO: 5049 - DNA, 48 bp, synthetic construct
  misc_feature 1..48: note = Synthetic
  source 1..48: mol_type = other DNA
atgggaatagataaaatggctgatgtttaccttctatatctaacatga

SEQ ID NO: 5050 - DNA, 171 bp, synthetic construct
  source 1..171: mol_type = other DNA
  misc_feature 1..171: note = Synthetic
ttgaaacaatacctacgtaacctggcctttgcgtggcgctatcgcaaggtccggtcgtcgccaccagcaacgccctgtatgagctgtttcgacgtcggttaccgcgtgcccccgtcaacacggtcatgtttctcacgcgacgcactcgtgatgggttctgcggtcggttga

SEQ ID NO: 5051 - DNA, 195 bp, synthetic construct
  source 1..195: mol_type = other DNA
  misc_feature 1..195: note = Synthetic
gtggcgctatcgcaaggtccggtcgtcgccaccagcaacgccctgtatgagctgtttcgacgtcggttaccgcgtgcccccgtcaacacggtcatgtttctcacgcgacgcactcgtgatgggttctgcggtcggttgacgtccatcgccacgaattcccactacaccgactcggtccgcactagcctgaggtaa

SEQ ID NO: 5052 - DNA, 126 bp, synthetic construct
  source 1..126: mol_type = other DNA
  misc_feature 1..126: note = Synthetic
ctggctcctggaaagcgtacgcagacaatacttttgacaccgcgccatgggtgccctctggtctctttgccgacgacgagtcaactccataggcgacgtggacgggggaataatcaacctgtataa

SEQ ID NO: 5053 - DNA, 168 bp, synthetic construct
  misc_feature 1..168: note = Synthetic
  source 1..168: mol_type = other DNA
atgggtgccctctggtctctttgccgacgacgagtcaactccataggcgacgtggacgggggaataatcaacctgtataatgactatgaggagtttaacctggagactactaagctaatagcggccgaagaagggagggccgactcggtccgcactagcctgaggtaa

SEQ ID NO: 5054 - DNA, 39 bp, synthetic construct
  misc_feature 1..39: note = Synthetic
  source 1..39: mol_type = other DNA
atgactatgaggagtttaacctggagactactaagctaa

SEQ ID NO: 5055 - DNA, 135 bp, synthetic construct
  source 1..135: mol_type = other DNA
  misc_feature 1..135: note = Synthetic
atgtataataagatcaagaactcacaaaatccaagtccgaatgtaaacttgcctcctccagaaacaagaaataccaggtttgtaaataatctggaaaaggatcatatcgactcggtccgcactagcctgaggtaa

SEQ ID NO: 5056 - DNA, 48 bp, synthetic construct
  source 1..48: mol_type = other DNA
  misc_feature 1..48: note = Synthetic
atgttgttaataaagtggaacaaactacaattgctgaccaaatattaa

SEQ ID NO: 5057 - DNA, 30 bp, synthetic construct
  source 1..30: mol_type = other DNA
  misc_feature 1..30: note = Synthetic
ttggcagcgactcggtccgcactagcctga

SEQ ID NO: 5058 - DNA, 153 bp, synthetic construct
  misc_feature 1..153: note = Synthetic
  source 1..153: mol_type = other DNA
atgtggccgcttctaaaaaacaacgtagtccggacgggtcgcagatacgcggtttttcaacctcgacggtttacgcctcgcccccaacatgacgcgttcgggacgaaagacgacgtcaggggattcgactcggtccgcactagcctgaggtaa

SEQ ID NO: 5059 - DNA, 195 bp, synthetic construct
  misc_feature 1..195: note = Synthetic
  source 1..195: mol_type = other DNA
atcggtgtccctgccgccggcctcgccatgaaagtcacacaggccagctgccaccagggcgacatcgctcgctttggagcgcgagcgggcaatcaatgcgtctgcaacggcatcatgttcctacacgccttgcacctgggtggaacgagcgccgtcctgcagaccgacgactcggtccgcactagcctgaggtaa

SEQ ID NO: 5060 - DNA, 219 bp, synthetic construct
  misc_feature 1..219: note = Synthetic
  source 1..219: mol_type = other DNA
ttgtccttactgtataaaagtccacgaaaacagctgtgcctcactctcgagatggtacacgtcctggagcgtgctttgctagagcagcagtcctctgcctgcggcctgcccggctcttctacggagaccaggcctagccacccctgccccgaggacccagacgtcagcagactaagactactcctggtggtcgactcggtccgcactagcctgaggtaa

SEQ ID NO: 5061 - DNA, 219 bp, synthetic construct
  source 1..219: mol_type = other DNA
  misc_feature 1..219: note = Synthetic
ttgtccttactgtataaaagtccacgaaaacagctgtgcctcactctcgaggccgtacacgtcctggagcgtgctttgctagagcagcagtcctctgcctgcggcctgcccggctcttctacggagaccaggcctagccacccctgccccgaggacccagacgtcagcagactaagactactcctggtggtcgactcggtccgcactagcctgaggtaa

SEQ ID NO: 5062 - DNA, 63 bp, synthetic construct
  source 1..63: mol_type = other DNA
  misc_feature 1..63: note = Synthetic
ttgaaacaatacctacgtaacctggcctttgcgtggcgctatcgcaaggtccggtcgtcatga

SEQ ID NO: 5063 - DNA, 168 bp, synthetic construct
  misc_feature 1..168: note = Synthetic
  source 1..168: mol_type = other DNA
atgaccagcaacgccctgtatgagctgtttcgacgtcggttaccgcgtgcccccgtcaacacggtcatgtttctcacgcgacgcactcgtgatgggttctgcggtcggttgacgtccatcgccacgaattcccactacaccgactcggtccgcactagcctgaggtaa

SEQ ID NO: 5064 - DNA, 102 bp, synthetic construct
  misc_feature 1..102: note = Synthetic
  source 1..102: mol_type = other DNA
acgccctgtatgagctgtttcgacgtcggttaccgcgtgcccccgtcaacacggtcatgtttctcacgcgacgcactcgtgatgggttctgcggtcggttga

SEQ ID NO: 5065 - DNA, 90 bp, synthetic construct
  misc_feature 1..90: note = Synthetic
  source 1..90: mol_type = other DNA
atgttctgcccttcaatctcaatttaccaccacttgattgtaccatcacctttccccttgacttactataacagagagcataacccttga

SEQ ID NO: 5066 - DNA, 117 bp, synthetic construct
  source 1..117: mol_type = other DNA
  misc_feature 1..117: note = Synthetic
ttgaactccacccagttgtccactgcctcaagaaccgcactcaagatcccctcacaactcggcgctgcagccctaagtgtggagacaatgtccacgactcggtccgcactagcctga

SEQ ID NO: 5067 - DNA, 117 bp, synthetic construct
  misc_feature 1..117: note = Synthetic
  source 1..117: mol_type = other DNA
ttgaactccacccagttgtccactgcctcaagaaccgcactcaaggccccctcacaactcggcgctgcagccctaagtgtggagacaatgtccacgactcggtccgcactagcctga

SEQ ID NO: 5068 - DNA, 51 bp, synthetic construct
  source 1..51: mol_type = other DNA
  misc_feature 1..51: note = Synthetic
atctcgccccgcttgtttctacacttgtccgcccctctattcttactctag

SEQ ID NO: 5069 - DNA, 27 bp, synthetic construct
  misc_feature 1..27: note = Synthetic
  source 1..27: mol_type = other DNA
ttgacgactcggtccgcactagcctga

SEQ ID NO: 5070 - DNA, 12 bp, synthetic construct
  misc_feature 1..12: note = Synthetic
  source 1..12: mol_type = other DNA
atggctttatga

SEQ ID NO: 5071 - DNA, 60 bp, synthetic construct
  source 1..60: mol_type = other DNA
  misc_feature 1..60: note = Synthetic
atagataccagcaaatccgaaggccagacgggcacactgaatcgccgctttatgacgtaa

SEQ ID NO: 5072 - DNA, 123 bp, synthetic construct
  source 1..123: mol_type = other DNA
  misc_feature 1..123: note = Synthetic
aaggtgatcagaacagaaaggccattaagtgcaggtgtctatatgggcaacctaagctcacagcaacttgaccaaagaagagctctcgccaatatcgactcggtccgcactagcctgaggtaa

SEQ ID NO: 5073 - DNA, 18 bp, synthetic construct
  source 1..18: mol_type = other DNA
  misc_feature 1..18: note = Synthetic
atgagtatgtcaaaatag

SEQ ID NO: 5074 - DNA, 72 bp, synthetic construct
  misc_feature 1..72: note = Synthetic
  source 1..72: mol_type = other DNA
attttggccaccagtcccttttccaggaaagggtactccacagccttgacgactcggtccgcactagcctga

SEQ ID NO: 5075 - DNA, 186 bp, synthetic construct
  source 1..186: mol_type = other DNA
  misc_feature 1..186: note = Synthetic
acgcaaatgccggacaagcaggggttttggtcaggccgagaactcggaagctgcagggctgtagatggacccatgccttggttcgcacgtgctcaaacttctagcgacgaagcagcgggtctgaccgcacgcggggacaaccagaaagttaagtctgttccaacgactcggtccgcactagcctga

SEQ ID NO: 5076 - DNA, 168 bp, synthetic construct
  source 1..168: mol_type = other DNA
  misc_feature 1..168: note = Synthetic
atgcaggcgcaggaggctaacgcgctgctgctctcccgcatggaggctctcgagtggttcaaaaagttcaccgtatggctgcgcgtgtacgccatcttcatctttcagctggctttcagcttcggcttgggaagcgttttcgactcggtccgcactagcctgaggtaa

SEQ ID NO: 5077 - DNA, 144 bp, synthetic construct
  source 1..144: mol_type = other DNA
  misc_feature 1..144: note = Synthetic
ctgctgctctcccgcatggaggctctcgagtggttcaaaaagttcaccgtatggctgcgcgtgtacgccatcttcatctttcagctggctttcagcttcggcttgggaagcgttttcgactcggtccgcactagcctgaggtaa

SEQ ID NO: 5078 - DNA, 123 bp, synthetic construct
  source 1..123: mol_type = other DNA
  misc_feature 1..123: note = Synthetic
aaggtgatcagaacagaaaggccattaagtgcaggtgtctatatgggcaacctaagctcacagcaacttgaccaaagaagagctctcctgaatatcgactcggtccgcactagcctgaggtaa

SEQ ID NO: 5079 - DNA, 15 bp, synthetic construct
  misc_feature 1..15: note = Synthetic
  source 1..15: mol_type = other DNA
atgggccagcattaa

SEQ ID NO: 5080 - DNA, 12 bp, synthetic construct
  source 1..12: mol_type = other DNA
  misc_feature 1..12: note = Synthetic
ctggcactttaa

SEQ ID NO: 5081 - DNA, 21 bp, synthetic construct
  source 1..21: mol_type = other DNA
  misc_feature 1..21: note = Synthetic
gtgcgaaaatcaatgctttaa

SEQ ID NO: 5082 - DNA, 204 bp, synthetic construct
  misc_feature 1..204: note = Synthetic
  source 1..204: mol_type = other DNA
atgactctgtccgccagcagacctcggtacattcccgggaaggcgtatcgcaatctaacaaaaaatgatatggagaacatgctagacaattgggagatttcgcgcaccaatcttaagacttgcaaagaactacgtaaagccctcaccgaggcctcgagagcaaggcggaaacaaacaatttcgactcggtccgcactagcctga

SEQ ID NO: 5083 - DNA, 204 bp, synthetic construct
  misc_feature 1..204: note = Synthetic
  source 1..204: mol_type = other DNA
atgactttgtccgccagcaaacctcggtacatcccgggaaaggcgtatcgcaatctaacaaaaaatgatctggagaacatgctagacaattgggagatttcgcgcaccaatcttaagacttgtaaagaactacgtaaagccctcaccgaggcctcgagagcaaggcggaaacaaacaatttcgactcggtccgcactagcctga

SEQ ID NO: 5084 - DNA, 18 bp, synthetic construct
  source 1..18: mol_type = other DNA
  misc_feature 1..18: note = Synthetic
acgacgcccagctgttga

SEQ ID NO: 5085 - DNA, 168 bp, synthetic construct
  misc_feature 1..168: note = Synthetic
  source 1..168: mol_type = other DNA
atgatcgtcttaccgaataaagttcgtattttcatcaatgatcggatgaaaaaggatatctacttgggaatttctaatttcggattcgagaatgatatagatgaaatcttgggaattgctcacttgttggaacatctactcgactcggtccgcactagcctgaggtaa

SEQ ID NO: 5086 - DNA, 63 bp, synthetic construct
  source 1..63: mol_type = other DNA
  misc_feature 1..63: note = Synthetic
atgaaatcttgggaattgctcacttgttggaacatctactcgactcggtccgcactagcctga

SEQ ID NO: 5087 - DNA, 123 bp, synthetic construct
  misc_feature 1..123: note = Synthetic
  source 1..123: mol_type = other DNA
atgaaaaaggatatctacttgggaatttctaatttcggattcgagaatgatatagatgaaatcttgggaattgctcacttgttggaacatctactcgactcggtccgcactagcctgaggtaa

SEQ ID NO: 5088 - DNA, 168 bp, synthetic construct
  source 1..168: mol_type = other DNA
  misc_feature 1..168: note = Synthetic
atgatatcttacagggagacctcgactcagacggaatgctcacggaaagagcttatgagagaattactggagataatagatgtgaccagccaaccagaatgggggatgtcccccatagggtcccccccagaaagcgagtccgactcggtccgcactagcctgaggtaa

SEQ ID NO: 5089 - DNA, 165 bp, synthetic construct
  source 1..165: mol_type = other DNA
  misc_feature 1..165: note = Synthetic
atatcttacagggagacctcgactcagacggaatgctcacggaaagagcttatgagagaattactggagataatagatgtgaccagccaaccagaatgggggatgtcccccatagggtcccccccagaaagcgagtccgactcggtccgcactagcctgaggtaa

SEQ ID NO: 5090 - DNA, 192 bp, synthetic construct
  misc_feature 1..192: note = Synthetic
  source 1..192: mol_type = other DNA
aggctgccctgctccactatgttgaccctgataccggtcggaatcttggggaattcaaagcataccctgatggtttcctcacttgtgtccccaatggggctagctcgggtccacaacagctgccgatcaatggggtctttgtctttgtttcatgggtgtccagattttacgactcggtccgcactagcctga

SEQ ID NO: 5091 - DNA, 168 bp, synthetic construct
  misc_feature 1..168: note = Synthetic
  source 1..168: mol_type = other DNA
atgcccaagaccagacgccagcgaactcgccgagcacgccgcaacagaccaccaacaccatggcccatttcccaggatttggacagagcctcctatatggataccccgtctacgtgtttggcgattgtgtacaggccgatcgactcggtccgcactagcctgaggtaa

SEQ ID NO: 5092 - DNA, 201 bp, synthetic construct
  misc_feature 1..201: note = Synthetic
  source 1..201: mol_type = other DNA
gtggatcccgtggcgattcctgaaaaaagctgcgcccccaagaccagacgccagcgaactcgccgagcacgccgcaacagaccaccaacaccatggcccatttcccaggatttggacagagcctcctatatggataccccgtctacgtgtttggcgattgtgtacaggccgatcgactcggtccgcactagcctgaggtaa

SEQ ID NO: 5093 - DNA, 123 bp, synthetic construct
  source 1..123: mol_type = other DNA
  misc_feature 1..123: note = Synthetic
atgtcgaacacctcctgctttgcacgcgtgtggttgcttgcatgttctctttgttcctgcggaacgcgcatggttgtgcttgttctctttaacgcgtgcgcgactcggtccgcactagcctga

SEQ ID NO: 5094 - DNA, 177 bp, synthetic construct
  misc_feature 1..177: note = Synthetic
  source 1..177: mol_type = other DNA
ctgccatccatggaggtttgggctatcttggaagacctcagacagactaagctactgctagaaaacgcctcggacggagtctctggcctttggagattctggttcggtggtgatctagctaggctagtgtttaggataaaacaggactacgactcggtccgcactagcctgaggtaa

SEQ ID NO: 5095 - DNA, 57 bp, synthetic construct
  misc_feature 1..57: note = Synthetic
  source 1..57: mol_type = other DNA
ttggctactctgctcgattaccccgtgaataactgggcggggggtgacccaacatag

SEQ ID NO: 5096 - DNA, 69 bp, synthetic construct
  source 1..69: mol_type = other DNA
  misc_feature 1..69: note = Synthetic
atggagttttcttatggattattaagggtcagcttgaaggacgactcggtccgcactagcctgaggtaa

SEQ ID NO: 5097 - DNA, 75 bp, synthetic construct
  misc_feature 1..75: note = Synthetic
  source 1..75: mol_type = other DNA
atttatacgatgataacgacatacgaacattacttcctattttactccttagtaaatgattgtcttaccgaataa

SEQ ID NO: 5098 - DNA, 75 bp, synthetic construct
  misc_feature 1..75: note = Synthetic
  source 1..75: mol_type = other DNA
atttatacgatgataacgacatacgaacattacttcctattttactccttagtaagccattgtcttaccgaataa

SEQ ID NO: 5099 - DNA, 24 bp, synthetic construct
  source 1..24: mol_type = other DNA
  misc_feature 1..24: note = Synthetic
ctggcagaaccactgcagcagtag

SEQ ID NO: 5100 - DNA, 219 bp, synthetic construct
  source 1..219: mol_type = other DNA
  misc_feature 1..219: note = Synthetic
ttgtcctgtttgtctcgcgcatacgaaattttcacaagactgagacgaagaatggcaaccgcaaggctgagcgctatgaaaccgccgagatcttgtgcgctgatatttttgtgcgcgttttcgatggcgacggccccaacgaacgctacggcccaccgacgtgcgggaaccgtgaaatccacaccgcctcccgactcggtccgcactagcctgaggtaa

SEQ ID NO: 5101 - DNA, 219 bp, synthetic construct
  source 1..219: mol_type = other DNA
  misc_feature 1..219: note = Synthetic
ttgtcctgtttgtctcgcgcatacgaaattttcacaagactgagacgaagagccgcaaccgcaaggctgagcgctatgaaaccgccgagatcttgtgcgctgatatttttgtgcgcgttttcgatggcgacggccccaacgaacgctacggcccaccgacgtgcgggaaccgtgaaatccacaccgcctcccgactcggtccgcactagcctgaggtaa

SEQ ID NO: 5102 - DNA, 168 bp, synthetic construct
  source 1..168: mol_type = other DNA
  misc_feature 1..168: note = Synthetic
atgaagaccaatccgctacccgcaaccccttccgtgtggggcgggagtaccgtggaactcccccccacaacacgcgataccgcgggacagggcctgcttcggcgcgtcctgcgccccccgatctctcgccgcgacggccccgactcggtccgcactagcctgaggtaa

SEQ ID NO: 5103 - DNA, 87 bp, synthetic construct
  source 1..87: mol_type = other DNA
  misc_feature 1..87: note = Synthetic
ataccgcgggacagggcctgcttcggcgcgtcctgcgccccccgatctctcgccgcgacggccccgactcggtccgcactagcctga

SEQ ID NO: 5104 - DNA, 84 bp, synthetic construct
  source 1..84: mol_type = other DNA
  misc_feature 1..84: note = Synthetic
atgcataggattcagtcgctgattcgccctagccacgaaattcagatcacctctaactgcttttatcatacaatcctcttgtga

SEQ ID NO: 5105 - DNA, 117 bp, synthetic construct
  source 1..117: mol_type = other DNA
  misc_feature 1..117: note = Synthetic
acgaaattcagatcacctctaactgcttttatcatacaatcctcttgtgaaaataccatggccacaattattgcttcggcaatcgactgttcgtctctcccactcactatcagctga

SEQ ID NO: 5106 - DNA, 84 bp, synthetic construct
  misc_feature 1..84: note = Synthetic
  source 1..84: mol_type = other DNA
atgcataggattcagtcgctgattcgccctattgacgaaattcagatcacctctaactgcttttatcatacaatcctcttgtga

SEQ ID NO: 5107 - DNA, 120 bp, synthetic construct
  source 1..120: mol_type = other DNA
  misc_feature 1..120: note = Synthetic
ttgacgaaattcagatcacctctaactgcttttatcatacaatcctcttgtgaaaataccatggccacaattattgcttcggcaatcgactgttcgtctctcccactcactatcagctga

SEQ ID NO: 5108 - DNA, 87 bp, synthetic construct
  source 1..87: mol_type = other DNA
  misc_feature 1..87: note = Synthetic
ttgatgcataggattcagtcgctgattcgccctattgacgaaattcagatcacctctaactgcttttatcatacaatcctcttgtga

SEQ ID NO: 5109 - DNA, 33 bp, synthetic construct
  source 1..33: mol_type = other DNA
  misc_feature 1..33: note = Synthetic
ctgaattaccactactttagactgcgctggtga

SEQ ID NO: 5110 - DNA, 168 bp, synthetic construct
  source 1..168: mol_type = other DNA
  misc_feature 1..168: note = Synthetic
atgtccctattttaccgtgcggtagctctgggcacactaagcgctctggtgtggtacagcactagtatcctcgcagagattaacgaaaattcctgctcctcatcttctgtggaccacgaagattgcgaggaaccggacgacgactcggtccgcactagcctgaggtaa

SEQ ID NO: 5111 - DNA, 177 bp, synthetic construct
  source 1..177: mol_type = other DNA
  misc_feature 1..177: note = Synthetic
ctggtgatcgcctccctattttaccgtgcggtagctctgggcacactaagcgctctggtgtggtacagcactagtatcctcgcagagattaacgaaaattcctgctcctcatcttctgtggaccacgaagattgcgaggaaccggacgacgactcggtccgcactagcctgaggtaa

SEQ ID NO: 5112 - DNA, 21 bp, synthetic construct
  misc_feature 1..21: note = Synthetic
  source 1..21: mol_type = other DNA
atgttactgaagaatatatag

SEQ ID NO: 5113 - DNA, 213 bp, synthetic construct
  misc_feature 1..213: note = Synthetic
  source 1..213: mol_type = other DNA
gtgtttatatttttaacaataacactaagtaacgatatggcaaatcttgttaccggaataaacgatctaatatgtagtattatttttttaatagtatacacagttgtaatgttaacttctatatgcttttctgtgtttgttgtagcaatagttgttgattttttattagaagcaaaagaaaaaaattcatttttacgactcggtccgcactag

SEQ ID NO: 5114 - DNA, 207 bp, synthetic construct
  misc_feature 1..207: note = Synthetic
  source 1..207: mol_type = other DNA
atgtcagattttttaaaaattggatgtctgcgttataatgagaatcgtcggttgcatacgcaatggtttacgcaagatacggactatattaagcaggtggatgagatgttttctagagacgtcctctgtcctctccgtgagcactgtcagaggtcgcgccgggatcgaggattattaaagatatcgactcggtccgcactagcctga

SEQ ID NO: 5115 - DNA, 48 bp, synthetic construct
  misc_feature 1..48: note = Synthetic
  source 1..48: mol_type = other DNA
attttaatgatttgctcatccgcctttgagccatcgcttaggagttag

SEQ ID NO: 5116 - DNA, 135 bp, synthetic construct
  source 1..135: mol_type = other DNA
  misc_feature 1..135: note = Synthetic
atgttctcggcccaccttttcgactacagtagcaaacccttgtactaccaccccgataaaaaccacatcatcatcgtcaccacgacctggaaacgacacacgttccccgactcggtccgcactagcctgaggtaa

SEQ ID NO: 5117 - DNA, 165 bp, synthetic construct
  misc_feature 1..165: note = Synthetic
  source 1..165: mol_type = other DNA
aagaccaatccgctacccgcaaccccttccgtgtggggcgggagtaccgtggaactcccccccacaacacgcgataccgcgggacagggcctgcttcggcgcgtcctgcgccccccgatctctcgccgcgacggccccgactcggtccgcactagcctgaggtaa

SEQ ID NO: 5118 - DNA, 21 bp, synthetic construct
  misc_feature 1..21: note = Synthetic
  source 1..21: mol_type = other DNA
atggaattggacaccacttga

SEQ ID NO: 5119 - DNA, 75 bp, synthetic construct
  source 1..75: mol_type = other DNA
  misc_feature 1..75: note = Synthetic
atgtgcttaacagccgatatactaggggactgttcacaagcatcatgctccacgactcggtccgcactagcctga

SEQ ID NO: 5120 - DNA, 15 bp, synthetic construct
  source 1..15: mol_type = other DNA
  misc_feature 1..15: note = Synthetic
ttggacaccacttga

SEQ ID NO: 5121 - DNA, 126 bp, synthetic construct
  source 1..126: mol_type = other DNA
  misc_feature 1..126: note = Synthetic
gtgttttacaaaggtcggattttgactcaagcattaaagaacgtgagcaagatgtgcttaacagccgatatactaggggactgttcacaagcatcatgctccacgactcggtccgcactagcctga

SEQ ID NO: 5122 - DNA, 51 bp, synthetic construct
  source 1..51: mol_type = other DNA
  misc_feature 1..51: note = Synthetic
atggacaacctggggaaatattgccagcatggcaggaccctttgtacctaa

SEQ ID NO: 5123 - DNA, 30 bp, synthetic construct
  misc_feature 1..30: note = Synthetic
  source 1..30: mol_type = other DNA
atgccgaagttgtgtgtgcatttgatttag

SEQ ID NO: 5124 - DNA, 189 bp, synthetic construct
  misc_feature 1..189: note = Synthetic
  source 1..189: mol_type = other DNA
atattgtggggcaacaacacaatgggcgttacaggaatattgcagttacctcgtgatcgattcaagaggacatcattctttctttgggtaattatccttttccaaagaacattttccatcccacttggagtcatccacaatagcacattacaggttagtgacgactcggtccgcactagcctgaggtaa

SEQ ID NO: 5125 - DNA, 207 bp, synthetic construct
  misc_feature 1..207: note = Synthetic
  source 1..207: mol_type = other DNA
ataaactccactagaaggatattgtggggcaacaacacagccggcgttacaggaatattgcagttacctcgtgatcgattcaagaggacatcattctttctttgggtaattatccttttccaaagaacattttccatcccacttggagtcatccacaatagcacattacaggttagtgacgactcggtccgcactagcctgaggtaa

SEQ ID NO: 5126 - DNA, 24 bp, synthetic construct
  misc_feature 1..24: note = Synthetic
  source 1..24: mol_type = other DNA
ttggacacaattagagctcagtga

SEQ ID NO: 5127 - DNA, 192 bp, synthetic construct
  misc_feature 1..192: note = Synthetic
  source 1..192: mol_type = other DNA
gtgacccagaagacgaggcagacagccgaggcactcaacgctcgtttcaatgtactacaagagatgttaatggacatttatgaatcagggaaagaggatcttgaaacacaaatagaacattggaaactgttaagacaggaacaagctttattattttttgcacgcgactcggtccgcactagcctgaggtaa

SEQ ID NO: 5128 - DNA, 198 bp, synthetic construct
  source 1..198: mol_type = other DNA
  misc_feature 1..198: note = Synthetic
atggacagtgttgatcggctcaagacttacttagctacttatgataatttggattctgccttgcaggatgccaatgaatctgaagaaagacgagaggataaatatctccaagacctcttcatcgaagatcaaggagataaaccaactccgtcatattatcaggaagaagaatcgtcagatcgactcggtccgcactag

SEQ ID NO: 5129 - DNA, 141 bp, synthetic construct
  source 1..141: mol_type = other DNA
  misc_feature 1..141: note = Synthetic
atgccaatgaatctgaagaaagacgagaggataaatatctccaagacctcttcatcgaagatcaaggagataaaccaactccgtcatattatcaggaagaagaatcgtcagatcgactcggtccgcactagcctgaggtaa

SEQ ID NO: 5130 - DNA, 198 bp, synthetic construct
  misc_feature 1..198: note = Synthetic
  source 1..198: mol_type = other DNA
atggacagtgttgatcggctcaagacttacttagctacttgccataatttggattctgccttgcaggatgccaatgaatctgaagaaagacgagaggataaatatctccaagacctcttcatcgaagatcaaggagataaaccaactccgtcatattatcaggaagaagaatcgtcagatcgactcggtccgcactag

SEQ ID NO: 5131 - DNA, 135 bp, synthetic construct
  source 1..135: mol_type = other DNA
  misc_feature 1..135: note = Synthetic
atgaatctgaagaaagacgagaggataaatatctccaagacctcttcatcgaagatcaaggagataaaccaactccgtcatattatcaggaagaagaatcgtcagatcgactcggtccgcactagcctgaggtaa

SEQ ID NO: 5132 - DNA, 36 bp, synthetic construct
  misc_feature 1..36: note = Synthetic
  source 1..36: mol_type = other DNA
atggaagacagtaacaaaaacagtaaaaaaacttag

SEQ ID NO: 5133 - DNA, 39 bp, synthetic construct
  source 1..39: mol_type = other DNA
  misc_feature 1..39: note = Synthetic
ctgtgcaaaatcacgacgaatacagtaaagaagcggtaa

SEQ ID NO: 5134 - DNA, 168 bp, synthetic construct
  misc_feature 1..168: note = Synthetic
  source 1..168: mol_type = other DNA
aagaagaccaatccgctacccgcaaccccttccgtgtggggcgggagtaccgtggaactcccccccacaacacgcgataccgcgggacagggcctgcttcggcgcgtcctgcgccccccgatctctcgccgcgacggccccgactcggtccgcactagcctgaggtaa

SEQ ID NO: 5135 - DNA, 168 bp, synthetic construct
  source 1..168: mol_type = other DNA
  misc_feature 1..168: note = Synthetic
atgaacaccaatccgctacccgcaaccccttccgtgtggggcgggagtaccgtggaactcccccccacaacacgcgataccgcgggacagggcctgcttcggcgcgtcctgcgccccccgatctctcgccgcgacggccccgactcggtccgcactagcctgaggtaa

SEQ ID NO: 5136 - DNA, 75 bp, synthetic construct
  source 1..75: mol_type = other DNA
  misc_feature 1..75: note = Synthetic
atacatatgaacgtagatcctaataatataataccgacgttagaaaacgactcggtccgcactagcctgaggtaa

SEQ ID NO: 5137 - DNA, 57 bp, synthetic construct
  source 1..57: mol_type = other DNA
  misc_feature 1..57: note = Synthetic
atctctcgtctaaatacgttacatttacaaaaaatgttattacgtctgatgccgtag

SEQ ID NO: 5138 - DNA, 81 bp, synthetic construct
  source 1..81: mol_type = other DNA
  misc_feature 1..81: note = Synthetic
attatgatacatatgaacgtagatcctaataatataataccgacgttagaaaacgactcggtccgcactagcctgaggtaa

SEQ ID NO: 5139 - DNA, 24 bp, synthetic construct
  misc_feature 1..24: note = Synthetic
  source 1..24: mol_type = other DNA
atgttattgcgtctgatgccgtag

SEQ ID NO: 5140 - DNA, 12 bp, synthetic construct
  source 1..12: mol_type = other DNA
  misc_feature 1..12: note = Synthetic
ctgggtgtgtga

SEQ ID NO: 5141 - DNA, 24 bp, synthetic construct
  misc_feature 1..24: note = Synthetic
  source 1..24: mol_type = other DNA
ttggaggcaattagatctaagtga

SEQ ID NO: 5142 - DNA, 192 bp, synthetic construct
  source 1..192: mol_type = other DNA
  misc_feature 1..192: note = Synthetic
gtgaccaagaagacgagggtgaggatggaggctctcagcgaccgtttcaatgcactgcaagacaagttaatgacaatttatgaaagagctagtgaatccttaaaagatcaaattgaacattggaacttgttaagacaggagcaggtgttatttcattatgccagcgactcggtccgcactagcctgaggtaa

SEQ ID NO: 5143 - DNA, 168 bp, synthetic construct
  misc_feature 1..168: note = Synthetic
  source 1..168: mol_type = other DNA
atggaggcactcaacgctcgtttcaatgtactacaagagatgttaatggacatttatgaatcagggaaagaggatcttgaaacacaaatagaacattggaaactgttaagacaggaacaagctttattattttttgcacgcgactcggtccgcactagcctgaggtaa

SEQ ID NO: 5144 - DNA, 27 bp, synthetic construct
  source 1..27: mol_type = other DNA
  misc_feature 1..27: note = Synthetic
atgttagatgccagttatccattttaa

SEQ ID NO: 5145 - DNA, 123 bp, synthetic construct
  misc_feature 1..123: note = Synthetic
  source 1..123: mol_type = other DNA
gtggcaatttcgcaccagcgaatgaaaggtgtattgtacaagggaatatgtaccgtctttgcatccgatcagcaaaaagacaaagaaaaaaaaaaccaaacgactcggtccgcactagcctga

SEQ ID NO: 5146 - DNA, 30 bp, synthetic construct
  source 1..30: mol_type = other DNA
  misc_feature 1..30: note = Synthetic
atgccagcgactcggtccgcactagcctga

SEQ ID NO: 5147 - DNA, 132 bp, synthetic construct
  source 1..132: mol_type = other DNA
  misc_feature 1..132: note = Synthetic
attacagctaacgatccagtacttgcatcgaattttacaatgcagcctacttttaaaatagccgataagaaagttgtactcagagatcataattacattgcagtcgactcggtccgcactagcctgaggtaa

SEQ ID NO: 5148 - DNA, 204 bp, synthetic construct
  source 1..204: mol_type = other DNA
  misc_feature 1..204: note = Synthetic
atggaagaaatactaaacaaacaacaaatccccgagggggtaggattgtttagaccagagataaagcaatacgatgattctatcatggatgttgagataccattcttccacataactaagtgtgatggatacatgaaaatagatttggatctaaataacggtgttgattattccaccgactcggtccgcactagcctgaggtaa

SEQ ID NO: 5149 - DNA, 195 bp, synthetic construct
  source 1..195: mol_type = other DNA
  misc_feature 1..195: note = Synthetic
atactaaacaaacaacaaatccccgagggggtaggattgtttagaccagagataaagcaatacgatgattctatcatggatgttgagataccattcttccacataactaagtgtgatggatacatgaaaatagatttggatctaaataacggtgttgattattccaccgactcggtccgcactagcctgaggtaa

SEQ ID NO: 5150 - DNA, 168 bp, synthetic construct
  misc_feature 1..168: note = Synthetic
  source 1..168: mol_type = other DNA
aggctggcggggaacgggatgcgtcgccaccaccatcggcggcggcgcgccatcagcaagcggttggggggaggcttcctgcccgcgctgatccccatcatcgccgcggcgatcggggcgatccccggcattgcttccgtggcggtgcaggcctctcagcgccactga

SEQ ID NO: 5151 - DNA, 189 bp, synthetic construct
  misc_feature 1..189: note = Synthetic
  source 1..189: mol_type = other DNA
attaatacgactcggagaatcatgtcggtggtggcgcgcgtgtcgtacagcctgtactcgcagagcgagataagcgccacggacgtggtcatcagccagttgaagaacgacgaggacctgggcacggtgaaggacccgcgcctgggcgcctcggacgggtccgactcggtccgcactagcctgaggtaa

SEQ ID NO: 5152 - DNA, 189 bp, synthetic construct
  source 1..189: mol_type = other DNA
  misc_feature 1..189: note = Synthetic
attaatacgactcggagaatcgcctcggtggtggcgcgcgtgtcgtacagcctgtactcgcagagcgagataagcgccacggacgtggtcatcagccagttgaagaacgacgaggacctgggcacggtgaaggacccgcgcctgggcgcctcggacgggtccgactcggtccgcactagcctgaggtaa

SEQ ID NO: 5153 - DNA, 165 bp, synthetic construct
  misc_feature 1..165: note = Synthetic
  source 1..165: mol_type = other DNA
aagacaaatccgctacccgcaaccccttccgtgtggggcgggagtaccgtggaactcccccccacaacacgcgataccgcgggacagggcctgcttcggcgcgtcctgcgccccccgatctctcgccgcgacggccccgactcggtccgcactagcctgaggtaa

SEQ ID NO: 5154 - DNA, 168 bp, synthetic construct
  source 1..168: mol_type = other DNA
  misc_feature 1..168: note = Synthetic
atgaagaccaaaccgctacccgcaaccccttccgtgtggggcgggagtaccgtggaactcccccccacaacacgcgataccgcgggacagggcctgcttcggcgcgtcctgcgccccccgatctctcgccgcgacggccccgactcggtccgcactagcctgaggtaa

SEQ ID NO: 5155 - DNA, 168 bp, synthetic construct
  source 1..168: mol_type = other DNA
  misc_feature 1..168: note = Synthetic
atgaagaccagtccgctacccgcaaccccttccgtgtggggcgggagtaccgtggaactcccccccacaacacgcgataccgcgggacagggcctgcttcggcgcgtcctgcgccccccgatctctcgccgcgacggccccgactcggtccgcactagcctgaggtaa

SEQ ID NO: 5156 - DNA, 168 bp, synthetic construct
  misc_feature 1..168: note = Synthetic
  source 1..168: mol_type = other DNA
atgaagaccgatccgctacccgcaaccccttccgtgtggggcgggagtaccgtggaactcccccccacaacacgcgataccgcgggacagggcctgcttcggcgcgtcctgcgccccccgatctctcgccgcgacggccccgactcggtccgcactagcctgaggtaa

SEQ ID NO: 5157 - DNA, 168 bp, synthetic construct
  misc_feature 1..168: note = Synthetic
  source 1..168: mol_type = other DNA
atgaagatcaatccgctacccgcaaccccttccgtgtggggcgggagtaccgtggaactcccccccacaacacgcgataccgcgggacagggcctgcttcggcgcgtcctgcgccccccgatctctcgccgcgacggccccgactcggtccgcactagcctgaggtaa

SEQ ID NO: 5158 - DNA, 24 bp, synthetic construct
  misc_feature 1..24: note = Synthetic
  source 1..24: mol_type = other DNA
atgagactagcttcaaatttgtag

SEQ ID NO: 5159 - DNA, 24 bp, synthetic construct
  source 1..24: mol_type = other DNA
  misc_feature 1..24: note = Synthetic
atggcaagcactgaattagaataa

SEQ ID NO: 5160 - DNA, 81 bp, synthetic construct
  misc_feature 1..81: note = Synthetic
  source 1..81: mol_type = other DNA
atgacggacttggaaaaggtgttaaacgaaaactttttgccgaagatagctctccgttcgactcggtccgcactagcctga

SEQ ID NO: 5161 - DNA, 81 bp, synthetic construct
  misc_feature 1..81: note = Synthetic
  source 1..81: mol_type = other DNA
atgagggactcggaaaaggtgttaaacgaaaactttttgccgaagatagctctcccttcgactcggtccgcactagcctga

SEQ ID NO: 5162 - DNA, 171 bp, synthetic construct
  misc_feature 1..171: note = Synthetic
  source 1..171: mol_type = other DNA
attgccgacaacggtgtggagacacctcagggtcaaaaaactcagccgataaatttaccaccagtcaggaaaaagttaagaaaacatgagggactcggaaaaggtgttaaacgaaaactttttgccgaagatagctctcccttcgactcggtccgcactagcctgaggtaa

SEQ ID NO: 5163 - DNA, 168 bp, synthetic construct
  misc_feature 1..168: note = Synthetic
  source 1..168: mol_type = other DNA
atggcgcgctttgaggatccaacacggcgaccctacaagctacctgatctgtgcacggaactgaacacttcactgcaagacatagaaataacctgtgtatattgcaagacagtattggaacttacagaggtatttgaattcgactcggtccgcactagcctgaggtaa

SEQ ID NO: 5164 - DNA, 69 bp, synthetic construct
  source 1..69: mol_type = other DNA
  misc_feature 1..69: note = Synthetic
atgggaccgtggaacccgtcgaatttgcaacggacaaagatggagttgccgtaccgaccatcaggatga

SEQ ID NO: 5165 - DNA, 177 bp, synthetic construct
  source 1..177: mol_type = other DNA
  misc_feature 1..177: note = Synthetic
attctcacaatgtgggactcatcatacatgcagcaagtcagcgaagggttgatgactggaaaagtacccatagatcaagtgtttggtgccaatcccttagagaagttatacaagagaagaaaaccaaaaggcacagttggactacaatgcgactcggtccgcactagcctgaggtaa

SEQ ID NO: 5166 - DNA, 177 bp, synthetic construct
  misc_feature 1..177: note = Synthetic
  source 1..177: mol_type = other DNA
attctcacagcctgggactcatcatacatgcagcaagtcagcgaagggttgatgactggaaaagtacccatagatcaagtgtttggtgccaatcccttagagaagttatacaagagaagaaaaccaaaaggcacagttggactacaatgcgactcggtccgcactagcctgaggtaa

SEQ ID NO: 5167 - DNA, 183 bp, synthetic construct
  misc_feature 1..183: note = Synthetic
  source 1..183: mol_type = other DNA
aaggccgccacgtcccggaaccactgcaggcgcggcacctgcgtgacgtcgagctgctgctgcgagagctctcggatgcgtgcgatgattggttggaccccgtgcatggacgtaaaatttaaaaacgcctcgtccctgaaccgcacggcgggtctggccccgggccgactcggtccgcactag

SEQ ID NO: 5168 - DNA, 171 bp, synthetic construct
  misc_feature 1..171: note = Synthetic
  source 1..171: mol_type = other DNA
attatggatttgaggtcgcgtacagacgatgctttggacatggaattgcatgcgggttttgacgccccagaaatcgccagagctgttttaacggaaaaaacgcttactggtttaatttcgtctatatcacctctggttaatagcgactcggtccgcactagcctgaggtaa

SEQ ID NO: 5169 - DNA, 162 bp, synthetic construct
  source 1..162: mol_type = other DNA
  misc_feature 1..162: note = Synthetic
ttgaggtcgcgtacagacgatgctttggacatggaattgcatgcgggttttgacgccccagaaatcgccagagctgttttaacggaaaaaacgcttactggtttaatttcgtctatatcacctctggttaatagcgactcggtccgcactagcctgaggtaa

SEQ ID NO: 5170 - DNA, 39 bp, synthetic construct
  misc_feature 1..39: note = Synthetic
  source 1..39: mol_type = other DNA
ctgcgaaaagaggaagttgcggtaaaaccacgtcaataa

SEQ ID NO: 5171 - DNA, 33 bp, synthetic construct
  source 1..33: mol_type = other DNA
  misc_feature 1..33: note = Synthetic
atgacacctccgactcggtccgcactagcctga

SEQ ID NO: 5172 - DNA, 48 bp, synthetic construct
  misc_feature 1..48: note = Synthetic
  source 1..48: mol_type = other DNA
ataagcctgcacataaagacgctgcaaaaaaaatctcttcgcagataa

SEQ ID NO: 5173 - DNA, 24 bp, synthetic construct
  misc_feature 1..24: note = Synthetic
  source 1..24: mol_type = other DNA
atgtaccaatacggtcccacttga

SEQ ID NO: 5174 - DNA, 48 bp, synthetic construct
  source 1..48: mol_type = other DNA
  misc_feature 1..48: note = Synthetic
ataagcctgcacataaagacgctgcaaaaaaaatctcttcgcagatag

SEQ ID NO: 5175 - DNA, 168 bp, synthetic construct
  source 1..168: mol_type = other DNA
  misc_feature 1..168: note = Synthetic
atgtcccatcgccgaggaagcaagaagttgaaggtgcagctgtcgcccccagaggatatgaaggaagactgggacagtcaggcagaggaggagatggaagattgggacagccaggcagaggaggtggacagcctggaggacgactcggtccgcactagcctgaggtaa

SEQ ID NO: 5176 - DNA, 171 bp, synthetic construct
  source 1..171: mol_type = other DNA
  misc_feature 1..171: note = Synthetic
agggcctcccatcgccgaggaagcaagaagttgaaggtgcagctgtcgcccccagaggatatgaaggaagactgggacagtcaggcagaggaggagatggaagattgggacagccaggcagaggaggtggacagcctggaggacgactcggtccgcactagcctgaggtaa

SEQ ID NO: 5177 - DNA, 180 bp, synthetic construct
  misc_feature 1..180: note = Synthetic
  source 1..180: mol_type = other DNA
atcagactaaatatggagcagcttaagacaccccaaaatcaaaaaacacgtccaagaaatatgcttcctaaaaaaaaaggaaaagaacttaaaaaaaggccttgtaaagtaaaacgtaaattatttggttccgaaaacatcagacctaacaacgactcggtccgcactagcctgaggtaa

SEQ ID NO: 5178 - DNA, 180 bp, synthetic construct
  misc_feature 1..180: note = Synthetic
  source 1..180: mol_type = other DNA
atcagactaaatgccgagcagcttaagacaccccaaaatcaaaaaacacgtccaagaaatatgcttcctaaaaaaaaaggaaaagaacttaaaaaaaggccttgtaaagtaaaacgtaaattatttggttccgaaaacatcagacctaacaacgactcggtccgcactagcctgaggtaa

SEQ ID NO: 5179 - DNA, 75 bp, synthetic construct
  source 1..75: mol_type = other DNA
  misc_feature 1..75: note = Synthetic
ttgtgcctgaacgtgatcgtgggcccaggttcattacctattgttaatgctgaggtgagtactgcctttacctag

SEQ ID NO: 5180 - DNA, 114 bp, synthetic construct
  misc_feature 1..114: note = Synthetic
  source 1..114: mol_type = other DNA
atggcgccggaggcgggaacaaggtggtggatgagtgctacatccccaattacttgctccccaaaacccagcctgagctccagtgggcgtggactaatatggaacagtatttaa

SEQ ID NO: 5181 - DNA, 18 bp, synthetic construct
  source 1..18: mol_type = other DNA
  misc_feature 1..18: note = Synthetic
atgtcaggaaaaaattga

SEQ ID NO: 5182 - DNA, 33 bp, synthetic construct
  misc_feature 1..33: note = Synthetic
  source 1..33: mol_type = other DNA
atattcgactcggtccgcactagcctgaggtaa

SEQ ID NO: 5183 - DNA, 168 bp, synthetic construct
  source 1..168: mol_type = other DNA
  misc_feature 1..168: note = Synthetic
atgaggtccctgattatagtccttctgttcccctctatcatctactccatgtctattagacaatgtgagaagactgaagaggaaacatggggattgaaaatagggttgtgtataattgccaaagatttctatcccgaaagcgactcggtccgcactagcctgaggtaa

SEQ ID NO: 5184 - DNA, 165 bp, synthetic construct
  source 1..165: mol_type = other DNA
  misc_feature 1..165: note = Synthetic
aggtccctgattatagtccttctgttcccctctatcatctactccatgtctattagacaatgtgagaagactgaagaggaaacatggggattgaaaatagggttgtgtataattgccaaagatttctatcccgaaagcgactcggtccgcactagcctgaggtaa

SEQ ID NO: 5185 - DNA, 63 bp, synthetic construct
  source 1..63: mol_type = other DNA
  misc_feature 1..63: note = Synthetic
atcagtcacacaataataggccgcgcccagatacaagcctattactttgcgttgcgtacctag

SEQ ID NO: 5186 - DNA, 21 bp, synthetic construct
  misc_feature 1..21: note = Synthetic
  source 1..21: mol_type = other DNA
atgcatgtttatcctgagtag

SEQ ID NO: 5187 - DNA, 39 bp, synthetic construct
  source 1..39: mol_type = other DNA
  misc_feature 1..39: note = Synthetic
ctgccgatgctcgactcggtccgcactagcctgaggtaa

SEQ ID NO: 5188 - DNA, 168 bp, synthetic construct
  source 1..168: mol_type = other DNA
  misc_feature 1..168: note = Synthetic
gtgctgccgctgctgtgtaccgcaaggacaaggctcgcaagtctcgccgtatcagccttgagttcatgcttgagcaagccaataagtttgctaaccataaggccatctggttcccttacaacatggactggcgcggtcgtgtttacgctgcgactcggtccgcactag

SEQ ID NO: 5189 - DNA, 186 bp, synthetic construct
  misc_feature 1..186: note = Synthetic
  source 1..186: mol_type = other DNA
atgtatgatcacttgcctggttttggaactgctttccaccaattagtacaagtgatttgtaaattgggaaaagatagcaactcattggacatcattcatgctgagttccaggccagcctggctgaaggagactctcctcaatgtgccctaattcaaattacaacgactcggtccgcactagcctga

SEQ ID NO: 5190 - DNA, 186 bp, synthetic construct
  source 1..186: mol_type = other DNA
  misc_feature 1..186: note = Synthetic
atgtatgatcacttgcctggttttggaactgctttccaccaattagtacaagtgatttgtaaattgggaaaagatagcaactcattggacatcattcatgctgagttccaggccagcctggctgaaggagactctcctcaatgtgccctagcccaaattacaacgactcggtccgcactagcctga

SEQ ID NO: 5191 - DNA, 84 bp, synthetic construct
  source 1..84: mol_type = other DNA
  misc_feature 1..84: note = Synthetic
atggacgtgttcacagatccgcatcatgctttccctagggtccgtattagtcagcccaagaacccgcgactcggtccgcactag

SEQ ID NO: 5192 - DNA, 177 bp, synthetic construct
  source 1..177: mol_type = other DNA
  misc_feature 1..177: note = Synthetic
aggtggacgatgaagaccttccgctggaaagtgaaacccggtatggatgtggcttcggtcccttctgtaagaaaggtgcgctttggtgatggctattctcagcgagcgcctgccgggctgaatgccaacctgaaaacgtacagcgtgacgctttctgtccgactcggtccgcactag

SEQ ID NO: 5193 - DNA, 48 bp, synthetic construct
  misc_feature 1..48: note = Synthetic
  source 1..48: mol_type = other DNA
aggtgcgctttggtgatggctattctcagcgagcgcctgccgggctga

SEQ ID NO: 5194 - DNA, 69 bp, synthetic construct
  misc_feature 1..69: note = Synthetic
  source 1..69: mol_type = other DNA
acgaatgaagaaatgtgtcttaagaatgattatccacgaattatatcatataatcctccaccaaaatag

SEQ ID NO: 5195 - DNA, 168 bp, synthetic construct
  source 1..168: mol_type = other DNA
  misc_feature 1..168: note = Synthetic
atgatgataaatcatcaaccacatgcaatacagacaactggggaccctttttaccatcaaaagggactggtactggtgtcacaaagcaatatgactcaatttctttttggtttcgctatcgcttcaaatttaaggtctctcgactcggtccgcactagcctgaggtaa

SEQ ID NO: 5196 - DNA, 165 bp, synthetic construct
  misc_feature 1..165: note = Synthetic
  source 1..165: mol_type = other DNA
atgataaatcatcaaccacatgcaatacagacaactggggaccctttttaccatcaaaagggactggtactggtgtcacaaagcaatatgactcaatttctttttggtttcgctatcgcttcaaatttaaggtctctcgactcggtccgcactagcctgaggtaa

SEQ ID NO: 5197 - DNA, 66 bp, synthetic construct
  misc_feature 1..66: note = Synthetic
  source 1..66: mol_type = other DNA
atgttttggaaaaggggcaactcggaagtagcggagaaattgcaaataaagcttctgcggttgtga

SEQ ID NO: 5198 - DNA, 33 bp, synthetic construct
  source 1..33: mol_type = other DNA
  misc_feature 1..33: note = Synthetic
atgaaaaagaaaagtcattcctgtccggtgtga

SEQ ID NO: 5199 - DNA, 75 bp, synthetic construct
  source 1..75: mol_type = other DNA
  misc_feature 1..75: note = Synthetic
atgataagttggaaagtggtaataatacatggattcctaaaacagatgaagagtataagtttctatctaaattga

SEQ ID NO: 5200 - DNA, 168 bp, synthetic construct
  misc_feature 1..168: note = Synthetic
  source 1..168: mol_type = other DNA
gtgctgccgctgctgtgtaccgcaaggacaaggctcgcaagtctcgccgtatcagccttgagttcatgcttgagcaagccaataagtttgctaaccataaggccatctggttcccttacaacatggagccgcgcggtcgtgtttacgctgcgactcggtccgcactag

SEQ ID NO: 5201 - DNA, 168 bp, synthetic construct
  misc_feature 1..168: note = Synthetic
  source 1..168: mol_type = other DNA
gtgctgccgctgctgtgtaccgcaaggacaaggctcgcaagtctcgccgtatcagccttgagttcatgcttgagcaagccaataagtttgctaaccatagccccatctggttcccttacaacatggactggcgcggtcgtgtttacgctgcgactcggtccgcactag

SEQ ID NO: 5202 - DNA, 126 bp, synthetic construct
  misc_feature 1..126: note = Synthetic
  source 1..126: mol_type = other DNA
gtgattataaagatggagtgccccagtttgaacatattgtacccaagtattctccaaatgaaagagtattttctgaacaagagcgtaaggatgttagtgaagaactgtctgctttgcaatctatag

SEQ ID NO: 5203 - DNA, 72 bp, synthetic construct
  source 1..72: mol_type = other DNA
  misc_feature 1..72: note = Synthetic
aagaaaatgaattcaagacgatctcataggtgtgcgaatggcactctgaagaataaaagtccatttccgtag

SEQ ID NO: 5204 - DNA, 60 bp, synthetic construct
  misc_feature 1..60: note = Synthetic
  source 1..60: mol_type = other DNA
acgaaaatcatacttggtttggagaagacgacgaagcgttacttacacaatggatgctga

SEQ ID NO: 5205 - DNA, 93 bp, synthetic construct
  source 1..93: mol_type = other DNA
  misc_feature 1..93: note = Synthetic
ataccgacggacatgaaccaaatgcaaccgcagccgatcagcaagaacgagaatccaccaaccccacacacgactcggtccgcactagcctga

SEQ ID NO: 5206 - DNA, 60 bp, synthetic construct
  misc_feature 1..60: note = Synthetic
  source 1..60: mol_type = other DNA
acgaaaatcatacttggtttggagaagacgacgaagcgttacttacacagccgatgctga

SEQ ID NO: 5207 - DNA, 219 bp, synthetic construct
  misc_feature 1..219: note = Synthetic
  source 1..219: mol_type = other DNA
atggggatcatcccgccgaaggagtccttcacctgccccccctgttgcagcaggatcagccacggactttgcccgcctgcaagctgcgtggccacgtcggtgaactgtgcaggcagcatacgcatggcggctttatactgcccgacggaaatccccgctttctgtgcagccagcgcctgtcggctcagcgactgttcgactcggtccgcactagcctga

SEQ ID NO: 5208 - DNA, 219 bp, synthetic construct
  source 1..219: mol_type = other DNA
  misc_feature 1..219: note = Synthetic
atgggggccatcccgccgaaggagtccttcacctgccccccctgttgcagcaggatcagccacggactttgcccgcctgcaagctgcgtggccacgtcggtgaactgtgcaggcagcatacgcatggcggctttatactgcccgacggaaatccccgctttctgtgcagccagcgcctgtcggctcagcgactgttcgactcggtccgcactagcctga

SEQ ID NO: 5209 - DNA, 168 bp, synthetic construct
  source 1..168: mol_type = other DNA
  misc_feature 1..168: note = Synthetic
atgcatcctgtcctgcgacaaatgcgacctcagcccagggcaaccacggcctcagcagcggtggcgctttcgggctctggcgaacaggaagagcctcaatgtcctacattggagttggaagaaggagaaggcatagcccgcgactcggtccgcactagcctgaggtaa

SEQ ID NO: 5210 - DNA, 156 bp, synthetic construct
  misc_feature 1..156: note = Synthetic
  source 1..156: mol_type = other DNA
ctgcgacaaatgcgacctcagcccagggcaaccacggcctcagcagcggtggcgctttcgggctctggcgaacaggaagagcctcaatgtcctacattggagttggaagaaggagaaggcatagcccgcgactcggtccgcactagcctgaggtaa

SEQ ID NO: 5211 - DNA, 18 bp, synthetic construct
  misc_feature 1..18: note = Synthetic
  source 1..18: mol_type = other DNA
atgtgtgtcaagggatag

SEQ ID NO: 5212 - DNA, 198 bp, synthetic construct
  misc_feature 1..198: note = Synthetic
  source 1..198: mol_type = other DNA
attgcggcgggcgctactggcgaactgaccatgtactattgggttccgcttgcctattccgaaaccgatttgaccggggcggttttggcgaacgtgccgcaaagtaagcagcgcctgaaactggaatttgcgaacaacaataccgcctttgcagcggtgggcgctaatccgctggcgactcggtccgcactagcctga

SEQ ID NO: 5213 - DNA, 186 bp, synthetic construct
  misc_feature 1..186: note = Synthetic
  source 1..186: mol_type = other DNA
aagaagacgagggcgacaatggagagtctcagcgagcgtttcagtgctctgcaagaccaactaatgaacatatatgaagctgcaaaaaacactcttgagtctcaaatagagcattggcaattgctacggaaagaagctgttctattatactatgctagcgactcggtccgcactagcctgaggtaa

SEQ ID NO: 5214 - DNA, 186 bp, synthetic construct
  misc_feature 1..186: note = Synthetic
  source 1..186: mol_type = other DNA
aagaagacgagggcgacagccgagagtctcagcgagcgtttcagtgctctgcaagaccaactaatgaacatatatgaagctgcaaaaaacactcttgagtctcaaatagagcattggcaattgctacggaaagaagctgttctattatactatgctagcgactcggtccgcactagcctgaggtaa

SEQ ID NO: 5215 - DNA, 24 bp, synthetic construct
  source 1..24: mol_type = other DNA
  misc_feature 1..24: note = Synthetic
ttggacacaattagacctgagtga

SEQ ID NO: 5216 - DNA, 186 bp, synthetic construct
  misc_feature 1..186: note = Synthetic
  source 1..186: mol_type = other DNA
aagaagacgagggggaggatggaggctctgaaccagcgtttcaatgctctagaagaccagctcatggacatatatgaacaagggagtgataaattagaagatcaaataaaacattggaactttttaagaaaagaacagattttattgcattatgccagcgactcggtccgcactagcctgaggtaa

SEQ ID NO: 5217 - DNA, 168 bp, synthetic construct
  source 1..168: mol_type = other DNA
  misc_feature 1..168: note = Synthetic
atgaaggccaatccgctacccgcaaccccttccgtgtggggcgggagtaccgtggaactcccccccacaacacgcgataccgcgggacagggcctgcttcggcgcgtcctgcgccccccgatctctcgccgcgacggccccgactcggtccgcactagcctgaggtaa

SEQ ID NO: 5218 - DNA, 168 bp, synthetic construct
  source 1..168: mol_type = other DNA
  misc_feature 1..168: note = Synthetic
atgaggaccaatccgctacccgcaaccccttccgtgtggggcgggagtaccgtggaactcccccccacaacacgcgataccgcgggacagggcctgcttcggcgcgtcctgcgccccccgatctctcgccgcgacggccccgactcggtccgcactagcctgaggtaa

SEQ ID NO: 5219 - DNA, 168 bp, synthetic construct
  source 1..168: mol_type = other DNA
  misc_feature 1..168: note = Synthetic
atgcagaccaatccgctacccgcaaccccttccgtgtggggcgggagtaccgtggaactcccccccacaacacgcgataccgcgggacagggcctgcttcggcgcgtcctgcgccccccgatctctcgccgcgacggccccgactcggtccgcactagcctgaggtaa

SEQ ID NO: 5220 - DNA, 168 bp, synthetic construct
  misc_feature 1..168: note = Synthetic
  source 1..168: mol_type = other DNA
attaagaccaatccgctacccgcaaccccttccgtgtggggcgggagtaccgtggaactcccccccacaacacgcgataccgcgggacagggcctgcttcggcgcgtcctgcgccccccgatctctcgccgcgacggccccgactcggtccgcactagcctgaggtaa

SEQ ID NO: 5221 - DNA, 168 bp, synthetic construct
  source 1..168: mol_type = other DNA
  misc_feature 1..168: note = Synthetic
gtgaagaccaatccgctacccgcaaccccttccgtgtggggcgggagtaccgtggaactcccccccacaacacgcgataccgcgggacagggcctgcttcggcgcgtcctgcgccccccgatctctcgccgcgacggccccgactcggtccgcactagcctgaggtaa

SEQ ID NO: 5222 - DNA, 30 bp, synthetic construct
  source 1..30: mol_type = other DNA
  misc_feature 1..30: note = Synthetic
ttgctaggtcgcgatctggggtggcaatga

SEQ ID NO: 5223 - DNA, 24 bp, synthetic construct
  source 1..24: mol_type = other DNA
  misc_feature 1..24: note = Synthetic
atggcttataggattcgattttga

SEQ ID NO: 5224 - DNA, 15 bp, synthetic construct
  source 1..15: mol_type = other DNA
  misc_feature 1..15: note = Synthetic
ctgaagaatatatag

SEQ ID NO: 5225 - DNA, 24 bp, synthetic construct
  source 1..24: mol_type = other DNA
  misc_feature 1..24: note = Synthetic
atggtgacttatgaagatgagtag

SEQ ID NO: 5226 - DNA, 162 bp, synthetic construct
  source 1..162: mol_type = other DNA
  misc_feature 1..162: note = Synthetic
atgagtagttctaagcgagatctggtggcccagcaactaagagcctcggtagaaaagagagcggctgtgagcgcacgtgacagatttgggagggaccacgctctgtttgaaacacagtttacatctgctcggggcgactcggtccgcactagcctgaggtaa

SEQ ID NO: 5227 - DNA, 27 bp, synthetic construct
  source 1..27: mol_type = other DNA
  misc_feature 1..27: note = Synthetic
atggacctgatgtgtcacggcggttga

SEQ ID NO: 5228 - DNA, 66 bp, synthetic construct
  misc_feature 1..66: note = Synthetic
  source 1..66: mol_type = other DNA
atgatctcgcggagccatctacgcgcctgtcagggcgatgacgacatcggcgatgacggctcctga

SEQ ID NO: 5229 - DNA, 96 bp, synthetic construct
  misc_feature 1..96: note = Synthetic
  source 1..96: mol_type = other DNA
atgacgacatcggcgatgacggctcctgatacgcgccgacagctgcagcacgtggagacgctgcgtcgcgactcggtccgcactagcctgaggtaa

SEQ ID NO: 5230 - DNA, 27 bp, synthetic construct
  source 1..27: mol_type = other DNA
  misc_feature 1..27: note = Synthetic
atggacctgatatgtcacggcggttga

SEQ ID NO: 5231 - DNA, 42 bp, synthetic construct
  misc_feature 1..42: note = Synthetic
  source 1..42: mol_type = other DNA
ataacgtcccgccccgactcggtccgcactagcctgaggtaa

SEQ ID NO: 5232 - DNA, 225 bp, synthetic construct
  misc_feature 1..225: note = Synthetic
  source 1..225: mol_type = other DNA
ctgtcaaacttaaacggaatttttgcggaaagtcattatttcgtattcaaaatcattatgaataacgttaagggtatgcttcaagagttatgtgttaaacgtggattggaactgcctgtttacgaaaaattgtctaaagttggtcctgaccatgcaccaaccattactgttaaattaacagctaatggtattgaagtcgactcggtccgcactagcctgaggtaa

SEQ ID NO: 5233 - DNA, 225 bp, synthetic construct
  source 1..225: mol_type = other DNA
  misc_feature 1..225: note = Synthetic
ctgtcaaacttaaacggaatttttgcggaaagtcattatttcgtattcaaaatcattgccaataacgttaagggtatgcttcaagagttatgtgttaaacgtggattggaactgcctgtttacgaaaaattgtctaaagttggtcctgaccatgcaccaaccattactgttaaattaacagctaatggtattgaagtcgactcggtccgcactagcctgaggtaa

SEQ ID NO: 5234 - DNA, 150 bp, synthetic construct
  misc_feature 1..150: note = Synthetic
  source 1..150: mol_type = other DNA
ctgtccgcgaccttggcgagagacatcgtgttggtctcagccatcactctgttcttcttcttgttggccctacggatcccccagcgactgtgtcagcggctgcgcattcgcctgccgcatcgataccagcggttacgcaccgaggactga

SEQ ID NO: 5235 - DNA, 159 bp, synthetic construct
  source 1..159: mol_type = other DNA
  misc_feature 1..159: note = Synthetic
atgtcaaccgccgcgtcgtcgcgcacgccagcgctctcagggcgcagcaccgggacctgcccgagcgccacgccgacgtgcctctgccgcccctgcccacggggccggaaccgccgctgccgccaggagcgcgtcccgactcggtccgcactagcctga

SEQ ID NO: 5236 - DNA, 168 bp, synthetic construct
  misc_feature 1..168: note = Synthetic
  source 1..168: mol_type = other DNA
atggcaactcctttgtttgagttttcggttgaggagcggggccagaattcgtctacttttgaccctaaacaagcatacaaaagttttgtcgatgaacacagggaggagctcactcttgagaatattagagtgttcttcctcgactcggtccgcactagcctgaggtaa

SEQ ID NO: 5237 - DNA, 90 bp, synthetic construct
  misc_feature 1..90: note = Synthetic
  source 1..90: mol_type = other DNA
aagacgtctatgcaaaaagaaaattcacgtatgttctcttgcgaaaaagcgtgcgaaatcatgccatcgttccgctttaacaaagtttga

SEQ ID NO: 5238 - DNA, 168 bp, synthetic construct
  misc_feature 1..168: note = Synthetic
  source 1..168: mol_type = other DNA
atgagtaaatcacacgcggcctatatcgattatgcattgcgcagaactactaatatgcctgttgaaatgatggggtcggacgtagtacgcctcaaggattatcaacattttgtagcaagagttttcttaggattagacagcgactcggtccgcactagcctgaggtaa

SEQ ID NO: 5239 - DNA, 39 bp, synthetic construct
  misc_feature 1..39: note = Synthetic
  source 1..39: mol_type = other DNA
atgcattgcgcagaactactaatatgcctgttgaaatga

SEQ ID NO: 5240 - DNA, 219 bp, synthetic construct
  source 1..219: mol_type = other DNA
  misc_feature 1..219: note = Synthetic
gtggacaacttcttccgcgagtactccatgaccgagtgggcgcccgacctcgagcgcttctcgttcaagatccccatctcctccgtgaacaaactccgcggcttcaagaagcgcgtggtcatgttcgagtcgcgcgtggtcatggacgccgacgacaacatcatcggcatgctcttcaccgaccgcgtgggcatgtcgactcggtccgcactagcctga

SEQ ID NO: 5241 - DNA, 39 bp, synthetic construct
  source 1..39: mol_type = other DNA
  misc_feature 1..39: note = Synthetic
atgcatatgcgtgttgtttcaattgtgctagaacagtag

SEQ ID NO: 5242 - DNA, 168 bp, synthetic construct
  misc_feature 1..168: note = Synthetic
  source 1..168: mol_type = other DNA
atgagcaagatctttgtcaatccgagtgcaatcagagcaggcatggccgatctggaaatggcagaggagactgttgacttgataaatcggaacatcgaggacaatcaagctcatctccagggtgagcctatagaagtcgacgactcggtccgcactagcctgaggtaa

SEQ ID NO: 5243 - DNA, 156 bp, synthetic construct
  misc_feature 1..156: note = Synthetic
  source 1..156: mol_type = other DNA
ttgtttgagttttcggttgaggagcggggccagaattcgtctacttttgaccctaaacaagcatacaaaagttttgtcgatgaacacagggaggagctcactcttgagaatattagagtgttcttcctcgactcggtccgcactagcctgaggtaa

SEQ ID NO: 5244 - DNA, 129 bp, synthetic construct
  misc_feature 1..129: note = Synthetic
  source 1..129: mol_type = other DNA
acgctacaacccacgaagacgaaggccgtaataacggtgttgatcatgacgaagaggatgatgccgcggcagcagctgggatgggaggaatctaagatcacacgaggatttaggatacatgacccgtag

SEQ ID NO: 5245 - DNA, 63 bp, synthetic construct
  misc_feature 1..63: note = Synthetic
  source 1..63: mol_type = other DNA
aggaatctaagatcacacgaggatttaggatacatgacccgtagtaagaaaaacttagggtga

SEQ ID NO: 5246 - DNA, 168 bp, synthetic construct
  source 1..168: mol_type = other DNA
  misc_feature 1..168: note = Synthetic
atggccctaagcaacaaataccgtctagctccatactcaaaaggccccttacgccttccgacatccttccgggagacctcgactcagacggatgcatcaaagaaagccctcttcgaagaattattagctctcatagaacacgactcggtccgcactagcctgaggtaa

SEQ ID NO: 5247 - DNA, 189 bp, synthetic construct
  misc_feature 1..189: note = Synthetic
  source 1..189: mol_type = other DNA
aagccccaggacaacaacaaagccgccctaagcaacaaataccgtctagctccatactcaaaaggccccttacgccttccgacatccttccgggagacctcgactcagacggatgcatcaaagaaagccctcttcgaagaattattagctctcatagaacacgactcggtccgcactagcctgaggtaa

SEQ ID NO: 5248 - DNA, 96 bp, synthetic construct
  misc_feature 1..96: note = Synthetic
  source 1..96: mol_type = other DNA
acggccctccggaaaaaagaaataccagctgaaacacataatatgggtaagcaaggaactagacagatttggccttcacgactcggtccgcactag

SEQ ID NO: 5249 - DNA, 168 bp, synthetic construct
  misc_feature 1..168: note = Synthetic
  source 1..168: mol_type = other DNA
atgttattttacagaatgtcaagatatattccatcaaaatcaacacttagacaaaaaaaactacaatggatgaatttaattgttcacggccacgacatcttttgtgactgctgcaaaccacttgaatgcaccattggaaccgactcggtccgcactagcctgaggtaa

SEQ ID NO: 5250 - DNA, 153 bp, synthetic construct
  source 1..153: mol_type = other DNA
  misc_feature 1..153: note = Synthetic
atgtcaagatatattccatcaaaatcaacacttagacaaaaaaaactacaatggatgaatttaattgttcacggccacgacatcttttgtgactgctgcaaaccacttgaatgcaccattggaaccgactcggtccgcactagcctgaggtaa

SEQ ID NO: 5251 - DNA, 117 bp, synthetic construct
  source 1..117: mol_type = other DNA
  misc_feature 1..117: note = Synthetic
atggaagccggacactggaggccgcagactgggaccgagcaattgtcgtgccggaagaggacactcttagcatcgccccttctcatatggcatcggccacaaggtgatctagtgtaa

SEQ ID NO: 5252 - DNA, 24 bp, synthetic construct
  source 1..24: mol_type = other DNA
  misc_feature 1..24: note = Synthetic
atgacagcaaagtgtccactgtga

SEQ ID NO: 5253 - DNA, 30 bp, synthetic construct
  misc_feature 1..30: note = Synthetic
  source 1..30: mol_type = other DNA
atgctattaagagaggaaagaggacactaa

SEQ ID NO: 5254 - DNA, 168 bp, synthetic construct
  misc_feature 1..168: note = Synthetic
  source 1..168: mol_type = other DNA
atgtgccttaccgccagagaacgcgcgaagatggccaccccctcgatgatgccgcagtgggcgtacatgcacatcgccgggcaggacgcctcggagtacctgagcccgggtctggtgcagtttgcccgcgccaccgacaccgactcggtccgcactagcctgaggtaa

SEQ ID NO: 5255 - DNA, 39 bp, synthetic construct
  misc_feature 1..39: note = Synthetic
  source 1..39: mol_type = other DNA
ttggataccgacgtgtcacaaacgtctaggctttgctag

SEQ ID NO: 5256 - DNA, 33 bp, synthetic construct
  misc_feature 1..33: note = Synthetic
  source 1..33: mol_type = other DNA
atgatgtgtccagttctgccatggaagaattga

SEQ ID NO: 5257 - DNA, 108 bp, synthetic construct
  source 1..108: mol_type = other DNA
  misc_feature 1..108: note = Synthetic
atggaagaattgagaagattggttgagtccaccaacagaatagacaccaaacagccagaagcttcaggtgtcaccaaccattataatgatactgaccttctaaaataa

SEQ ID NO: 5258 - DNA, 24 bp, synthetic construct
  source 1..24: mol_type = other DNA
  misc_feature 1..24: note = Synthetic
ttgatgaagaagaagagcacgtag

SEQ ID NO: 5259 - DNA, 177 bp, synthetic construct
  source 1..177: mol_type = other DNA
  misc_feature 1..177: note = Synthetic
ttggggtcctcgctggagaggacgttgtttttctcgatggcggcggtggcgtgtcgccggcacgcgatgcagggcagcgtggagcagatcacgtacagctgccgcttgcagcgctcgaggtcgcggtgctcctcgaagcgccgcagcacgatgacgactcggtccgcactagcctga

SEQ ID NO: 5260 - DNA, 171 bp, synthetic construct
  source 1..171: mol_type = other DNA
  misc_feature 1..171: note = Synthetic
atgtcctacttccacaccctgcttgctgaggtttgcaccggtgtggctccggaagttaacgctaaagcactggcctggggaaaacagtacgagaacgacgccagaaccctgtttgaattcacttccggcgtgaatgttactgacgactcggtccgcactagcctgaggtaa

SEQ ID NO: 5261 - DNA, 171 bp, synthetic construct
  misc_feature 1..171: note = Synthetic
  source 1..171: mol_type = other DNA
atgtcctacttccacaccctgcttgctgaggtttgcaccggtgtggctccggaagttaacgctaaagcactggcctggggaaaacagtacgagaacgacgccagaaccctgtttgaattcacttccggcgtgagccttactgacgactcggtccgcactagcctgaggtaa

SEQ ID NO: 5262 - DNA, 66 bp, synthetic construct
  source 1..66: mol_type = other DNA
  misc_feature 1..66: note = Synthetic
ataaagacggcgtttacggaagctgttactttaaggaaaactccgactcggtccgcactagcctga

SEQ ID NO: 5263 - DNA, 33 bp, synthetic construct
  misc_feature 1..33: note = Synthetic
  source 1..33: mol_type = other DNA
atgtatttttcgactcggtccgcactagcctga

SEQ ID NO: 5264 - DNA, 36 bp, synthetic construct
  source 1..36: mol_type = other DNA
  misc_feature 1..36: note = Synthetic
atgttcctaatgtatactttaatcctgtgtttatag

SEQ ID NO: 5265 - DNA, 189 bp, synthetic construct
  source 1..189: mol_type = other DNA
  misc_feature 1..189: note = Synthetic
attctagcctgtacacagaaagtcaagatggacgaatcgctcgacttcgctcgcgattcgtcgaaggcggggggccggaggccccccggtggcccccctccaacgagtggagcacgtacaggggggtacgtcatccgtacaggggggtacgtcatccgtacaggggggtaccgactcggtccgcactag

SEQ ID NO: 5266 - DNA, 18 bp, synthetic construct
  source 1..18: mol_type = other DNA
  misc_feature 1..18: note = Synthetic
atgtcatccgctccataa

SEQ ID NO: 5267 - DNA, 36 bp, synthetic construct
  source 1..36: mol_type = other DNA
  misc_feature 1..36: note = Synthetic
aagatgctaacagcaattctcgccaagcacccgtaa

SEQ ID NO: 5268 - DNA, 72 bp, synthetic construct
  source 1..72: mol_type = other DNA
  misc_feature 1..72: note = Synthetic
atggtttgggggggaccggcggcgcgaaaagacagggagatggacagtgacacggtgttttgttatgattag

SEQ ID NO: 5269 - DNA, 48 bp, synthetic construct
  misc_feature 1..48: note = Synthetic
  source 1..48: mol_type = other DNA
atgggaaccggaagccgagacagagtactacagagtgttgaagggtaa

SEQ ID NO: 5270 - DNA, 54 bp, synthetic construct
  source 1..54: mol_type = other DNA
  misc_feature 1..54: note = Synthetic
atggtgaatagcctggttttgatcctagccctgctttcttcatcgagagtgtag

SEQ ID NO: 5271 - DNA, 75 bp, synthetic construct
  misc_feature 1..75: note = Synthetic
  source 1..75: mol_type = other DNA
atttcttccccagtgaacgagaaaatgtggatgtgtgttttctcagatttaattttattggccttttccagatag

SEQ ID NO: 5272 - DNA, 168 bp, synthetic construct
  source 1..168: mol_type = other DNA
  misc_feature 1..168: note = Synthetic
atgacaactagaacaaagggcaggggccatactgcggccacgactcaaaacgacagaatgccaggccctgagctttcgggctggatctctgagcagctaatgaccggaagaattcctgtaagcgacatcttctgtgatatcgactcggtccgcactagcctgaggtaa

SEQ ID NO: 5273 - DNA, 171 bp, synthetic construct
  misc_feature 1..171: note = Synthetic
  source 1..171: mol_type = other DNA
aaggccacaactagaacaaagggcaggggccatactgcggccacgactcaaaacgacagaatgccaggccctgagctttcgggctggatctctgagcagctaatgaccggaagaattcctgtaagcgacatcttctgtgatatcgactcggtccgcactagcctgaggtaa

SEQ ID NO: 5274 - DNA, 60 bp, synthetic construct
  misc_feature 1..60: note = Synthetic
  source 1..60: mol_type = other DNA
attaatacagatccagttattattaaaaaaacaaataatattgccaaaatgatccaataa

SEQ ID NO: 5275 - DNA, 189 bp, synthetic construct
  source 1..189: mol_type = other DNA
  misc_feature 1..189: note = Synthetic
ctgtctactttgccaggcaatcctgccattgcttccctcatgtcctttactgctgccgttacaagccctctgaccacccaacaaaccctcctttttaacatcttggggggatgggtggcctcacagattcgcgactccgatgcttctaccgcattcgtcgtgagcgcgactcggtccgcactagcctga

SEQ ID NO: 5276 - DNA, 189 bp, synthetic construct
  misc_feature 1..189: note = Synthetic
  source 1..189: mol_type = other DNA
ctgtctactttgccaggcaatcctgccattgcttccctcatgtcctttactgctgccgttacaagccctctgaccacccaacaaaccctcctttttaacgccttggggggatgggtggcctcacagattcgcgactccgatgcttctaccgcattcgtcgtgagcgcgactcggtccgcactagcctga

SEQ ID NO: 5277 - DNA, 168 bp, synthetic construct
  source 1..168: mol_type = other DNA
  misc_feature 1..168: note = Synthetic
atggcctattcaacaagggagatactgttagccctgtgtatacgggacagtcgtgtgcatggaaatggtaccctgcatcctgtgttggagctagcagcaagagaaacacctctccgcctttcaccagaggacactgtagtcgactcggtccgcactagcctgaggtaa

SEQ ID NO: 5278 - DNA, 36 bp, synthetic construct
  misc_feature 1..36: note = Synthetic
  source 1..36: mol_type = other DNA
atggaaatggtaccctgcatcctgtgttggagctag

SEQ ID NO: 5279 - DNA, 168 bp, synthetic construct
  misc_feature 1..168: note = Synthetic
  source 1..168: mol_type = other DNA
atggcctattcaacaagggagatactgttagccctgtgtatacgggacagtcgtgtgcatggaaatggtaccctgcatcctgtgttggagctagcagcaagagaaacacctctccgcctttcgccagaggacactgtagtcgactcggtccgcactagcctgaggtaa

SEQ ID NO: 5280 - DNA, 153 bp, synthetic construct
  misc_feature 1..153: note = Synthetic
  source 1..153: mol_type = other DNA
agggagatactgttagccctgtgtatacgggacagtcgtgtgcatggaaatggtaccctgcatcctgtgttggagctagcagcaagagaaacacctctccgcctttcaccagaggacactgtagtcgactcggtccgcactagcctgaggtaa

SEQ ID NO: 5281 - DNA, 207 bp, synthetic construct
  source 1..207: mol_type = other DNA
  misc_feature 1..207: note = Synthetic
ttgtgcattcggttgggaagccagcgtatgggcaactcaaatacaaatatacaagtaagccagcagaatactcatattcaagcatcggattcaaaactagagttacacgatcaaaaaacagcgacgctgcaatcaacacaactgttgatctctattggtgctataattatagtagcgctaattccgactcggtccgcactagcctga

SEQ ID NO: 5282 - DNA, 15 bp, synthetic construct
  source 1..15: mol_type = other DNA
  misc_feature 1..15: note = Synthetic
aggaaaaggtcataa

SEQ ID NO: 5283 - DNA, 66 bp, synthetic construct
  misc_feature 1..66: note = Synthetic
  source 1..66: mol_type = other DNA
ataaagacggcgtttacggaagttgttactttaaggaaaactccgactcggtccgcactagcctga

SEQ ID NO: 5284 - DNA, 57 bp, synthetic construct
  misc_feature 1..57: note = Synthetic
  source 1..57: mol_type = other DNA
atggagaagcgagaagttaataaagctctcgactcggtccgcactagcctgaggtaa

SEQ ID NO: 5285 - DNA, 69 bp, synthetic construct
  misc_feature 1..69: note = Synthetic
  source 1..69: mol_type = other DNA
ctgacgcagagattgtgtgtgaggctattaaaaacattggactcgaaggagctactgctgtacaactaa

SEQ ID NO: 5286 - DNA, 207 bp, synthetic construct
  misc_feature 1..207: note = Synthetic
  source 1..207: mol_type = other DNA
ctggcctgtggtgtgtgttgttttttgtgcacgcacgacatgacactcttttgccgcaccgccaacagcaccgccggctacgtcgacatgaacgtctgcatcggcatgatcggcgtggtttgtttcgttttcggggtctttattctcatcttttgctccacgttgaaagctttctacgtcgactcggtccgcactagcctgaggtaa

SEQ ID NO: 5287 - DNA, 39 bp, synthetic construct
  misc_feature 1..39: note = Synthetic
  source 1..39: mol_type = other DNA
atagggtgtgtcacggcattctcgcgtgttatgacctaa

SEQ ID NO: 5288 - DNA, 18 bp, synthetic construct
  source 1..18: mol_type = other DNA
  misc_feature 1..18: note = Synthetic
atggcaagacacaattaa

SEQ ID NO: 5289 - DNA, 120 bp, synthetic construct
  source 1..120: mol_type = other DNA
  misc_feature 1..120: note = Synthetic
atgaagcaactgacgatgaagcagaatccacattatttaacgtataaatggataaattgtatactgccatatttggagtttttttatcttctgaaaatgaggattttaataattttatag

SEQ ID NO: 5290 - DNA, 120 bp, synthetic construct
  source 1..120: mol_type = other DNA
  misc_feature 1..120: note = Synthetic
atgaagcaactgacgatgaagcagaatccacattatttaacgtataagccgataaattgtatactgccatatttggagtttttttatcttctgaaaatgaggattttaataattttatag

SEQ ID NO: 5291 - DNA, 192 bp, synthetic construct
  misc_feature 1..192: note = Synthetic
  source 1..192: mol_type = other DNA
acgaacactttaacagaaatcaaaatgagttctcaagtattctgcatttctacaggtcaaacagtctccgtatgccttccagcaaatgaagacccagtagagtttccaggggcgttcttcactccaaatgctaggaaaccgacggtgtacataaagaaggagaccgactcggtccgcactagcctgaggtaa

SEQ ID NO: 5292 - DNA, 27 bp, synthetic construct
  misc_feature 1..27: note = Synthetic
  source 1..27: mol_type = other DNA
atgctaggaaaccgacggtgtacataa

SEQ ID NO: 5293 - DNA, 174 bp, synthetic construct
  misc_feature 1..174: note = Synthetic
  source 1..174: mol_type = other DNA
atcaaagccagttctcaagtattctgcatttctacaggtcaaacagtctccgtatgccttccagcaaatgaagacccagtagagtttccaggggcgttcttcactccaaatgctaggaaaccgacggtgtacataaagaaggagaccgactcggtccgcactagcctgaggtaa

SEQ ID NO: 5294 - DNA, 174 bp, synthetic construct
  source 1..174: mol_type = other DNA
  misc_feature 1..174: note = Synthetic
gtggcaatgagagtgaaggagaaatatcagcacttgtggagatgggggtggagatggggcaccatgctccttgggatgttgatgatctgtagtgctacagaaaaattgtgggtcacagtctattatggggtacctgtgtggaaggacgactcggtccgcactagcctgaggtaa

SEQ ID NO: 5295 - DNA, 180 bp, synthetic construct
  misc_feature 1..180: note = Synthetic
  source 1..180: mol_type = other DNA
aagacagtggcagccagagtgaaggagaaatatcagcacttgtggagatgggggtggagatggggcaccatgctccttgggatgttgatgatctgtagtgctacagaaaaattgtgggtcacagtctattatggggtacctgtgtggaaggacgactcggtccgcactagcctgaggtaa

SEQ ID NO: 5296 - DNA, 138 bp, synthetic construct
  source 1..138: mol_type = other DNA
  misc_feature 1..138: note = Synthetic
ctggaaaacgggtcatacagctcagcagaaagacttttgagacagagttccagaaaacaaaacatcaagagtgggactttgtcgccacaactgacatttcagagatgggcgccaactttaaagctgaccgtgtcatag

SEQ ID NO: 5297 - DNA, 111 bp, synthetic construct
  misc_feature 1..111: note = Synthetic
  source 1..111: mol_type = other DNA
atgggcgccaactttaaagctgaccgtgtcatagattccaggagatgcctaaagccggtcatacttgatggcgagagagtcattctggcgactcggtccgcactagcctga

SEQ ID NO: 5298 - DNA, 72 bp, synthetic construct
  misc_feature 1..72: note = Synthetic
  source 1..72: mol_type = other DNA
gtgaacgagaaaatgtggatgtgtgttttctcagatttaattttattggccttttccaggccgtatatgtga

SEQ ID NO: 5299 - DNA, 60 bp, synthetic construct
  misc_feature 1..60: note = Synthetic
  source 1..60: mol_type = other DNA
atggcaaagcgagtaataccgtgttttcagccttttggatcccgaaggatagtgctgtga

SEQ ID NO: 5300 - DNA, 207 bp, synthetic construct
  misc_feature 1..207: note = Synthetic
  source 1..207: mol_type = other DNA
ctggcctgtggtgtgtgttgttttttgtgcacgcacgacgccacactcttttgccgcaccgccaacagcaccgccggctacgtcgacatgaacgtctgcatcggcatgatcggcgtggtttgtttcgttttcggggtctttattctcatcttttgctccacgttgaaagctttctacgtcgactcggtccgcactagcctgaggtaa

SEQ ID NO: 5301 - DNA, 51 bp, synthetic construct
  source 1..51: mol_type = other DNA
  misc_feature 1..51: note = Synthetic
atagctatggatatctcgttaagaatattctcgataagagacataatgtag

SEQ ID NO: 5302 - DNA, 21 bp, synthetic construct
  misc_feature 1..21: note = Synthetic
  source 1..21: mol_type = other DNA
atgaagagagttgcgacatga

SEQ ID NO: 5303 - DNA, 18 bp, synthetic construct
  source 1..18: mol_type = other DNA
  misc_feature 1..18: note = Synthetic
atgaaatatttcgcataa

SEQ ID NO: 5304 - DNA, 72 bp, synthetic construct
  misc_feature 1..72: note = Synthetic
  source 1..72: mol_type = other DNA
atggatatggttgtgcgaagtcatgttgggtcaaggatctcggtccaagttattaggagcctatgtcactga

SEQ ID NO: 5305 - DNA, 57 bp, synthetic construct
  source 1..57: mol_type = other DNA
  misc_feature 1..57: note = Synthetic
atagacaaggcagcattaactggatggggatggcctacagagtcctggctgatgtga

SEQ ID NO: 5306 - DNA, 204 bp, synthetic construct
  misc_feature 1..204: note = Synthetic
  source 1..204: mol_type = other DNA
attaactggatggggatggcctacagagtcctggctgatgtgatgaggggaattcgcatggacgggttttttatttcatcagatgcagaggaacttctccagaatcttcgagaatggatgtacttcagttggatgactgagcggcagcagcgaaaggacggccgcaggaggggtatctgctcgactcggtccgcactagcctga

SEQ ID NO: 5307 - DNA, 33 bp, synthetic construct
  misc_feature 1..33: note = Synthetic
  source 1..33: mol_type = other DNA
atgccacaaatgaaaaaaatacttaaaatgtaa

SEQ ID NO: 5308 - DNA, 87 bp, synthetic construct
  source 1..87: mol_type = other DNA
  misc_feature 1..87: note = Synthetic
ctggaaaacgggtcatacagctcagcagaaagacttttgagacagagttccagaaaacaaaacatcaagagtgggactttgtcgtga

SEQ ID NO: 5309 - DNA, 111 bp, synthetic construct
  source 1..111: mol_type = other DNA
  misc_feature 1..111: note = Synthetic
atgggcgccaactttaaagctgaccgtgtcatagattccaggagatgcctaaagccggtcatacttggccgcgagagagtcattctggcgactcggtccgcactagcctga

SEQ ID NO: 5310 - DNA, 45 bp, synthetic construct
  source 1..45: mol_type = other DNA
  misc_feature 1..45: note = Synthetic
ctgaggaagattaagaaaaactcgactcggtccgcactagcctga

SEQ ID NO: 5311 - DNA, 186 bp, synthetic construct
  source 1..186: mol_type = other DNA
  misc_feature 1..186: note = Synthetic
ctgagcgacagggagctgatgcacagcctgcagagggcgctggcgggcgccggggacgaggagcgcgaggcttacttcgacatgggagccgatctgcagtggcgtcccagcgcgcgcgccttggaggcggcgggctaccccgacgaggaggatcgggacgactcggtccgcactagcctgaggtaa

SEQ ID NO: 5312 - DNA, 36 bp, synthetic construct
  misc_feature 1..36: note = Synthetic
  source 1..36: mol_type = other DNA
atgacccgaccgacgatatcgaagcctacgcgctga

SEQ ID NO: 5313 - DNA, 153 bp, synthetic construct
  source 1..153: mol_type = other DNA
  misc_feature 1..153: note = Synthetic
gtgttcgatccgaaaggctgggcgctgttccgttccttcaaagccgtcaaggagaagctggatacccgtcgtggctctaattccgagctggagacagcggtgaaagacctgggcaaagcggtgtccgactcggtccgcactagcctgaggtaa

SEQ ID NO: 5314 - DNA, 153 bp, synthetic construct
  source 1..153: mol_type = other DNA
  misc_feature 1..153: note = Synthetic
gtgttcgatccgaaaggctgggcgctgttccgttccttcaaagccgtcaaggaggccctggatacccgtcgtggctctaattccgagctggagacagcggtgaaagacctgggcaaagcggtgtccgactcggtccgcactagcctgaggtaa

SEQ ID NO: 5315 - DNA, 75 bp, synthetic construct
  source 1..75: mol_type = other DNA
  misc_feature 1..75: note = Synthetic
atggatgattcaagaataccgaagcgactggcgagacagactttccccgactcggtccgcactagcctgaggtaa

SEQ ID NO: 5316 - DNA, 195 bp, synthetic construct
  source 1..195: mol_type = other DNA
  misc_feature 1..195: note = Synthetic
atggcagcccgacttccaatcgacgcctttggcatttcagtgattcagcaaaacggtctcaaagtatacacaattctacctacaagcatgctaatcacactgactgaacaaacggcatctagcaagttgtatgctatacctgagaaacatctagactcattaaatgagcgtgatcgacgactcggtccgcactag

SEQ ID NO: 5317 - DNA, 168 bp, synthetic construct
  misc_feature 1..168: note = Synthetic
  source 1..168: mol_type = other DNA
atgtcccaatcaaaagaagtgaaatccttcctttggttacagactctgagaagagagctctccccgttttgcacggacgtgagagccaaagttgtcaaggatgccgtgagtctgatcaacggccttgatttctctatggtcgactcggtccgcactagcctgaggtaa

SEQ ID NO: 5318 - DNA, 180 bp, synthetic construct
  misc_feature 1..180: note = Synthetic
  source 1..180: mol_type = other DNA
ttgtctcacaatgcctcccaatcaaaagaagtgaaatccttcctttggttacagactctgagaagagagctctccccgttttgcacggacgtgagagccaaagttgtcaaggatgccgtgagtctgatcaacggccttgatttctctatggtcgactcggtccgcactagcctgaggtaa

SEQ ID NO: 5319 - DNA, 30 bp, synthetic construct
  source 1..30: mol_type = other DNA
  misc_feature 1..30: note = Synthetic
atggatcctttctgcagtcaccgtccttga

SEQ ID NO: 5320 - DNA, 84 bp, synthetic construct
  source 1..84: mol_type = other DNA
  misc_feature 1..84: note = Synthetic
gtgaccaaggccacgacgttcctgcagactatgttaaggaaggaggttaacagtcacgactcggtccgcactagcctgaggtaa

SEQ ID NO: 5321 - DNA, 153 bp, synthetic construct
  misc_feature 1..153: note = Synthetic
  source 1..153: mol_type = other DNA
aagagaaagatggaccctgataatcctgacgagggcccttcctccaaggtgccacggcccgagacacccgtgaccaaggccacgacgttcctgcagactatgttaaggaaggaggttaacagtcacgactcggtccgcactagcctgaggtaa

SEQ ID NO: 5322 - DNA, 147 bp, synthetic construct
  source 1..147: mol_type = other DNA
  misc_feature 1..147: note = Synthetic
attctaatcataataacactactcgggtgcacagcagaggaaagcaccaccgaggctgtgactgaagctacaacaactgcaaatcctctagccacggacactccactaaggcgcagggtcgactcggtccgcactagcctgaggtaa

SEQ ID NO: 5323 - DNA, 159 bp, synthetic construct
  source 1..159: mol_type = other DNA
  misc_feature 1..159: note = Synthetic
ataaggccattcattctaatcataataacactactcgggtgcacagcagaggaaagcaccaccgaggctgtgactgaagctacaacaactgcaaatcctctagccacggacactccactaaggcgcagggtcgactcggtccgcactagcctgaggtaa

SEQ ID NO: 5324 - DNA, 30 bp, synthetic construct
  source 1..30: mol_type = other DNA
  misc_feature 1..30: note = Synthetic
atggcaaccgactcttcctttacgtcgtag

SEQ ID NO: 5325 - DNA, 15 bp, synthetic construct
  misc_feature 1..15: note = Synthetic
  source 1..15: mol_type = other DNA
atgcttcactattga

SEQ ID NO: 5326 - DNA, 33 bp, synthetic construct
  misc_feature 1..33: note = Synthetic
  source 1..33: mol_type = other DNA
ttgaatttctttttgcgactcggtccgcactag

SEQ ID NO: 5327 - DNA, 192 bp, synthetic construct
  source 1..192: mol_type = other DNA
  misc_feature 1..192: note = Synthetic
gtgtctaacttctcgttgataatcaaccagctaactctcaacatgttcaccaacaaagctatccttgctgtttatcaactccctgaagagtgcacactcgaattggtcgttcgtgacgcgtccggaaacattgtcgactcttgctacgctgagcttttccaactacgtgggaaccgactcggtccgcactag

SEQ ID NO: 5328 - DNA, 138 bp, synthetic construct
  misc_feature 1..138: note = Synthetic
  source 1..138: mol_type = other DNA
ttgctgtttatcaactccctgaagagtgcacactcgaattggtcgttcgtgacgcgtccggaaacattgtcgactcttgctacgctgagcttttccaactacgtgggaaccgactcggtccgcactagcctgaggtaa

SEQ ID NO: 5329 - DNA, 153 bp, synthetic construct
  misc_feature 1..153: note = Synthetic
  source 1..153: mol_type = other DNA
ttgtcgatgacgacgacgagatcgaggacgtgtagctgcaccgcgacaggggccacaagcacgcaacgtcgcactggcctgcaaacgcgaaactggactgagccgcaagcacacgacggaacgttggcccgcaaacacgagactgagtgctga

SEQ ID NO: 5330 - DNA, 24 bp, synthetic construct
  source 1..24: mol_type = other DNA
  misc_feature 1..24: note = Synthetic
atgaagatcgtaggcgtgcattga

SEQ ID NO: 5331 - DNA, 120 bp, synthetic construct
  source 1..120: mol_type = other DNA
  misc_feature 1..120: note = Synthetic
gtgaacgggaccggcaacatagtgcgagcaatggccacattggccaagagcttgaagaactttaaaaaactgcgtggacccattgtacacctcgactcggtccgcactagcctgaggtaa

SEQ ID NO: 5332 - DNA, 27 bp, synthetic construct
  misc_feature 1..27: note = Synthetic
  source 1..27: mol_type = other DNA
atgagacggataggtgggcacgagtag

SEQ ID NO: 5333 - DNA, 183 bp, synthetic construct
  misc_feature 1..183: note = Synthetic
  source 1..183: mol_type = other DNA
atgattctctggcgtgggggccccggaaaaggagtgggtgggactaagacgtcgcaattaccgtcgaacggactcgccgagatggtctatggatgggagggtcaccgcgtaaacaccgatgccacagtgcatagtaccactcgcgacttctctgcgaggacgactcggtccgcactagcctga

SEQ ID NO: 5334 - DNA, 15 bp, synthetic construct
  misc_feature 1..15: note = Synthetic
  source 1..15: mol_type = other DNA
atgttactgacgtga

SEQ ID NO: 5335 - DNA, 39 bp, synthetic construct
  misc_feature 1..39: note = Synthetic
  source 1..39: mol_type = other DNA
atgtataagcgtcgaatcccagttaacaaacctccatga

SEQ ID NO: 5336 - DNA, 72 bp, synthetic construct
  source 1..72: mol_type = other DNA
  misc_feature 1..72: note = Synthetic
atgaatattagaattatgtctgtttttgagcgacgtattccgatcgactcggtccgcactagcctgaggtaa

SEQ ID NO: 5337 - DNA, 195 bp, synthetic construct
  source 1..195: mol_type = other DNA
  misc_feature 1..195: note = Synthetic
acgttcagcatcatgtttggctatatgcaactcatcaaccccacttctgacatttatattaaagactatggaaacttttctgggattgttgcacatcaagcctatgatccgattcgcagggaccacatgctccttcgttcgatgaaactccatttcggacctaattccaagccgactcggtccgcactagcctga

SEQ ID NO: 5338 - DNA, 162 bp, synthetic construct
  source 1..162: mol_type = other DNA
  misc_feature 1..162: note = Synthetic
atcaaccccacttctgacatttatattaaagactatggaaacttttctgggattgttgcacatcaagcctatgatccgattcgcagggaccacatgctccttcgttcgatgaaactccatttcggacctaattccaagccgactcggtccgcactagcctga

SEQ ID NO: 5339 - DNA, 189 bp, synthetic construct
  source 1..189: mol_type = other DNA
  misc_feature 1..189: note = Synthetic
atgccggctcttgctataatcggtgactcactactaactgcttctctcattgacaaatacgtaccaccaagtagcaatgctcaggtttttggattcgttgcgcacacacattctgtcaaaccattgattccgcagataattggtattccagaggactctctcgactcggtccgcactagcctgaggtaa

SEQ ID NO: 5340 - DNA, 78 bp, synthetic construct
  source 1..78: mol_type = other DNA
  misc_feature 1..78: note = Synthetic
ttgacaaatacgtaccaccaagtagcaatgctcaggtttttggattcgttgcgcacacacattctgtcaaaccattga

SEQ ID NO: 5341 - DNA, 180 bp, synthetic construct
  misc_feature 1..180: note = Synthetic
  source 1..180: mol_type = other DNA
ctggctctcccaaaagaaaactcatggaacatgaagactccaaagagcaatacctcaggactaaagggactgagttggagcaaggaaagggagatgtggagaggcactgtaacagctgagggtaaacagcataactttcgtagtagagatctcgactcggtccgcactagcctgaggtaa

SEQ ID NO: 5342 - DNA, 36 bp, synthetic construct
  source 1..36: mol_type = other DNA
  misc_feature 1..36: note = Synthetic
atgaccatcagcagtgtcctcctagccctgctttga

SEQ ID NO: 5343 - DNA, 81 bp, synthetic construct
  misc_feature 1..81: note = Synthetic
  source 1..81: mol_type = other DNA
ctgcactactttaccaccttgaaacaatacctacgtaacctggcctttgcgtggcgctatcgcaaggtccggtcgtcatga

SEQ ID NO: 5344 - DNA, 69 bp, synthetic construct
  source 1..69: mol_type = other DNA
  misc_feature 1..69: note = Synthetic
atgaccagcaacgccctgtatgagctgtttcgacgtcggttcgactcggtccgcactagcctgaggtaa

SEQ ID NO: 5345 - DNA, 168 bp, synthetic construct
  misc_feature 1..168: note = Synthetic
  source 1..168: mol_type = other DNA
atgatgtcgactcggttaatgccaatgagtttgaccctgatacaggatacctggattttaaaaataactatccaggggcactcaatacaaataccgctaggacattcttcctcaatgccgcaaaggccaagaatgtgctccgactcggtccgcactagcctgaggtaa

SEQ ID NO: 5346 - DNA, 132 bp, synthetic construct
  source 1..132: mol_type = other DNA
  misc_feature 1..132: note = Synthetic
ctgatacaggatacctggattttaaaaataactatccaggggcactcaatacaaataccgctaggacattcttcctcaatgccgcaaaggccaagaatgtgctccgactcggtccgcactagcctgaggtaa

SEQ ID NO: 5347 - DNA, 114 bp, synthetic construct
  misc_feature 1..114: note = Synthetic
  source 1..114: mol_type = other DNA
ttgagagacagagatcctaatgataccaggaaccaattcaagaataatgctttacacgcataccttttcaatgagcattgtaataacgactcggtccgcactagcctgaggtaa

SEQ ID NO: 5348 - DNA, 189 bp, synthetic construct
  source 1..189: mol_type = other DNA
  misc_feature 1..189: note = Synthetic
attcacttctattcagtcaaaatgtttgattatctggaaaatgaggaggtggctctcgatgaacttaaacagatgttgagagatagagatcctaatgataccaggaaccaattcaagaataatgctctacatgcataccttttcaatgagcactgtaataacgactcggtccgcactagcctgaggtaa

SEQ ID NO: 5349 - DNA, 207 bp, synthetic construct
  source 1..207: mol_type = other DNA
  misc_feature 1..207: note = Synthetic
ctgtccgctatagtcaagatcgcgaccgtagctgcctccacgcgtaccaaagagaaaaccaaagaaaagaaaaatgaagaacttacaagcataaacgaaccaactcaagctcaagataccaaagtttcatctagtttagacctcgtaagctcgcgtgatcgcccgaagcaagagaatgataagacggaacgactcggtccgcactag

SEQ ID NO: 5350 - DNA, 180 bp, synthetic construct
  source 1..180: mol_type = other DNA
  misc_feature 1..180: note = Synthetic
ctggctctcccaaaagaaaactcatggaacatgaagactccaaagagcaatacctcaggactaaagggactgagttggagcaaggaaagggagatgtggagaggcactgtaacagctgagggtaaacagcataactttcgtagtagaggcctcgactcggtccgcactagcctgaggtaa

SEQ ID NO: 5351 - DNA, 114 bp, synthetic construct
  source 1..114: mol_type = other DNA
  misc_feature 1..114: note = Synthetic
ttgcctctgtttctccaggcgctccaggtactgctgcacgtcggacgccagctgctggccaaacatcgcgggcgaggcgggggcggcgactcggtccgcactagcctgaggtaa

SEQ ID NO: 5352 - DNA, 39 bp, synthetic construct
  source 1..39: mol_type = other DNA
  misc_feature 1..39: note = Synthetic
atgggcctccctgttctcagcggtccaaattcctgctga

SEQ ID NO: 5353 - DNA, 132 bp, synthetic construct
  source 1..132: mol_type = other DNA
  misc_feature 1..132: note = Synthetic
aagattatgccatattcaacgaaaggtcctcttcattgccaatatgctgcgaaaatgcgacaatggttagatctccttgctcatactatacacctgaacactctcgagggtaagctctgtctcgcaatctag

SEQ ID NO: 5354 - DNA, 138 bp, synthetic construct
  source 1..138: mol_type = other DNA
  misc_feature 1..138: note = Synthetic
atgaccatcagcagtgtcctcctagccctgcttttgcccgctttgctattcgcgttcctgcactactttaccaccttgaaacaatacctacgtaacctggcctttgcgtggcgctatcgcaaggtccggtcgtcatga

SEQ ID NO: 5355 - DNA, 138 bp, synthetic construct
  misc_feature 1..138: note = Synthetic
  source 1..138: mol_type = other DNA
atgaccatcagcagtgtcctcctagccctggttttatgcgctttgctattcgcgttcctgcactactttaccaccttgaaacaatacctacgtaacctggcctttgcgtggcgctatcgcaaggtccggtcgtcatga

SEQ ID NO: 5356 - DNA, 168 bp, synthetic construct
  source 1..168: mol_type = other DNA
  misc_feature 1..168: note = Synthetic
atggcggggatggggaagccctacggcggccgcccgggggacgcgttcgagggtctcgttcagcgcatcaggctcattgttcccgccacgctgcgcggcgggggtggggagtcgggcccctactcgccatccaacccgcccgactcggtccgcactagcctgaggtaa

SEQ ID NO: 5357 - DNA, 153 bp, synthetic construct
  misc_feature 1..153: note = Synthetic
  source 1..153: mol_type = other DNA
aagccctacggcggccgcccgggggacgcgttcgagggtctcgttcagcgcatcaggctcattgttcccgccacgctgcgcggcgggggtggggagtcgggcccctactcgccatccaacccgcccgactcggtccgcactagcctgaggtaa

SEQ ID NO: 5358 - DNA, 114 bp, synthetic construct
  source 1..114: mol_type = other DNA
  misc_feature 1..114: note = Synthetic
ctggtgcctagcgttgcattgctgtttcctcccctggtactcgtcgaaggcaacgggagatccgaccaccgggggatgcatacagccttatgctatcgactcggtccgcactag

SEQ ID NO: 5359 - DNA, 213 bp, synthetic construct
  misc_feature 1..213: note = Synthetic
  source 1..213: mol_type = other DNA
atcgactcccagctggaccgctacgaaatgcgcgtatggggatgggggccgggtgaggaaagctggctgattgaccggcagattattatgggccgccacgacgatgaacagacgctgctgcgtgtggatgaggccatcaataaaacctatacccgccggaatggtgcagaaatgtcgatatcccgtatctcgactcggtccgcactagcctga

SEQ ID NO: 5360 - DNA, 213 bp, synthetic construct
  source 1..213: mol_type = other DNA
  misc_feature 1..213: note = Synthetic
atcgactcccagctggaccgctacgaaatgcgcgtatggggatgggggccgggtgaggaaagctggctgattgaccggcagattattatgggccgccacgacgatgaacagacgctgctgcgtgtggatgaggccgccaataaaacctatacccgccggaatggtgcagaaatgtcgatatcccgtatctcgactcggtccgcactagcctga

SEQ ID NO: 5361 - DNA, 18 bp, synthetic construct
  source 1..18: mol_type = other DNA
  misc_feature 1..18: note = Synthetic
atggaggctcgggagtaa

SEQ ID NO: 5362 - DNA, 33 bp, synthetic construct
  misc_feature 1..33: note = Synthetic
  source 1..33: mol_type = other DNA
aggaatatgacgactcggtccgcactagcctga

SEQ ID NO: 5363 - DNA, 102 bp, synthetic construct
  source 1..102: mol_type = other DNA
  misc_feature 1..102: note = Synthetic
atgacagcgacggagaggaagaagagatggcgtccgggctcggtgacctctcggtcggcgtgtccagccttcccatgcgggaactggcctggcggcgggtag

SEQ ID NO: 5364 - DNA, 168 bp, synthetic construct
  misc_feature 1..168: note = Synthetic
  source 1..168: mol_type = other DNA
atggccgacatttccccaggcgcttttgcgccttgtgtaaaagcgcggcgtcccgctctccgatccccgcccctgggcacgcgcaagcgcaagcgcccttcccgccccctctcatcggagtctgaggtagaatccgataccgactcggtccgcactagcctgaggtaa

SEQ ID NO: 5365 - DNA, 192 bp, synthetic construct
  misc_feature 1..192: note = Synthetic
  source 1..192: mol_type = other DNA
gtggtcctccgggacgttttctgggccgccgacatttccccaggcgcttttgcgccttgtgtaaaagcgcggcgtcccgctctccgatccccgcccctgggcacgcgcaagcgcaagcgcccttcccgccccctctcatcggagtctgaggtagaatccgataccgactcggtccgcactagcctgaggtaa

SEQ ID NO: 5366 - DNA, 114 bp, synthetic construct
  misc_feature 1..114: note = Synthetic
  source 1..114: mol_type = other DNA
acgttgaccagaaaggtaactaggcccaaaattcatacagggagaatgatcttaatccgcagcgttcagttcaaggatataacatctgtcgggcagtgcggtctatgtgattag

SEQ ID NO: 5367 - DNA, 183 bp, synthetic construct
  misc_feature 1..183: note = Synthetic
  source 1..183: mol_type = other DNA
atggagcaaccacccgaggacgaggcccctcaaagagaaccatacaatgaatggctaattgacaccttagcagaagttcaagaagaagctttaaagcattttgatagacgcttattgcatgcagtaggaagctggatctacaaaacctatggggatacatcgactcggtccgcactagcctga

SEQ ID NO: 5368 - DNA, 207 bp, synthetic construct
  misc_feature 1..207: note = Synthetic
  source 1..207: mol_type = other DNA
atgcgcgacggtagtcaagagtcaagcgaagtagggagttcgatcttcttcggacgatggagagaccaactgtgcacaatcgttaaacgattgcgaacatacgaggtggaccacagaaggagagaggagcagggatactacttcagatcacatgcgtaccccgtgcagtgtcgccggcccgactcggtccgcactagcctgaggtaa

SEQ ID NO: 5369 - DNA, 21 bp, synthetic construct
  misc_feature 1..21: note = Synthetic
  source 1..21: mol_type = other DNA
acgggggcggacattatttaa

SEQ ID NO: 5370 - DNA, 168 bp, synthetic construct
  misc_feature 1..168: note = Synthetic
  source 1..168: mol_type = other DNA
atggccttctatctcccagactggtcgtgctgcgggctctggctctttggccggcccaggaatagatacagccagctccctgaggagccggagacctttgagtgcccggaccgctggcgagccgagatagatctgggcctcgactcggtccgcactagcctgaggtaa

SEQ ID NO: 5371 - DNA, 171 bp, synthetic construct
  source 1..171: mol_type = other DNA
  misc_feature 1..171: note = Synthetic
acggccgccttctatctcccagactggtcgtgctgcgggctctggctctttggccggcccaggaatagatacagccagctccctgaggagccggagacctttgagtgcccggaccgctggcgagccgagatagatctgggcctcgactcggtccgcactagcctgaggtaa

SEQ ID NO: 5372 - DNA, 15 bp, synthetic construct
  misc_feature 1..15: note = Synthetic
  source 1..15: mol_type = other DNA
gtggacattatttaa

SEQ ID NO: 5373 - DNA, 168 bp, synthetic construct
  source 1..168: mol_type = other DNA
  misc_feature 1..168: note = Synthetic
atgactacgtccggcgttccatttggcatgacactacgaccaacacgatctcggttgtctcggcgcactccgtacagtagggatcgcctacctccttttgagacagagacccgcgctaccatactggaggatcatccgctcgactcggtccgcactagcctgaggtaa

SEQ ID NO: 5374 - DNA, 207 bp, synthetic construct
  source 1..207: mol_type = other DNA
  misc_feature 1..207: note = Synthetic
ctgtttgtcacgcccgcacctggttttgcttcaggaaatgccactacgtccggcgttccatttggcatgacactacgaccaacacgatctcggttgtctcggcgcactccgtacagtagggatcgcctacctccttttgagacagagacccgcgctaccatactggaggatcatccgctcgactcggtccgcactagcctgaggtaa

SEQ ID NO: 5375 - DNA, 78 bp, synthetic construct
  misc_feature 1..78: note = Synthetic
  source 1..78: mol_type = other DNA
atgcctaggctaattgcagaacatcacgaacgcggtcacgacttggaaaggtaccaactctacgagcccagagcctaa

SEQ ID NO: 5376 - DNA, 36 bp, synthetic construct
  source 1..36: mol_type = other DNA
  misc_feature 1..36: note = Synthetic
atggtctactttaatatgttctcgtctaagagatga

SEQ ID NO: 5377 - DNA, 177 bp, synthetic construct
  misc_feature 1..177: note = Synthetic
  source 1..177: mol_type = other DNA
atccggatgatggagcattcaagagaacggggtagatctagcaacatgcgacataatagccgggaaccatacgaaaatccatcaaggtctcgctcattatctcgggaccctaatcaggttgatcgtagacagcctcgaagtgcatcccacgactcggtccgcactagcctgaggtaa

SEQ ID NO: 5378 - DNA, 171 bp, synthetic construct
  misc_feature 1..171: note = Synthetic
  source 1..171: mol_type = other DNA
atggccgagcattcaagagaacggggtagatctagcaacatgcgacataatagccgggaaccatacgaaaatccatcaaggtctcgctcattatctcgggaccctaatcaggttgatcgtagacagcctcgaagtgcatcccacgactcggtccgcactagcctgaggtaa

SEQ ID NO: 5379 - DNA, 222 bp, synthetic construct
  source 1..222: mol_type = other DNA
  misc_feature 1..222: note = Synthetic
atttgggacctaccaacggaacgtctggacggaccccggttctgccgccggacgatgaagcgggcctgcagccgaagcccctcaccacgccgccgcccatcatcgccacgtcggaccccaccccgcgacgggacgccgccacaaaaagcagacgccgacgaccccactcccggcgcctctaacgatgcctcgaccgactcggtccgcactagcctgaggtaa

SEQ ID NO: 5380 - DNA, 222 bp, synthetic construct
  misc_feature 1..222: note = Synthetic
  source 1..222: mol_type = other DNA
atttgggacctaccaacggaacgtctggacggaccccggttctgccgccggacggccaagcgggcctgcagccgaagcccctcaccacgccgccgcccatcatcgccacgtcggaccccaccccgcgacgggacgccgccacaaaaagcagacgccgacgaccccactcccggcgcctctaacgatgcctcgaccgactcggtccgcactagcctgaggtaa

SEQ ID NO: 5381 - DNA, 24 bp, synthetic construct
  source 1..24: mol_type = other DNA
  misc_feature 1..24: note = Synthetic
atagatatacgacagaccccgtaa

SEQ ID NO: 5382 - DNA, 168 bp, synthetic construct
  misc_feature 1..168: note = Synthetic
  source 1..168: mol_type = other DNA
atgaccagcgcgcacgctgcctacatcgactacgcgctgcggcgcaccgcgcacatgccctccgagatgcagggcgtggaggagtccgtgcgcctcaaggactaccagctcttcgtggcgcgcgtgttcctgggcctggacgactcggtccgcactagcctgaggtaa

SEQ ID NO: 5383 - DNA, 144 bp, synthetic construct
  misc_feature 1..144: note = Synthetic
  source 1..144: mol_type = other DNA
atcgactacgcgctgcggcgcaccgcgcacatgccctccgagatgcagggcgtggaggagtccgtgcgcctcaaggactaccagctcttcgtggcgcgcgtgttcctgggcctggacgactcggtccgcactagcctgaggtaa

SEQ ID NO: 5384 - DNA, 30 bp, synthetic construct
  misc_feature 1..30: note = Synthetic
  source 1..30: mol_type = other DNA
ataccttcgactcggtccgcactagcctga

SEQ ID NO: 5385 - DNA, 198 bp, synthetic construct
  misc_feature 1..198: note = Synthetic
  source 1..198: mol_type = other DNA
atgggaaatcgagtttccacgtatagtcctcaatacatcacaatcaaaggaaataacaatgcacttgacacgaagactatggagcgatttgatcagaccaactctgttgatgcagctgttaaacttccagatggaataaaccctacaatagcggagttcaattctatttatgacatgagacgactcggtccgcactag

SEQ ID NO: 5386 - DNA, 180 bp, synthetic construct
  misc_feature 1..180: note = Synthetic
  source 1..180: mol_type = other DNA
acgtatagtcctcaatacatcacaatcaaaggaaataacaatgcacttgacacgaagactatggagcgatttgatcagaccaactctgttgatgcagctgttaaacttccagatggaataaaccctacaatagcggagttcaattctatttatgacatgagacgactcggtccgcactag

SEQ ID NO: 5387 - DNA, 195 bp, synthetic construct
  source 1..195: mol_type = other DNA
  misc_feature 1..195: note = Synthetic
aggaaaacgacccaagactttagagattgctttggactcaaacacgaaatactttccgcaatttacaatgataaaagcactttctctagcgaaaatggactcgttcaaattctggaagaagcagaggttaacgctttaggagaattaattcgcgacggtacagttgcaatatcgactcggtccgcactagcctga

SEQ ID NO: 5388 - DNA, 96 bp, synthetic construct
  misc_feature 1..96: note = Synthetic
  source 1..96: mol_type = other DNA
acgaaatactttccgcaatttacaatgataaaagcactttctctagcgaaaatggactcgttcaaattctggaagaagcagaggttaacgctttag

SEQ ID NO: 5389 - DNA, 204 bp, synthetic construct
  misc_feature 1..204: note = Synthetic
  source 1..204: mol_type = other DNA
ctgttgttcaggaaaacgacccaagactttagagattgctttggactcaaacacgaaatactttccgcaatttacaatgataaaagcactttctctagcgaaaatggactcgttcaaattctggaagaagcagaggttaacgctttaggagaattaattcgcgacggtacagttgcaatatcgactcggtccgcactagcctga

SEQ ID NO: 5390 - DNA, 207 bp, synthetic construct
  source 1..207: mol_type = other DNA
  misc_feature 1..207: note = Synthetic
ctgtccgctatagtcaagatcgcgaccgtagctatgtccacgcgtaccaaagagaaaaccaaagaaaagaaaaatgaagaacttacaagcataaacgaaccaactcaagctcaagataccaaagtttcatctagtttagacctcgtaagctcgcgtgatcgcccgaagcaagagaatgataagacggaacgactcggtccgcactag

SEQ ID NO: 5391 - DNA, 48 bp, synthetic construct
  source 1..48: mol_type = other DNA
  misc_feature 1..48: note = Synthetic
ttggccagccgggagttcgtgacgcggtcgctctatactgtactataa

SEQ ID NO: 5392 - DNA, 168 bp, synthetic construct
  source 1..168: mol_type = other DNA
  misc_feature 1..168: note = Synthetic
atggagtcgcgagacctgggcgtcgccgtgggcgcgaccatcctaatgctgctgatagtggtaacaaacggggccaccatcgcgcgccgcggcgcgccctcgctgggcatccgctcgcgcggggcgctgcgcgtgctcaccgactcggtccgcactagcctgaggtaa

SEQ ID NO: 5393 - DNA, 198 bp, synthetic construct
  misc_feature 1..198: note = Synthetic
  source 1..198: mol_type = other DNA
atgctcgatgcgatgcactcgcttatgcggcacatgagcgcactgagaagcgtcctggactgtcacgggaacaatggctccgggagtgcacacgcaagtctactgagcagcgcgcgcgccgtgcgtgccatggccgagatcacgctgaccagcctggagaccatgccgtacgtgccgactcggtccgcactagcctga

SEQ ID NO: 5394 - DNA, 192 bp, synthetic construct
  source 1..192: mol_type = other DNA
  misc_feature 1..192: note = Synthetic
atgagctctatcttagacaaaatcaaaagatggcagaacaaaagggctacccaaacatcaagctcaatgatgagttccttaacgaaggtctcaacatcctcgggtgtttcctcagaggaaatgcccaaactgccccaacccaagaagcacagggacacaagggtggtgacgactcggtccgcactagcctga

SEQ ID NO: 5395 - DNA, 192 bp, synthetic construct
  misc_feature 1..192: note = Synthetic
  source 1..192: mol_type = other DNA
atgagctctatcttagacaaaatcaaaaggccgcagaacaaaagggctacccaaacatcaagctcaatgatgagttccttaacgaaggtctcaacatcctcgggtgtttcctcagaggaaatgcccaaactgccccaacccaagaagcacagggacacaagggtggtgacgactcggtccgcactagcctga

SEQ ID NO: 5396 - DNA, 168 bp, synthetic construct
  source 1..168: mol_type = other DNA
  misc_feature 1..168: note = Synthetic
atggcactcgacaagagtatagtggttaacctcacctccagactcttcgccgacgaactggccgcccttcagtcaaaaatagggagcgtactgccgctcggagattgccaccgtttacaaaatatacaggcattgggcctcgactcggtccgcactagcctgaggtaa

SEQ ID NO: 5397 - DNA, 168 bp, synthetic construct
  source 1..168: mol_type = other DNA
  misc_feature 1..168: note = Synthetic
atggcactcgacaagagtatagtggttaacttcacctccagactcttcgctgatgaactggccgcccttcagtcaaaaatagggagcgtactgccgctcggagattgccaccgtttacaaaatatacaggcattgggcctcgactcggtccgcactagcctgaggtaa

SEQ ID NO: 5398 - DNA, 150 bp, synthetic construct
  source 1..150: mol_type = other DNA
  misc_feature 1..150: note = Synthetic
atagtggttaacctcacctccagactcttcgccgacgaactggccgcccttcagtcaaaaatagggagcgtactgccgctcggagattgccaccgtttacaaaatatacaggcattgggcctcgactcggtccgcactagcctgaggtaa

SEQ ID NO: 5399 - DNA, 147 bp, synthetic construct
  misc_feature 1..147: note = Synthetic
  source 1..147: mol_type = other DNA
gtggttaacttcacctccagactcttcgctgatgaactggccgcccttcagtcaaaaatagggagcgtactgccgctcggagattgccaccgtttacaaaatatacaggcattgggcctcgactcggtccgcactagcctgaggtaa

SEQ ID NO: 5400 - DNA, 153 bp, synthetic construct
  misc_feature 1..153: note = Synthetic
  source 1..153: mol_type = other DNA
atggccctgctcggtgaggctgccatgcatggtgaaaagtattacaggactgtggcttcccgtgtctccaaggaggccgcccaaagtgggatagaaatggtagtcccacgccaccgatctgttctgcgctcgactcggtccgcactagcctga

SEQ ID NO: 5401 - DNA, 222 bp, synthetic construct
  source 1..222: mol_type = other DNA
  misc_feature 1..222: note = Synthetic
atgaaaacgaaaggggatacgggaaaacgtaaaaccttcgtaaacaccacgctcggtgagacgtgggaggcgaaaattggcgaacgtccggatgctgaagtgatggcagagcggaaagagcattattcagcgcccgttcctgaccgtgtggcttacctgaccgccggtatcgactcccagctggaccgctacgacgactcggtccgcactagcctgaggtaa

SEQ ID NO: 5402 - DNA, 216 bp, synthetic construct
  misc_feature 1..216: note = Synthetic
  source 1..216: mol_type = other DNA
acgaaaggggatacgggaaaacgtaaaaccttcgtaaacaccacgctcggtgagacgtgggaggcgaaaattggcgaacgtccggatgctgaagtgatggcagagcggaaagagcattattcagcgcccgttcctgaccgtgtggcttacctgaccgccggtatcgactcccagctggaccgctacgacgactcggtccgcactagcctgaggtaa

SEQ ID NO: 5403 - DNA, 135 bp, synthetic construct
  misc_feature 1..135: note = Synthetic
  source 1..135: mol_type = other DNA
acggagccgaccacgctgcctatcgtgtcggtttccgagttagccccgcctcctcgatggtcggacatcgaggaactcttggaaaaggcggtgcagagcgtcatgaaggacgccgagtcaatgcagatgacctga

SEQ ID NO: 5404 - DNA, 30 bp, synthetic construct
  source 1..30: mol_type = other DNA
  misc_feature 1..30: note = Synthetic
ttgtacacgactcggtccgcactagcctga

SEQ ID NO: 5405 - DNA, 174 bp, synthetic construct
  source 1..174: mol_type = other DNA
  misc_feature 1..174: note = Synthetic
atacgcatggcatcgcgggggctagacctctggctggatgagcacgtgtggaagaggaaacaggagattggtgtgaaaggagaaaatctgcttctccccgacttatggctagatttcctacaactcagccccatcttccagcgcaacgactcggtccgcactagcctgaggtaa

SEQ ID NO: 5406 - DNA, 174 bp, synthetic construct
  source 1..174: mol_type = other DNA
  misc_feature 1..174: note = Synthetic
atacgcgccgcatcgcgggggctagacctctggctggatgagcacgtgtggaagaggaaacaggagattggtgtgaaaggagaaaatctgcttctccccgacttatggctagatttcctacaactcagccccatcttccagcgcaacgactcggtccgcactagcctgaggtaa

SEQ ID NO: 5407 - DNA, 51 bp, synthetic construct
  source 1..51: mol_type = other DNA
  misc_feature 1..51: note = Synthetic
atggtgaactcacgcgccggatcgccggtggtcacccagtttttcgggtaa

SEQ ID NO: 5408 - DNA, 69 bp, synthetic construct
  source 1..69: mol_type = other DNA
  misc_feature 1..69: note = Synthetic
ttgtccggcaggaagttctttttgacgccgttttccacgtacgactcggtccgcactagcctgaggtaa

SEQ ID NO: 5409 - DNA, 51 bp, synthetic construct
  source 1..51: mol_type = other DNA
  misc_feature 1..51: note = Synthetic
atggacagaatatatgcttcgcgagggccaatgctgggagttagcctctag

SEQ ID NO: 5410 - DNA, 48 bp, synthetic construct
  misc_feature 1..48: note = Synthetic
  source 1..48: mol_type = other DNA
atggcgctctcggttgaacttcgaatcgtgtttgacctgagaccctga

SEQ ID NO: 5411 - DNA, 54 bp, synthetic construct
  source 1..54: mol_type = other DNA
  misc_feature 1..54: note = Synthetic
atgggtggatggcaggaaaaaaatactgtgggacagcaaaaagcgacgcaatga

SEQ ID NO: 5412 - DNA, 81 bp, synthetic construct
  misc_feature 1..81: note = Synthetic
  source 1..81: mol_type = other DNA
atggataaaaaacccaatgtgatcggtcctaaggggacggtgtcgaaaggttctaaaggagaggcgtccaatgtatgctag

SEQ ID NO: 5413 - DNA, 15 bp, synthetic construct
  misc_feature 1..15: note = Synthetic
  source 1..15: mol_type = other DNA
atgaacaagaaatag

SEQ ID NO: 5414 - DNA, 219 bp, synthetic construct
  misc_feature 1..219: note = Synthetic
  source 1..219: mol_type = other DNA
atgcctgaggtgtacaaagcgattaacattgcgcaaaacaccgcatggaaaatcaacaagaaagtcctagcggtcgccaacgtaatcaccaagtggaagcattgtccggtcgaggacatccctgcgattgagcgtgaagaactcccgatgaaaccggaagacatcgacatgaatcctgaggctctcaccgccgactcggtccgcactagcctgaggtaa

SEQ ID NO: 5415 - DNA, 87 bp, synthetic construct
  source 1..87: mol_type = other DNA
  misc_feature 1..87: note = Synthetic
atggaaaatcaacaagaaagtcctagcggtcgccaacgtaatcaccaagtggaagcattgtccggtcgaggacatccctgcgattga

SEQ ID NO: 5416 - DNA, 93 bp, synthetic construct
  source 1..93: mol_type = other DNA
  misc_feature 1..93: note = Synthetic
atggaaaatcaacaagaaagtcctagcggtcgccaacgtaatcaccaagtggaagcattgtccggtcgaggacatccctgcggccgagcgtga

SEQ ID NO: 5417 - DNA, 72 bp, synthetic construct
  source 1..72: mol_type = other DNA
  misc_feature 1..72: note = Synthetic
atgaaaccggaagacatcgacatgaatcctgaggctctcaccgccgactcggtccgcactagcctgaggtaa

SEQ ID NO: 5418 - DNA, 198 bp, synthetic construct
  misc_feature 1..198: note = Synthetic
  source 1..198: mol_type = other DNA
atgaaaaaaacatgtaacatccctaaaaagatgaatttcctgaagaaaatagtgaagacttgcaaagatgaggagactcccaagtatggggcagcatcagctcctcctgatgatgatgacctttggatgcctccgccggagtatgtccctttgactcaggttaaaggcaacgactcggtccgcactagcctgaggtaa

SEQ ID NO: 5419 - DNA, 198 bp, synthetic construct
  misc_feature 1..198: note = Synthetic
  source 1..198: mol_type = other DNA
atgaaaaaaacatgtaacatccctaaaaaggccaatttcctgaagaaaatagtgaagacttgcaaagatgaggagactcccaagtatggggcagcatcagctcctcctgatgatgatgacctttggatgcctccgccggagtatgtccctttgactcaggttaaaggcaacgactcggtccgcactagcctgaggtaa

SEQ ID NO: 5420 - DNA, 42 bp, synthetic construct
  source 1..42: mol_type = other DNA
  misc_feature 1..42: note = Synthetic
atgacgatccaattgaccccgttgagcctgaacccgaactaa

SEQ ID NO: 5421 - DNA, 84 bp, synthetic construct
  misc_feature 1..84: note = Synthetic
  source 1..84: mol_type = other DNA
atggggtcagtgtacttgagtgctaaaactcccggggggttttcctgtaacccgtcggaagaaacgaagggcggagctacatag

SEQ ID NO: 5422 - DNA, 159 bp, synthetic construct
  source 1..159: mol_type = other DNA
  misc_feature 1..159: note = Synthetic
acggacgatattatcgactatgaatccgatgatctcaccgaatacgaggatgatgaagaagatggagagtcactagaaactagtgatatagatcccaaatcttcttataagattgtagaatcaacatccaccgactcggtccgcactagcctgaggtaa

SEQ ID NO: 5423 - DNA, 57 bp, synthetic construct
  misc_feature 1..57: note = Synthetic
  source 1..57: mol_type = other DNA
atgaatccgatgatctcaccgaatacgaggatgatgaagaagatggagagtcactag

SEQ ID NO: 5424 - DNA, 66 bp, synthetic construct
  misc_feature 1..66: note = Synthetic
  source 1..66: mol_type = other DNA
atgaatccgatgatctcaccgaatacgaggatgatgaagaagaggaagaagatggagagtcactag

SEQ ID NO: 5425 - DNA, 66 bp, synthetic construct
  source 1..66: mol_type = other DNA
  misc_feature 1..66: note = Synthetic
atgaatccgatgatctcactgaatacgaggatgatgatgaagaggaagaagatggagagtcactag

SEQ ID NO: 5426 - DNA, 96 bp, synthetic construct
  source 1..96: mol_type = other DNA
  misc_feature 1..96: note = Synthetic
aggcctcatacatctccttcaatgcggcctccaactcgcggtcccaaatcaaggctgccttggacaatgcgggcgactcggtccgcactagcctga

SEQ ID NO: 5427 - DNA, 168 bp, synthetic construct
  misc_feature 1..168: note = Synthetic
  source 1..168: mol_type = other DNA
atggagtccacggtaggcccagcatgtccgccgggacgcaccgtgactaagcgtccctgggccctggccgaggacacccctcgtggccccgacagcccccccaagcgcccccgccctaacagtcttccgctgacaaccaccgactcggtccgcactagcctgaggtaa

SEQ ID NO: 5428 - DNA, 105 bp, synthetic construct
  misc_feature 1..105: note = Synthetic
  source 1..105: mol_type = other DNA
ctggccgaggacacccctcgtggccccgacagcccccccaagcgcccccgccctaacagtcttccgctgacaaccaccgactcggtccgcactagcctgaggtaa

SEQ ID NO: 5429 - DNA, 168 bp, synthetic construct
  source 1..168: mol_type = other DNA
  misc_feature 1..168: note = Synthetic
atggatccggctttgagatcttatcaccaacggctccgtctgtatacccccgtagcgatgggcatcaatctcgccgccagctcacaacctttggatccggaaggcccgatcgccgttactcccaggcctccgattcgtcccgactcggtccgcactagcctgaggtaa

SEQ ID NO: 5430 - DNA, 96 bp, synthetic construct
  source 1..96: mol_type = other DNA
  misc_feature 1..96: note = Synthetic
atctcgccgccagctcacaacctttggatccggaaggcccgatcgccgttactcccaggcctccgattcgtcccgactcggtccgcactagcctga

SEQ ID NO: 5431 - DNA, 156 bp, synthetic construct
  source 1..156: mol_type = other DNA
  misc_feature 1..156: note = Synthetic
atggatgaggaagtgatatttgaaactcctagagaattaatatctattaaacgaataaaagatattccaagatcaaaagacacgcacgtgtttgctgcgtgtataacaagtgacggatatccgttaatcgactcggtccgcactagcctgaggtaa

SEQ ID NO: 5432 - DNA, 168 bp, synthetic construct
  misc_feature 1..168: note = Synthetic
  source 1..168: mol_type = other DNA
atgggaattacaatggatgaggaagtgatatttgaaactcctagagaattaatatctattaaacgaataaaagatattccaagatcaaaagacacgcacgtgtttgctgcgtgtataacaagtgacggatatccgttaatcgactcggtccgcactagcctgaggtaa

SEQ ID NO: 5433 - DNA, 168 bp, synthetic construct
  source 1..168: mol_type = other DNA
  misc_feature 1..168: note = Synthetic
atgggaattacaatggatgaggaagtgatatttgaaactcctagagaattaatatctattaaacgaataaaagatattccaagatcaaaagacacgcacgtgtttgctgcgtgtataacaagtgacggatatccgctaatcgactcggtccgcactagcctgaggtaa

SEQ ID NO: 5434 - DNA, 156 bp, synthetic construct
  source 1..156: mol_type = other DNA
  misc_feature 1..156: note = Synthetic
atggatgaggaagtgatatttgaaactcctagagaattaatatctattaaacgaataaaagatattccaagatcaaaagacacgcacgtgtttgctgcgtgtataacaagtgacggatatccgctaatcgactcggtccgcactagcctgaggtaa

SEQ ID NO: 5435 - DNA, 15 bp, synthetic construct
  misc_feature 1..15: note = Synthetic
  source 1..15: mol_type = other DNA
atggccatcaattag

SEQ ID NO: 5436 - DNA, 27 bp, synthetic construct
  misc_feature 1..27: note = Synthetic
  source 1..27: mol_type = other DNA
atcatcaaatatctgcggaccatctga

SEQ ID NO: 5437 - DNA, 24 bp, synthetic construct
  misc_feature 1..24: note = Synthetic
  source 1..24: mol_type = other DNA
atgtcaagtcaccagctaagttga

SEQ ID NO: 5438 - DNA, 66 bp, synthetic construct
  source 1..66: mol_type = other DNA
  misc_feature 1..66: note = Synthetic
ctgcctcactcaagtttcgagttgcgcgcccattgcttgctgccgactcggtccgcactagcctga

SEQ ID NO: 5439 - DNA, 21 bp, synthetic construct
  source 1..21: mol_type = other DNA
  misc_feature 1..21: note = Synthetic
atgcctcaagtcaccagctaa

SEQ ID NO: 5440 - DNA, 24 bp, synthetic construct
  source 1..24: mol_type = other DNA
  misc_feature 1..24: note = Synthetic
atcaaatatctgcggaccatctga

SEQ ID NO: 5441 - DNA, 21 bp, synthetic construct
  misc_feature 1..21: note = Synthetic
  source 1..21: mol_type = other DNA
atgttttactacgaaatgtaa

SEQ ID NO: 5442 - DNA, 72 bp, synthetic construct
  misc_feature 1..72: note = Synthetic
  source 1..72: mol_type = other DNA
atgtcggcgacatgttcatgtatccggaatttgcgaggaaggctttatcaaagcttatttcaaaaaaattaa

SEQ ID NO: 5443 - DNA, 93 bp, synthetic construct
  misc_feature 1..93: note = Synthetic
  source 1..93: mol_type = other DNA
atgaaaaaacaatacttaatcatgtcgccgacgccttcatgtatccggaatttgcgaggaaggctttatcaaagcttatttcaaaaaaattaa

SEQ ID NO: 5444 - DNA, 177 bp, synthetic construct
  misc_feature 1..177: note = Synthetic
  source 1..177: mol_type = other DNA
attccggctgacgctgcgaacctgttcaaagcagtgcgcgaaactatggttgacacatatgagtcttgtgatgtactggctgatttctacgaccagttcgctgaccagttgcacgagtctcaattggacaaaatgccagcacttccggccgactcggtccgcactagcctgaggtaa

SEQ ID NO: 5445 - DNA, 225 bp, synthetic construct
  source 1..225: mol_type = other DNA
  misc_feature 1..225: note = Synthetic
aagtacggaatcgaatcttttgcactggcccacgactccttcggtaccattccggctgacgctgcgaacctgttcaaagcagtgcgcgaaactatggttgacacatatgagtcttgtgatgtactggctgatttctacgaccagttcgctgaccagttgcacgagtctcaattggacaaaatgccagcacttccggccgactcggtccgcactagcctgaggtaa

SEQ ID NO: 5446 - DNA, 105 bp, synthetic construct
  source 1..105: mol_type = other DNA
  misc_feature 1..105: note = Synthetic
aggaggaccaggcctcatacatctccttcaatgcggcctccaactcgcggtcccaaatcaaggctgccttggacaatgcgggcgactcggtccgcactagcctga

SEQ ID NO: 5447 - DNA, 168 bp, synthetic construct
  misc_feature 1..168: note = Synthetic
  source 1..168: mol_type = other DNA
atggcagacacagacgatattatcgactatgaatccgatgatctcaccgaatacgaggatgatgaagaagaggaagaagatggagagtcactagaaactagtgatatagatcccaaatcttcttataagattgtagaatccgactcggtccgcactagcctgaggtaa

SEQ ID NO: 5448 - DNA, 168 bp, synthetic construct
  source 1..168: mol_type = other DNA
  misc_feature 1..168: note = Synthetic
atggcagacacagacgatattatcgactatgaatccgatgatctcactgaatacgaggatgatgatgaagaggaagaagatggagagtcactagaaactagtgatatagatcccaaatcttcttataagattgtagaatccgactcggtccgcactagcctgaggtaa

SEQ ID NO: 5449 - DNA, 129 bp, synthetic construct
  misc_feature 1..129: note = Synthetic
  source 1..129: mol_type = other DNA
ctggagaccaaggacatgaaagtctttctagcaggacttgagggctatgaaaagattagtgatgtccttgggaacctcttcctgcatcgattcagaactggtgaaccgactcggtccgcactagcctga

SEQ ID NO: 5450 - DNA, 168 bp, synthetic construct
  source 1..168: mol_type = other DNA
  misc_feature 1..168: note = Synthetic
atgggatttacaatggatgaggaagtgatatttgaaactcctagagaattaatatctattaaacgaataaaagatattccaagatcaaaagacacgcacgtgtttgctgcgtgtataacaagtgacggatatccgttaatcgactcggtccgcactagcctgaggtaa

SEQ ID NO: 5451 - DNA, 156 bp, synthetic construct
  misc_feature 1..156: note = Synthetic
  source 1..156: mol_type = other DNA
ttgagatcttatcaccaacggctccgtctgtatacccccgtagcgatgggcatcaatctcgccgccagctcacaacctttggatccggaaggcccgatcgccgttactcccaggcctccgattcgtcccgactcggtccgcactagcctgaggtaa

SEQ ID NO: 5452 - DNA, 168 bp, synthetic construct
  source 1..168: mol_type = other DNA
  misc_feature 1..168: note = Synthetic
atgcatccggctttgagatcttatcaccaacggctccgtctgtatacccccgtagcgatgggcatcaatctcgccgccagctcacaacctttggatccggaaggcccgatcgccgttactcccaggcctccgattcgtcccgactcggtccgcactagcctgaggtaa

SEQ ID NO: 5453 - DNA, 168 bp, synthetic construct
  misc_feature 1..168: note = Synthetic
  source 1..168: mol_type = other DNA
atggacccggctttgagatcttatcaccaacggctccgtctgtatacccccgtagcgatgggcatcaatctcgccgccagctcacaacctttggatccggaaggcccgatcgccgttactcccaggcctccgattcgtcccgactcggtccgcactagcctgaggtaa

SEQ ID NO: 5454 - DNA, 30 bp, synthetic construct
  misc_feature 1..30: note = Synthetic
  source 1..30: mol_type = other DNA
ctgctcctgatgtttctgaggtggacctga

SEQ ID NO: 5455 - DNA, 84 bp, synthetic construct
  source 1..84: mol_type = other DNA
  misc_feature 1..84: note = Synthetic
atgcatcgtccgggccatagacgggaattagcgttctactcttcaatgaacacgggttcaccttggatcgcttctacgctttag

SEQ ID NO: 5456 - DNA, 141 bp, synthetic construct
  source 1..141: mol_type = other DNA
  misc_feature 1..141: note = Synthetic
ctggctgcggcagccgtgacagccggagccttagccggagcggtggccagcgctacgagcgcaacctctccggaggcagcacgccgtcagacatgcgctgcgtgctttgtaacgcgaacctgctggagtgcatgtgcctga

SEQ ID NO: 5457 - DNA, 117 bp, synthetic construct
  source 1..117: mol_type = other DNA
  misc_feature 1..117: note = Synthetic
ctgatgaagctaaacgatataaaaattgcagtttttcgtgattctctatcgacatacgtagaacagaagaccggcttaactatacagttcgactcggtccgcactagcctgaggtaa

SEQ ID NO: 5458 - DNA, 168 bp, synthetic construct
  source 1..168: mol_type = other DNA
  misc_feature 1..168: note = Synthetic
atggcagacgaacgaatcggcgactatgttaaaactcgttatgacattgcactaatgaatttaaacgatataaaaattgcagtttttcgtgattctttatcgacatacgttgaacagaagaccggcttaactatacagttcgactcggtccgcactagcctgaggtaa

SEQ ID NO: 5459 - DNA, 201 bp, synthetic construct
  source 1..201: mol_type = other DNA
  misc_feature 1..201: note = Synthetic
atgctcgagagtgtcagcagacgccgtctctgcaacgctcgcaaagcgtcttctgcagtcttgctagcaggcgccacatcgcggcacaggaaccgtaagacctcgtgctcgctagcgtccagctctgccagcagattccgcaggaaagagaaggggattggctcgtgcgccatggcttcgactcggtccgcactagcctga

SEQ ID NO: 5460 - DNA, 126 bp, synthetic construct
  misc_feature 1..126: note = Synthetic
  source 1..126: mol_type = other DNA
atgagtcccaatggttctcatcgcttgcaccatttgcctagcctgactagcaacctccatggcctctgctgcttgctcactcgatccagccatttgctccatagccttagctgtagtgctggctaa

SEQ ID NO: 5461 - DNA, 42 bp, synthetic construct
  source 1..42: mol_type = other DNA
  misc_feature 1..42: note = Synthetic
atgaccgcgccctcggagtccttttttccttttcaatcatga

SEQ ID NO: 5462 - DNA, 57 bp, synthetic construct
  source 1..57: mol_type = other DNA
  misc_feature 1..57: note = Synthetic
ttggtcagactggagacgcagactcagtacgactcggtccgcactagcctgaggtaa

SEQ ID NO: 5463 - DNA, 168 bp, synthetic construct
  source 1..168: mol_type = other DNA
  misc_feature 1..168: note = Synthetic
atggatttcatccgccgcaagtacctagtgcacaccatcgagcgcaacatggatttcctgcgcgcagaggtcgcggagaaggtggccaacttcgcgctgaaccacgtgctggcactgcgctacctggtggcgcagtttcccgactcggtccgcactagcctgaggtaa

SEQ ID NO: 5464 - DNA, 159 bp, synthetic construct
  source 1..159: mol_type = other DNA
  misc_feature 1..159: note = Synthetic
atccgccgcaagtacctagtgcacaccatcgagcgcaacatggatttcctgcgcgcagaggtcgcggagaaggtggccaacttcgcgctgaaccacgtgctggcactgcgctacctggtggcgcagtttcccgactcggtccgcactagcctgaggtaa

SEQ ID NO: 5465 - DNA, 33 bp, synthetic construct
  misc_feature 1..33: note = Synthetic
  source 1..33: mol_type = other DNA
gtgctctcggcgatcgcgcgcgcgcagccatga

SEQ ID NO: 5466 - DNA, 168 bp, synthetic construct
  source 1..168: mol_type = other DNA
  misc_feature 1..168: note = Synthetic
atgatcgtggcggccttcgacctgggcacgcgcaaccccgcacgcaccgtgctggaggtgctcgacggcacggtgcgcgtggtggacgtggccaagctggactggagccgcgactgggagaagcgcgtgcaccgcgacgtcgactcggtccgcactagcctgaggtaa

SEQ ID NO: 5467 - DNA, 162 bp, synthetic construct
  misc_feature 1..162: note = Synthetic
  source 1..162: mol_type = other DNA
gtggcggccttcgacctgggcacgcgcaaccccgcacgcaccgtgctggaggtgctcgacggcacggtgcgcgtggtggacgtggccaagctggactggagccgcgactgggagaagcgcgtgcaccgcgacgtcgactcggtccgcactagcctgaggtaa

SEQ ID NO: 5468 - DNA, 162 bp, synthetic construct
  source 1..162: mol_type = other DNA
  misc_feature 1..162: note = Synthetic
aggatgttggggcgagggatgcgccgccacagacgaaggcgcgctatcagcagacgattagggggtggctttttgccagctcttatacccatcatcgccgcagcgatcggggcgataccaggcatagcttcagtggcggttcaggcctcgcagcgccactaa

SEQ ID NO: 5469 - DNA, 24 bp, synthetic construct
  misc_feature 1..24: note = Synthetic
  source 1..24: mol_type = other DNA
atgtgggaaatgatatttttgtaa

SEQ ID NO: 5470 - DNA, 168 bp, synthetic construct
  misc_feature 1..168: note = Synthetic
  source 1..168: mol_type = other DNA
atgctggagtccacagaggtgtacgatgaccctctggatcctgttgaaccggagttcgatctcaagacaaactccgtcgtaccaaacattttaagaaactcagactacaatctgaactctcccctcttagaagatccttccgactcggtccgcactagcctgaggtaa

SEQ ID NO: 5471 - DNA, 54 bp, synthetic construct
  source 1..54: mol_type = other DNA
  misc_feature 1..54: note = Synthetic
attcgccacatacctagaagaataagacagggcttggaaaggattttgctataa

SEQ ID NO: 5472 - DNA, 168 bp, synthetic construct
  source 1..168: mol_type = other DNA
  misc_feature 1..168: note = Synthetic
atgggtggcaagtggtcaaaaagtagtgtgattggatggcctactgtaagggaaagaatgagacgagctgagccagcagcagatagggtgggagcagcatctcgagacctggaaaaacatggagcaatcacaagtagcaacgactcggtccgcactagcctgaggtaa

SEQ ID NO: 5473 - DNA, 45 bp, synthetic construct
  source 1..45: mol_type = other DNA
  misc_feature 1..45: note = Synthetic
atggagcaatcacaagtagcaacgactcggtccgcactagcctga

SEQ ID NO: 5474 - DNA, 66 bp, synthetic construct
  misc_feature 1..66: note = Synthetic
  source 1..66: mol_type = other DNA
atgcctctggtgagggtccaggcattaatcccattagtaagacagaattacaagccatcatgttag

SEQ ID NO: 5475 - DNA, 168 bp, synthetic construct
  misc_feature 1..168: note = Synthetic
  source 1..168: mol_type = other DNA
atggcagacgaacgaaccagcgattctgttaaaactcgttatgatattgcactgatgaagctaaacgatataaaaattgcagtttttcgtgattctctatcgacatacgtagaacagaagaccggcttaactatacagttcgactcggtccgcactagcctgaggtaa

SEQ ID NO: 5476 - DNA, 105 bp, synthetic construct
  source 1..105: mol_type = other DNA
  misc_feature 1..105: note = Synthetic
aagacaaactccgtcgtaccaaacattttaagaaactcagactacaatctgaactctcccctcttagaagatccttccgactcggtccgcactagcctgaggtaa

SEQ ID NO: 5477 - DNA, 42 bp, synthetic construct
  source 1..42: mol_type = other DNA
  misc_feature 1..42: note = Synthetic
atgattaaaatctgtgcttttctgtgtgttgcagcagcatga

SEQ ID NO: 5478 - DNA, 168 bp, synthetic construct
  source 1..168: mol_type = other DNA
  misc_feature 1..168: note = Synthetic
atgagcggaaacggctcctttgagggaggggtattcagcccttatctgacggggcgtctcccctcctgggcgggagtgcgtcaaaatgtgatgggatccacggtggacggccggcccgtacagcccgcgaactcttcaaccgactcggtccgcactagcctgaggtaa

SEQ ID NO: 5479 - DNA, 87 bp, synthetic construct
  misc_feature 1..87: note = Synthetic
  source 1..87: mol_type = other DNA
atgattaaaatctgtgcttttctgtgtgttgcagcagcgccagcggaaacggctcctttgagggaggggtattcagcccttatctga

SEQ ID NO: 5480 - DNA, 120 bp, synthetic construct
  source 1..120: mol_type = other DNA
  misc_feature 1..120: note = Synthetic
acggggcgtctcccctcctgggcgggagtgcgtcaaaatgtgatgggatccacggtggacggccggcccgtacagcccgcgaactcttcaaccgactcggtccgcactagcctgaggtaa

SEQ ID NO: 5481 - DNA, 54 bp, synthetic construct
  source 1..54: mol_type = other DNA
  misc_feature 1..54: note = Synthetic
atgagggccagaatgactgaaatctgtgcttttctgtgtgttgcagcatcatga

SEQ ID NO: 5482 - DNA, 168 bp, synthetic construct
  misc_feature 1..168: note = Synthetic
  source 1..168: mol_type = other DNA
atgagcggaagcggctcctttgagggaggggtattcagcccttatctgacggggcgtctcccctcctgggcgggagtgcgtcagaatgtgatgggatccacggtggacggccggcccgtgcagcccgcgaactcttcaaccgactcggtccgcactagcctgaggtaa

SEQ ID NO: 5483 - DNA, 201 bp, synthetic construct
  misc_feature 1..201: note = Synthetic
  source 1..201: mol_type = other DNA
gtgtgtcgtaacgggcaactctgcagcggaaccgactactttgggtgtccgtgtttcattttattcctatactggctgcttatggtgacaattgacaggttgttaccatatagttattggattggccatccggtgactaacagagcaattatatatctctttgttgggtttatcgactcggtccgcactagcctgaggtaa

SEQ ID NO: 5484 - DNA, 75 bp, synthetic construct
  source 1..75: mol_type = other DNA
  misc_feature 1..75: note = Synthetic
ctgcagcggaaccgactactttgggtgtccgtgtttctttttattcttataatggctgcttatggtgacaattaa

SEQ ID NO: 5485 - DNA, 159 bp, synthetic construct
  source 1..159: mol_type = other DNA
  misc_feature 1..159: note = Synthetic
gtggggggcgcggagtcgggagatcctctgggggccgggcgtcccattggggacgacgagtgcgaacagtacacgtcgagcgtatcgctagcgcggatgttgtacgggggggatttggccgaatgggtgcccgactcggtccgcactagcctgaggtaa

SEQ ID NO: 5486 - DNA, 27 bp, synthetic construct
  misc_feature 1..27: note = Synthetic
  source 1..27: mol_type = other DNA
atgctcaacagaaaaaacgagtcatga

SEQ ID NO: 5487 - DNA, 147 bp, synthetic construct
  source 1..147: mol_type = other DNA
  misc_feature 1..147: note = Synthetic
atgctcaacagaaaaaacgagtcgccaaaatgtcacatttaccctttgcttggatttcggatgaagcaaagtgttttttatctcgattttttgaaaacatatcgtctttaccagttgttgatattcgcgaaaatccatggattttga

SEQ ID NO: 5488 - DNA, 99 bp, synthetic construct
  source 1..99: mol_type = other DNA
  misc_feature 1..99: note = Synthetic
atgtcaaccgccgcgtcgtcgcgcacgccagcgctctcagggcgcagcaccgggacctgcccgagcgccacgccgacgtgccgactcggtccgcactag

SEQ ID NO: 5489 - DNA, 147 bp, synthetic construct
  misc_feature 1..147: note = Synthetic
  source 1..147: mol_type = other DNA
atgactgcgcgcgtctcaccggccagaccgtgccgaccatggactatttcctgccgctgcgcaacatctggaaccgcgtccgcgagttcccgcgcgcctccaccaccgccgccggcatcacctgcgactcggtccgcactagcctga

SEQ ID NO: 5490 - DNA, 114 bp, synthetic construct
  misc_feature 1..114: note = Synthetic
  source 1..114: mol_type = other DNA
atggactatttcctgccgctgcgcaacatctggaaccgcgtccgcgagttcccgcgcgcctccaccaccgccgccggcatcacctgcgactcggtccgcactagcctgaggtaa

SEQ ID NO: 5491 - DNA, 198 bp, synthetic construct
  source 1..198: mol_type = other DNA
  misc_feature 1..198: note = Synthetic
atggagcctgcgaatcccccaaggaacccaatggccgctcctgcccgcgaccccccgggttaccggtacgccgcggccatggtgcccaccggctccatcctgagtacgatcgaggtggcgtcccaccgcagactctttgattttttcgcccgcgtgcgctccgacgaaaacgactcggtccgcactagcctgaggtaa

SEQ ID NO: 5492 - DNA, 198 bp, synthetic construct
  source 1..198: mol_type = other DNA
  misc_feature 1..198: note = Synthetic
atggagcctgcgaatcccccaaggaacccagccgccgctcctgcccgcgaccccccgggttaccggtacgccgcggccatggtgcccaccggctccatcctgagtacgatcgaggtggcgtcccaccgcagactctttgattttttcgcccgcgtgcgctccgacgaaaacgactcggtccgcactagcctgaggtaa

SEQ ID NO: 5493 - DNA, 168 bp, synthetic construct
  misc_feature 1..168: note = Synthetic
  source 1..168: mol_type = other DNA
atgggttcatctgtttcgataactagtttaaaagttgctccaaacttagcagatcaaaatgaaaagtatatgtttattaattttaattatccagaatacaacaaattagtttctttttatgaagaaatgaagaactataacgactcggtccgcactagcctgaggtaa

SEQ ID NO: 5494 - DNA, 66 bp, synthetic construct
  misc_feature 1..66: note = Synthetic
  source 1..66: mol_type = other DNA
atcttaggtaaaatttcggtcgcctgccaattttccatgtttcggcgttatgcagcacaccggtaa

SEQ ID NO: 5495 - DNA, 168 bp, synthetic construct
  source 1..168: mol_type = other DNA
  misc_feature 1..168: note = Synthetic
atgcagcacaccggtaattgtgaaactttaatagttaattcatgttttggttccacttgtgcacggtcgattccagtttttatagattcgtgtgatctgaccgctgaagtgtctcgcgacgaggaaactcgtttagcgcgcgactcggtccgcactagcctgaggtaa

SEQ ID NO: 5496 - DNA, 54 bp, synthetic construct
  source 1..54: mol_type = other DNA
  misc_feature 1..54: note = Synthetic
atttcggtcgcctgccaattttccatgtttcggcgttatgcagcacaccggtaa

SEQ ID NO: 5497 - DNA, 168 bp, synthetic construct
  source 1..168: mol_type = other DNA
  misc_feature 1..168: note = Synthetic
atgcagcacaccggtaattgtgaaactttaatagttaattcatgttttggttccacttgtgcacggtcgattccagtttttatagattcctgtgatctgaccgctgaagtgtctcgcgacgaggaaactcgtttagcgcgcgactcggtccgcactagcctgaggtaa

SEQ ID NO: 5498 - DNA, 54 bp, synthetic construct
  misc_feature 1..54: note = Synthetic
  source 1..54: mol_type = other DNA
atgttttggttccacttgtgcacggtcgattccagtttttatagattcctgtga

SEQ ID NO: 5499 - DNA, 24 bp, synthetic construct
  source 1..24: mol_type = other DNA
  misc_feature 1..24: note = Synthetic
atgcaagttgtaaggcatgtttga

SEQ ID NO: 5500 - DNA, 87 bp, synthetic construct
  misc_feature 1..87: note = Synthetic
  source 1..87: mol_type = other DNA
atgtttgacaagattgtcatccccagacagtttcatcaccagcataaatgggacaagttgctttccaaacgactcggtccgcactag

SEQ ID NO: 5501 - DNA, 30 bp, synthetic construct
  misc_feature 1..30: note = Synthetic
  source 1..30: mol_type = other DNA
atgactattttcacatgtactttatgctga

SEQ ID NO: 5502 - DNA, 33 bp, synthetic construct
  source 1..33: mol_type = other DNA
  misc_feature 1..33: note = Synthetic
ttggcggcctcctgttggtattccccacgctaa

SEQ ID NO: 5503 - DNA, 24 bp, synthetic construct
  source 1..24: mol_type = other DNA
  misc_feature 1..24: note = Synthetic
atgtttttgggcctgcatgaatga

SEQ ID NO: 5504 - DNA, 15 bp, synthetic construct
  source 1..15: mol_type = other DNA
  misc_feature 1..15: note = Synthetic
gtggcgatgctttag

SEQ ID NO: 5505 - DNA, 96 bp, synthetic construct
  source 1..96: mol_type = other DNA
  misc_feature 1..96: note = Synthetic
atgccaacaccctgttcgactgcgaggtcgtgcagactttggtctttctctttaagggtctccaaaacgccagggtggggaaaaccacctcactag

SEQ ID NO: 5506 - DNA, 171 bp, synthetic construct
  misc_feature 1..171: note = Synthetic
  source 1..171: mol_type = other DNA
ctgttcgactgcgaggtcgtgcagactttggtctttctctttaagggtctccaaaacgccagggtggggaaaaccacctcactagacattattcgggagctaaccgcacaactaaaaagacaccgcctagacctggcccaccccgactcggtccgcactagcctgaggtaa

SEQ ID NO: 5507 - DNA, 27 bp, synthetic construct
  source 1..27: mol_type = other DNA
  misc_feature 1..27: note = Synthetic
atgtctgttattattaccactatctag

SEQ ID NO: 5508 - DNA, 192 bp, synthetic construct
  source 1..192: mol_type = other DNA
  misc_feature 1..192: note = Synthetic
atggagcaggagaactacaaaactgaatttttatatggcaagcttgcgacccccgtttgttcacaccatgcagcccttccgagttctggccgcattttctctggagagcgtgagcagggttttcacgcaggacctggctggcgctcaaccgatcccggccgcggaccacgacggcgactcggtccgcactag

SEQ ID NO: 5509 - DNA, 63 bp, synthetic construct
  misc_feature 1..63: note = Synthetic
  source 1..63: mol_type = other DNA
atgtttttatttggtccaaacatgccgccttgctgcgactcggtccgcactagcctgaggtaa

SEQ ID NO: 5510 - DNA, 63 bp, synthetic construct
  misc_feature 1..63: note = Synthetic
  source 1..63: mol_type = other DNA
atgtttttatttggtccaaacatgccgccttggcccgactcggtccgcactagcctgaggtaa

SEQ ID NO: 5511 - DNA, 186 bp, synthetic construct
  misc_feature 1..186: note = Synthetic
  source 1..186: mol_type = other DNA
atgccagaatatgcgctgcatccgtctatcctgcccacccccggctaccggggagtgacgtatcgcccgtcaggaacccgccgccgaacccgtcgccgccgccgctcccgtcgtgctctggcccccgtgtcggtgcgccgcgtaacacgccggggaaagacagcgactcggtccgcactagcctga

SEQ ID NO: 5512 - DNA, 18 bp, synthetic construct
  misc_feature 1..18: note = Synthetic
  source 1..18: mol_type = other DNA
atggcctctttacggtaa

SEQ ID NO: 5513 - DNA, 192 bp, synthetic construct
  source 1..192: mol_type = other DNA
  misc_feature 1..192: note = Synthetic
atggagcaggagaactacaaaactgaatttttatgccgcaagcttgcgacccccgtttgttcacaccatgcagcccttccgagttctggccgcattttctctggagagcgtgagcagggttttcacgcaggacctggctggcgctcaaccgatcccggccgcggaccacgacggcgactcggtccgcactag

SEQ ID NO: 5514 - DNA, 18 bp, synthetic construct
  misc_feature 1..18: note = Synthetic
  source 1..18: mol_type = other DNA
gtggggagttcttgctga

SEQ ID NO: 5515 - DNA, 15 bp, synthetic construct
  source 1..15: mol_type = other DNA
  misc_feature 1..15: note = Synthetic
atgctttactcctag

SEQ ID NO: 5516 - DNA, 168 bp, synthetic construct
  misc_feature 1..168: note = Synthetic
  source 1..168: mol_type = other DNA
atggcatcacataaatggttactgcagatagtttttttaaaaactatcacaatcgcgtattgtcttcatctccaagacgacactccgttgttttttggagccaaaccgctatcggatgtgagtttgattataacggaacccgactcggtccgcactagcctgaggtaa

SEQ ID NO: 5517 - DNA, 42 bp, synthetic construct
  misc_feature 1..42: note = Synthetic
  source 1..42: mol_type = other DNA
atgctatttttcagcagagtcgaggtcaagaacacgaactga

SEQ ID NO: 5518 - DNA, 21 bp, synthetic construct
  misc_feature 1..21: note = Synthetic
  source 1..21: mol_type = other DNA
atactgctccctctcgcttaa

SEQ ID NO: 5519 - DNA, 24 bp, synthetic construct
  source 1..24: mol_type = other DNA
  misc_feature 1..24: note = Synthetic
atgttgacttttaaagaaacataa

SEQ ID NO: 5520 - DNA, 102 bp, synthetic construct
  misc_feature 1..102: note = Synthetic
  source 1..102: mol_type = other DNA
acgagcacattgcagataatcacgaccggtgttgcgcaagcgtcattggtgatgtgcgggagatgcaggaagagcctgcgtaacaagaccgcgaatgactaa

SEQ ID NO: 5521 - DNA, 45 bp, synthetic construct
  misc_feature 1..45: note = Synthetic
  source 1..45: mol_type = other DNA
atgctgagaaagaaaaagttaacgactcggtccgcactagcctga

SEQ ID NO: 5522 - DNA, 222 bp, synthetic construct
  misc_feature 1..222: note = Synthetic
  source 1..222: mol_type = other DNA
acggactgtttcatcgacgcctaccttagaccgacagcggtcgtaagcggcagcgccggcgacaccgcctcggtttccgaacaccatgagtcgccgacggtcaccatcgtgccgctccatcgcagccacgcgctggtggccgaacagcagctcttccaatggttgaaacgctttaagctgctcatggaggtctacgactcggtccgcactagcctgaggtaa

SEQ ID NO: 5523 - DNA, 81 bp, synthetic construct
  source 1..81: mol_type = other DNA
  misc_feature 1..81: note = Synthetic
atgagtcgccgacggtcaccatcgtgccgctccatcgcagccacgcgctggtggccgaacagcagctcttccaatggttga

SEQ ID NO: 5524 - DNA, 45 bp, synthetic construct
  misc_feature 1..45: note = Synthetic
  source 1..45: mol_type = other DNA
atgtctcaagaagataatcatttttctctagatgttgacttttaa

SEQ ID NO: 5525 - DNA, 117 bp, synthetic construct
  source 1..117: mol_type = other DNA
  misc_feature 1..117: note = Synthetic
atgactaagaaattcaaaacaattattgaggctataggaggcaatataatagtcaattctacgatattgaaaaagttatctccttacttcgactcggtccgcactagcctgaggtaa

SEQ ID NO: 5526 - DNA, 168 bp, synthetic construct
  source 1..168: mol_type = other DNA
  misc_feature 1..168: note = Synthetic
atgccgatatttgttaatactgtgtactgtaagaatatattagcattgtctatgactaagaaattcaaaacaattattgatgctataggtggcaatataatagtcaattctacgatattgaaaaagttatctccttacttcgactcggtccgcactagcctgaggtaa

SEQ ID NO: 5527 - DNA, 117 bp, synthetic construct
  source 1..117: mol_type = other DNA
  misc_feature 1..117: note = Synthetic
atgactaagaaattcaaaacaattattgatgctataggtggcaatataatagtcaattctacgatattgaaaaagttatctccttacttcgactcggtccgcactagcctgaggtaa

SEQ ID NO: 5528 - DNA, 156 bp, synthetic construct
  source 1..156: mol_type = other DNA
  misc_feature 1..156: note = Synthetic
atgcatttttacggatggagtctcggtctaaaaacgggaatgtactatctacgtacgaaacccgcatccgctcccattcaattcacattggacaaggataaaataaaaccactggtggtttgtgattccgaaatctgtacatcatgcagcggttaa

SEQ ID NO: 5529 - DNA, 156 bp, synthetic construct
  misc_feature 1..156: note = Synthetic
  source 1..156: mol_type = other DNA
atgcatttttacggatggagtctcggtctaaaaacgggaatgtactatctacgtacgaaacccgcatccgctcccattcaattcacattggacaaggataaaataaaaccaccggtggtttgtgattccgaaatctgtacatcatgcagtggttaa

SEQ ID NO: 5530 - DNA, 117 bp, synthetic construct
  source 1..117: mol_type = other DNA
  misc_feature 1..117: note = Synthetic
atgcaagttgtcgaggctgacatgctctctaagggtctactcggtggcgaggcgtggtcttcgtggcataaggaagactctattcatgtcgactcggtccgcactagcctgaggtaa

SEQ ID NO: 5531 - DNA, 30 bp, synthetic construct
  source 1..30: mol_type = other DNA
  misc_feature 1..30: note = Synthetic
acgttgaggaacaactcaacaagcgcgtag

SEQ ID NO: 5532 - DNA, 150 bp, synthetic construct
  source 1..150: mol_type = other DNA
  misc_feature 1..150: note = Synthetic
aagcgcgtagggcacgtctacaagaaagcatttatgcaagttgtcgaggctgacatgctctctaagggtctactcggtggcgaggcgtggtcttcgtggcataaggaagactctattcgcctcgactcggtccgcactagcctgaggtaa

SEQ ID NO: 5533 - DNA, 30 bp, synthetic construct
  misc_feature 1..30: note = Synthetic
  source 1..30: mol_type = other DNA
atgtatgttcagcccttgtttgtcaattga

SEQ ID NO: 5534 - DNA, 168 bp, synthetic construct
  source 1..168: mol_type = other DNA
  misc_feature 1..168: note = Synthetic
atggatccgcctttgagatcttatcaccaacggctccgtctgtatacccccgtagcgatgggcatcaatctcgccgccagctcacaacctttggatccggaaggcccgatcgccgttactcccaggcctccgattcgtcccgactcggtccgcactagcctgaggtaa

SEQ ID NO: 5535 - DNA, 168 bp, synthetic construct
  misc_feature 1..168: note = Synthetic
  source 1..168: mol_type = other DNA
atggatccggccttgagatcttatcaccaacggctccgtctgtatacccccgtagcgatgggcatcaatctcgccgccagctcacaacctttggatccggaaggcccgatcgccgttactcccaggcctccgattcgtcccgactcggtccgcactagcctgaggtaa

SEQ ID NO: 5536 - DNA, 204 bp, synthetic construct
  misc_feature 1..204: note = Synthetic
  source 1..204: mol_type = other DNA
atgaccgagtggtcgcccgcactgcaggcctactccttcaagatcgcgatcttctctctgaacaagctgcgcggcttcaagaagaaggtggtcatgttcgagaccaagatcgtcatggacgcggacgacaacatcctggggctgctcttccgcgaccgcatcgggacctaccgcgtcgactcggtccgcactagcctgaggtaa

SEQ ID NO: 5537 - DNA, 57 bp, synthetic construct
  source 1..57: mol_type = other DNA
  misc_feature 1..57: note = Synthetic
atgtcagaagagattttttttacaaagcaatttccgactcggtccgcactagcctga

SEQ ID NO: 5538 - DNA, 33 bp, synthetic construct
  source 1..33: mol_type = other DNA
  misc_feature 1..33: note = Synthetic
atgtaccatagcacacgactcggtccgcactag

SEQ ID NO: 5539 - DNA, 129 bp, synthetic construct
  misc_feature 1..129: note = Synthetic
  source 1..129: mol_type = other DNA
atgccttatcacttatttttttattttgcttttgtgtatgcatgtatgtgtgctgccatgtcccgcttttgccatctgtctgtatgtgtgcgtatgcatgggtattggtatttgtgtatattgtggtaa

SEQ ID NO: 5540 - DNA, 30 bp, synthetic construct
  misc_feature 1..30: note = Synthetic
  source 1..30: mol_type = other DNA
atgacatcgactcggtccgcactagcctga

SEQ ID NO: 5541 - DNA, 177 bp, synthetic construct
  source 1..177: mol_type = other DNA
  misc_feature 1..177: note = Synthetic
atgacgcccgacaccgatcacgaagaatcaacggcaggcgcgacgtccgtaccggaggtcctgggtgcgcgctacgaacccgcacacctggccgcgagcgacctattaaactggtacatcgtccccgtaagccaggcgcagcaggacatcgactcggtccgcactagcctgaggtaa

SEQ ID NO: 5542 - DNA, 198 bp, synthetic construct
  source 1..198: mol_type = other DNA
  misc_feature 1..198: note = Synthetic
gtgctatttctctgtcgctgtgagcccgtaatggaaacgacaaacagccggcgtgtttcttcggcgcaacggcagattttggctacggctacggtgcgatttatcgaaggccttcatgagccggctcaagattctatgatgtgtggggatgacgagctgcagtctcaggacgactcggtccgcactagcctgaggtaa

SEQ ID NO: 5543 - DNA, 168 bp, synthetic construct
  misc_feature 1..168: note = Synthetic
  source 1..168: mol_type = other DNA
atggatcctgctttgagatcttatcaccaacggctccgtctgtatacccccgtagcgatgggcatcaatctcgccgccagctcacaacctttggatccggaaggcccgatcgccgttactcccaggcctccgattcgtcccgactcggtccgcactagcctgaggtaa

SEQ ID NO: 5544 - DNA, 168 bp, synthetic construct
  misc_feature 1..168: note = Synthetic
  source 1..168: mol_type = other DNA
atggatcgggctttgagatcttatcaccaacggctccgtctgtatacccccgtagcgatgggcatcaatctcgccgccagctcacaacctttggatccggaaggcccgatcgccgttactcccaggcctccgattcgtcccgactcggtccgcactagcctgaggtaa

SEQ ID NO: 5545 - DNA, 168 bp, synthetic construct
  misc_feature 1..168: note = Synthetic
  source 1..168: mol_type = other DNA
atggatgcggctttgagatcttatcaccaacggctccgtctgtatacccccgtagcgatgggcatcaatctcgccgccagctcacaacctttggatccggaaggcccgatcgccgttactcccaggcctccgattcgtcccgactcggtccgcactagcctgaggtaa

SEQ ID NO: 5546 - DNA, 168 bp, synthetic construct
  source 1..168: mol_type = other DNA
  misc_feature 1..168: note = Synthetic
atggttccggctttgagatcttatcaccaacggctccgtctgtatacccccgtagcgatgggcatcaatctcgccgccagctcacaacctttggatccggaaggcccgatcgccgttactcccaggcctccgattcgtcccgactcggtccgcactagcctgaggtaa

SEQ ID NO: 5547 - DNA, 168 bp, synthetic construct
  source 1..168: mol_type = other DNA
  misc_feature 1..168: note = Synthetic
atgccggggatgaacgcgctgcgccactgccacggctgcaagcacaacgggctcgtgctggagcagggctacgagttctgcatcttctgccaggcggtcttccagcactgcgccaaggtggccaagcgctccaacttccacgactcggtccgcactagcctgaggtaa

SEQ ID NO: 5548 - DNA, 159 bp, synthetic construct
  misc_feature 1..159: note = Synthetic
  source 1..159: mol_type = other DNA
atgaacgcgctgcgccactgccacggctgcaagcacaacgggctcgtgctggagcagggctacgagttctgcatcttctgccaggcggtcttccagcactgcgccaaggtggccaagcgctccaacttccacgactcggtccgcactagcctgaggtaa

SEQ ID NO: 5549 - DNA, 30 bp, synthetic construct
  misc_feature 1..30: note = Synthetic
  source 1..30: mol_type = other DNA
attaaggcgttcccacgaaagcgaatataa

SEQ ID NO: 5550 - DNA, 120 bp, synthetic construct
  source 1..120: mol_type = other DNA
  misc_feature 1..120: note = Synthetic
atattgatgatgaatatgatgaagatagcgataaagaaaagccaatattcaatgtataaatggataagttgtacgccgctatatttggtgtatttatggggtctccggaagatgatttga

SEQ ID NO: 5551 - DNA, 114 bp, synthetic construct
  misc_feature 1..114: note = Synthetic
  source 1..114: mol_type = other DNA
atgatgaatatgatgaagatagcgataaagaaaagccaatattcaatgtataaatggataagttgtacgctgctatatttggtgtatttatgggttctcaggaagatgatttga

SEQ ID NO: 5552 - DNA, 120 bp, synthetic construct
  misc_feature 1..120: note = Synthetic
  source 1..120: mol_type = other DNA
atattgatgatgaatatgatgaagatagcgataaagaaaagccaatattcaatgtataagccgataagttgtacgccgctatatttggtgtatttatggggtctccggaagatgatttga

SEQ ID NO: 5553 - DNA, 120 bp, synthetic construct
  misc_feature 1..120: note = Synthetic
  source 1..120: mol_type = other DNA
atattgatgatgaatatgatgaagatagcgataaagaaaagccaatattcaatgtataagccgataagttgtacgctgctatatttggtgtatttatgggttctcaggaagatgatttga

SEQ ID NO: 5554 - DNA, 18 bp, synthetic construct
  source 1..18: mol_type = other DNA
  misc_feature 1..18: note = Synthetic
acgtatcaccgcacctga

SEQ ID NO: 5555 - DNA, 162 bp, synthetic construct
  source 1..162: mol_type = other DNA
  misc_feature 1..162: note = Synthetic
atggccgctgacgttcccatgtacccgcgtatcgtttcatcggcgcgggcaatggcagcatcgaacaggttatcgaaatcagccacagcgcctcccgttattgcattctggccaggccgcgctctgtcatttcggctgccgactcggtccgcactagcctga

SEQ ID NO: 5556 - DNA, 159 bp, synthetic construct
  misc_feature 1..159: note = Synthetic
  source 1..159: mol_type = other DNA
gtggctgacgttcccatgtacccgcgtatcgtttcatcggcgcgggcaatggcagcatcgaacaggttatcgaaatcagccacagcgcctcccgttattgcattctggccaggccgcgctctgtcatttcggctgccgactcggtccgcactagcctga

SEQ ID NO: 5557 - DNA, 21 bp, synthetic construct
  source 1..21: mol_type = other DNA
  misc_feature 1..21: note = Synthetic
ctgactgctcaccggatgtaa

SEQ ID NO: 5558 - DNA, 111 bp, synthetic construct
  misc_feature 1..111: note = Synthetic
  source 1..111: mol_type = other DNA
atggcagcatcgaacaggttatcgaaatcagccacagcgcctcccgttattgcattctggccaggccgcgctctgtcatttcggctgccgactcggtccgcactagcctga

SEQ ID NO: 5559 - DNA, 168 bp, synthetic construct
  misc_feature 1..168: note = Synthetic
  source 1..168: mol_type = other DNA
atggagccctccaaactcttcacaatgtcagacaatgccacctttgcacctgggcctgttatcaatgcggctgacaagaagacattccgaacctgcttccgaatattggtactgtctgtacaagctgttacccttatattcgactcggtccgcactagcctgaggtaa

SEQ ID NO: 5560 - DNA, 171 bp, synthetic construct
  source 1..171: mol_type = other DNA
  misc_feature 1..171: note = Synthetic
aaggccgagccctccaaactcttcacaatgtcagacaatgccacctttgcacctgggcctgttatcaatgcggctgacaagaagacattccgaacctgcttccgaatattggtactgtctgtacaagctgttacccttatattcgactcggtccgcactagcctgaggtaa

SEQ ID NO: 5561 - DNA, 42 bp, synthetic construct
  misc_feature 1..42: note = Synthetic
  source 1..42: mol_type = other DNA
atcaaaatcttgtatcagaaaatctcgaacagtcccagataa

SEQ ID NO: 5562 - DNA, 96 bp, synthetic construct
  source 1..96: mol_type = other DNA
  misc_feature 1..96: note = Synthetic
atgtataaaaaggcagaggcatcattttggacagtggaagaagtagatatatctaaagatatcaatgacgactcggtccgcactagcctgaggtaa

SEQ ID NO: 5563 - DNA, 168 bp, synthetic construct
  misc_feature 1..168: note = Synthetic
  source 1..168: mol_type = other DNA
atgggcaactgcaatcgaactcagaaacccagttcgtcttctaacaacctcgagaagccaccacaagctgcagaatttagaagaacggcagagcccagtctatatgggaggtacaattgcaaatgttgttggtttgctgacgactcggtccgcactagcctgaggtaa

SEQ ID NO: 5564 - DNA, 201 bp, synthetic construct
  misc_feature 1..201: note = Synthetic
  source 1..201: mol_type = other DNA
gtgcgcacgctgcagttcaactttacacccagcaccttcttctcgcccaccgcgctgaactccaacgtctccaggggcaaggacaagctggcggtgcgcgtgaccaccgcgcacatggaggcgcacaacccgctcatgtacgtaccgcgccagatggtcgtggtgtgcaacgaggtgtcgactcggtccgcactagcctga

SEQ ID NO: 5565 - DNA, 165 bp, synthetic construct
  misc_feature 1..165: note = Synthetic
  source 1..165: mol_type = other DNA
atgccattaggatcggcggcaggatggaagtggaggtggacgaaaacgcgacccgcgccgcgcgcggcgcgatgctgctctccacctccttcatggagagcatggtcgacatcgtgcgccaggaggagctcgcgcgccagttcgactcggtccgcactagcctga

SEQ ID NO: 5566 - DNA, 48 bp, synthetic construct
  source 1..48: mol_type = other DNA
  misc_feature 1..48: note = Synthetic
aggttgaccacgaagatggacttgttgtcggcgatgaagtccgtgtag

SEQ ID NO: 5567 - DNA, 36 bp, synthetic construct
  misc_feature 1..36: note = Synthetic
  source 1..36: mol_type = other DNA
atgctcgcgaggatggactccctggaatccatttaa

SEQ ID NO: 5568 - DNA, 45 bp, synthetic construct
  source 1..45: mol_type = other DNA
  misc_feature 1..45: note = Synthetic
atgatctttttctcccggatgacgactcggtccgcactagcctga

SEQ ID NO: 5569 - DNA, 87 bp, synthetic construct
  misc_feature 1..87: note = Synthetic
  source 1..87: mol_type = other DNA
atgaggatgcttactaagatgctcagtcaacctgggaccagtgaagataattctcctgtttatagtgataaagagctactcaattaa

SEQ ID NO: 5570 - DNA, 168 bp, synthetic construct
  misc_feature 1..168: note = Synthetic
  source 1..168: mol_type = other DNA
atgggcctcgcgttctccggggcgcggccctgctgctgccgacacaacgtcatcaccaccgacggcggggaggtcgtctcgctgaccgcccacgaatttgacgtcgtggacatcgagtccgaagaagagggtaacttctacgactcggtccgcactagcctgaggtaa

SEQ ID NO: 5571 - DNA, 210 bp, synthetic construct
  misc_feature 1..210: note = Synthetic
  source 1..210: mol_type = other DNA
atggcaatgaaatatccaattacagcagacaagaggataacggaaatgattcctgagagaaatgagcaaggacaaactttatggagtaaaatgaatgatgccggatcagaccgagtgatggtatcacctctggctgtgacatggtggaataggaatggaccaatgacaaatacagttcattatccaacgactcggtccgcactagcctga

SEQ ID NO: 5572 - DNA, 210 bp, synthetic construct
  misc_feature 1..210: note = Synthetic
  source 1..210: mol_type = other DNA
atggcaatgaaatatccaattacagcagacaagaggataacggaaatgattcctgagagaaatgagcaaggacaaactttatggagtaaaatgaatgatgccggatcagaccgagtgatggtatcacctctggctgtgacatggtggaataggaatggaccaatgacaagcccagttcattatccaacgactcggtccgcactagcctga

SEQ ID NO: 5573 - DNA, 120 bp, synthetic construct
  source 1..120: mol_type = other DNA
  misc_feature 1..120: note = Synthetic
atgaacttgctgcttttgatgatgatattgaacaggaaggctctccgacgttcctgggtgacaagcgtattgaaggctcggtctggccaaagtccatccgtggctccacgccaaaagtga

SEQ ID NO: 5574 - DNA, 81 bp, synthetic construct
  source 1..81: mol_type = other DNA
  misc_feature 1..81: note = Synthetic
gtgcagccagtgaatccccgcattttatgcgttttcatgttgcctgcccgcattgcggcgactcggtccgcactagcctga

SEQ ID NO: 5575 - DNA, 21 bp, synthetic construct
  misc_feature 1..21: note = Synthetic
  source 1..21: mol_type = other DNA
atgtgccgttctcgggggtaa

SEQ ID NO: 5576 - DNA, 63 bp, synthetic construct
  source 1..63: mol_type = other DNA
  misc_feature 1..63: note = Synthetic
atgacgaaagttatcatcatcttaggattcttgattattaatacaaattcgttgtgtctatga

SEQ ID NO: 5577 - DNA, 207 bp, synthetic construct
  source 1..207: mol_type = other DNA
  misc_feature 1..207: note = Synthetic
ataactgaaaaaaaaattactactattgttaatttagttatggaacctatccttgcaccaaatccaaatagatttgttattttcccaatccaatatcatgacatctggaatatgtataaaaaggcagaggcatcattttggacagtggaagaagtggatatatctaaagatatcaatgacgactcggtccgcactagcctgaggtaa

SEQ ID NO: 5578 - DNA, 108 bp, synthetic construct
  source 1..108: mol_type = other DNA
  misc_feature 1..108: note = Synthetic
atcatgacatctggaatatgtataaaaaggcagaggcatcattttggacagtggaagaagtggatatatctaaagatatcaatgacgactcggtccgcactagcctga

SEQ ID NO: 5579 - DNA, 15 bp, synthetic construct
  source 1..15: mol_type = other DNA
  misc_feature 1..15: note = Synthetic
atgtgcagttcctga

SEQ ID NO: 5580 - DNA, 213 bp, synthetic construct
  source 1..213: mol_type = other DNA
  misc_feature 1..213: note = Synthetic
atggtcaacaaaacggccggtaacactaacacattcatccactttgtcgaagatagtgagctggtggagaatcccgcatactttaggcgcagcgatcaccgagcctttatgatcgtcatattgacgcaagtggtttttgtagtgttcattattaacgcctcttttatctggagctggacgtttaggcgtcacaagcgactcggtccgcactag

SEQ ID NO: 5581 - DNA, 168 bp, synthetic construct
  misc_feature 1..168: note = Synthetic
  source 1..168: mol_type = other DNA
atggatcagggccccttcttttctgaagaatctatggaggaacagaaggagggacgctcaacaaccagcacactcaccagtgcagtcggactcatcgacatcatccttgccagtgaacccacagacatcagaaaagatagaaaataccttcgactcggtccgcactag

SEQ ID NO: 5582 - DNA, 90 bp, synthetic construct
  misc_feature 1..90: note = Synthetic
  source 1..90: mol_type = other DNA
atggccgcgccaagactcgcgagggacgactatacacagttacttcaaagtaaggcggcgctgaaggccctcctatctacagacgactga

SEQ ID NO: 5583 - DNA, 168 bp, synthetic construct
  misc_feature 1..168: note = Synthetic
  source 1..168: mol_type = other DNA
acggcttcggctacacttcccgcatggatcaagatgccctcatttctaaagaagattctgaagttgagagggaggcgtcaggaggacgagagtcgctctcggatgttatcggattcctcgacgcagtcctatcaagtgaacgactcggtccgcactagcctgaggtaa

SEQ ID NO: 5584 - DNA, 135 bp, synthetic construct
  source 1..135: mol_type = other DNA
  misc_feature 1..135: note = Synthetic
atgccctcatttctaaagaagattctgaagttgagagggaggcgtcaggaggacgagagtcgctctcggatgttatcggattcctcgacgcagtcctatcaagtgaacgactcggtccgcactagcctgaggtaa

SEQ ID NO: 5585 - DNA, 90 bp, synthetic construct
  source 1..90: mol_type = other DNA
  misc_feature 1..90: note = Synthetic
atgatattactggcggttcccaatatgcttattccaatcttgtttttgctggagccaattggggaggtctgcgcttgtactgcactgtag

SEQ ID NO: 5586 - DNA, 192 bp, synthetic construct
  source 1..192: mol_type = other DNA
  misc_feature 1..192: note = Synthetic
gtgcagtccgaggccctgctccttagatacaggaacaccctgactgggcaactgctgttcgagtgcaagctctacaacgaaggttacatcgccttgtcttattccggctcaggacccctcaccttcccgaccgatggcatctttgaggtcgtcagttgggttcccgactcggtccgcactagcctgaggtaa

SEQ ID NO: 5587 - DNA, 111 bp, synthetic construct
  source 1..111: mol_type = other DNA
  misc_feature 1..111: note = Synthetic
acgaaggttacatcgccttgtcttattccggctcaggacccctcaccttcccgaccgatggcatctttgaggtcgtcagttgggttcccgactcggtccgcactagcctga

SEQ ID NO: 5588 - DNA, 222 bp, synthetic construct
  misc_feature 1..222: note = Synthetic
  source 1..222: mol_type = other DNA
acggactgtttcatcgacgcctaccttagaccgacagcggtcgtaagcggcagcatgggcgacaccgcctcggtttccgaacaccatgagtcgccgacggtcaccatcgtgccgctccatcgcagccacgcgctggtggccgaacagcagctcttccaatggttgaaacgctttaagctgctcatggaggtctacgactcggtccgcactagcctgaggtaa

SEQ ID NO: 5589 - DNA, 24 bp, synthetic construct
  misc_feature 1..24: note = Synthetic
  source 1..24: mol_type = other DNA
ttggagtcaggaactaaagaatag

SEQ ID NO: 5590 - DNA, 57 bp, synthetic construct
  source 1..57: mol_type = other DNA
  misc_feature 1..57: note = Synthetic
ctggcccacctgcgcaaaaagacagcccccatccaccgccgtgatgctcaagtgtaa

SEQ ID NO: 5591 - DNA, 168 bp, synthetic construct
  source 1..168: mol_type = other DNA
  misc_feature 1..168: note = Synthetic
atgctcaagtgtaagcagcccggggcccgcttcattcacggggccgtgcacctgccatcgggacagattgtcttccacaccatccacagccccactcttgcctcggcgctgggactgcctggggaaaatgtacccatccccgactcggtccgcactagcctgaggtaa

SEQ ID NO: 5592 - DNA, 57 bp, synthetic construct
  source 1..57: mol_type = other DNA
  misc_feature 1..57: note = Synthetic
ctggcccacctgcgcaaaaagacagcccccatccaccgccgtggccctcaagtgtaa

SEQ ID NO: 5593 - DNA, 171 bp, synthetic construct
  source 1..171: mol_type = other DNA
  misc_feature 1..171: note = Synthetic
gtggccctcaagtgtaagcagcccggggcccgcttcattcacggggccgtgcacctgccatcgggacagattgtcttccacaccatccacagccccactcttgcctcggcgctgggactgcctggggaaaatgtacccatccccgactcggtccgcactagcctgaggtaa

SEQ ID NO: 5594 - DNA, 90 bp, synthetic construct
  misc_feature 1..90: note = Synthetic
  source 1..90: mol_type = other DNA
atgatattactggtggttcccagtatgcttattctaatcttgtttttgctggagccaattggggaggtctgcgcttgtactgcactgtag

SEQ ID NO: 5595 - DNA, 126 bp, synthetic construct
  source 1..126: mol_type = other DNA
  misc_feature 1..126: note = Synthetic
attgttcccggggggcttctggctaagcagtttggtgataatatgagagagtatctacaactagaacttagagaagaacttagagccaagggcatgtccgactcggtccgcactagcctgaggtaa

SEQ ID NO: 5596 - DNA, 66 bp, synthetic construct
  source 1..66: mol_type = other DNA
  misc_feature 1..66: note = Synthetic
atgatgatatgccagatggtcacgcttaacctaggacgtctggtcacgcttaatacgactcactaa

SEQ ID NO: 5597 - DNA, 30 bp, synthetic construct
  source 1..30: mol_type = other DNA
  misc_feature 1..30: note = Synthetic
atgtctcagaaagtggaagaacagctttaa

SEQ ID NO: 5598 - DNA, 168 bp, synthetic construct
  misc_feature 1..168: note = Synthetic
  source 1..168: mol_type = other DNA
atgcctcccgccgttcccagcagacgtcttcatggtgccacagtatggatacctcaccctgaacaacgggagtcaggcagtaggacgctcttcattttactgcctggagtactttccttctcagatgctgcgtaccggaaacaactttaccttcagctacacttttga

SEQ ID NO: 5599 - DNA, 93 bp, synthetic construct
  source 1..93: mol_type = other DNA
  misc_feature 1..93: note = Synthetic
atgctgcgtaccggaaacaactttaccttcagctacacttttgaggacgttcctttccacagcagctacgctcaccgactcggtccgcactag

SEQ ID NO: 5600 - DNA, 63 bp, synthetic construct
  source 1..63: mol_type = other DNA
  misc_feature 1..63: note = Synthetic
ttgaggacgttcctttccacagcagctacgctcaccgactcggtccgcactagcctgaggtaa

SEQ ID NO: 5601 - DNA, 168 bp, synthetic construct
  misc_feature 1..168: note = Synthetic
  source 1..168: mol_type = other DNA
atgcctcccgccgttcccagcagacgtcttcatggtgccacagtatggatacctcaccctgaacaacgggagtcaggcagtaggacgctcttcattttactgcctggagtactttccttctcaggccctgcgtaccggaaacaactttaccttcagctacacttttga

SEQ ID NO: 5602 - DNA, 39 bp, synthetic construct
  misc_feature 1..39: note = Synthetic
  source 1..39: mol_type = other DNA
atgcgcgagggcatggcaagcaatgctattcacttttag

SEQ ID NO: 5603 - DNA, 57 bp, synthetic construct
  source 1..57: mol_type = other DNA
  misc_feature 1..57: note = Synthetic
ctggcccacctgcgcaaaaagacagcccccatccactgccgtgatgctcaagtgtaa

SEQ ID NO: 5604 - DNA, 57 bp, synthetic construct
  source 1..57: mol_type = other DNA
  misc_feature 1..57: note = Synthetic
ctggcccacctgcgcaaaaagacagcccccatccactgccgtggccctcaagtgtaa

SEQ ID NO: 5605 - DNA, 213 bp, synthetic construct
  source 1..213: mol_type = other DNA
  misc_feature 1..213: note = Synthetic
atgttccagaacaatgttgttaatataccagctaatcagatggcagtcttcaatgtggaaactgcgggcaacacatttcaaattgctatcatgccaaatggttattgtgttaccaatgcagctgttggtactcaccagctcctggattacgagacaagttttaggtttgttggacttttcccccacgactcggtccgcactagcctgaggtaa

SEQ ID NO: 5606 - DNA, 195 bp, synthetic construct
  misc_feature 1..195: note = Synthetic
  source 1..195: mol_type = other DNA
atgttgttaatataccagctaatcagatggcagtcttcaatgtggaaactgcgggcaacacatttcaaattgctatcatgccaaatggttattgtgttaccaatgcagctgttggtactcaccagctcctggattacgagacaagttttaggtttgttggacttttcccccacgactcggtccgcactagcctga

SEQ ID NO: 5607 - DNA, 180 bp, synthetic construct
  source 1..180: mol_type = other DNA
  misc_feature 1..180: note = Synthetic
atgggtgccctttttgaaggaagaaaccttgtccaaaatatcattgtgaagctggagaccaaggacatgaaagtctttctagcaggacttgagggctatgaaaagattagtgatgtccttgggaacctcttcctgcatcgattcagaactggtgaaccgactcggtccgcactagcctga

SEQ ID NO: 5608 - DNA, 63 bp, synthetic construct
  misc_feature 1..63: note = Synthetic
  source 1..63: mol_type = other DNA
atggatgcactcaccgtggacaagcggatattatcttctacgtcgggcgctgctgcgtcttga

SEQ ID NO: 5609 - DNA, 27 bp, synthetic construct
  misc_feature 1..27: note = Synthetic
  source 1..27: mol_type = other DNA
atcacgactcggtccgcactagcctga

SEQ ID NO: 5610 - DNA, 84 bp, synthetic construct
  source 1..84: mol_type = other DNA
  misc_feature 1..84: note = Synthetic
atgaaatcagaatctccttttcctcagagttatgtagtaggcgaggacaagacgggcaacctttctcctcggagcgtagtgtaa

SEQ ID NO: 5611 - DNA, 102 bp, synthetic construct
  misc_feature 1..102: note = Synthetic
  source 1..102: mol_type = other DNA
acggaatacgtcatgctcttggcccttactcaatgtcacggccccgatttgcgaccgctcgaatgcggccatgagggtccgactcggtccgcactagcctga

SEQ ID NO: 5612 - DNA, 54 bp, synthetic construct
  source 1..54: mol_type = other DNA
  misc_feature 1..54: note = Synthetic
ttgtcagtaacaaccagggccattttgatgtcgactcggtccgcactagcctga

SEQ ID NO: 5613 - DNA, 138 bp, synthetic construct
  source 1..138: mol_type = other DNA
  misc_feature 1..138: note = Synthetic
atgtttacgacgtcggtgttcctgataggcccggcgcagctgctgccccgtaaagtcaaatggcggcgtggcgtcagtctcccccgattccagcgtctcttcctcctcctcgactcggtccgcactagcctgaggtaa

SEQ ID NO: 5614 - DNA, 75 bp, synthetic construct
  misc_feature 1..75: note = Synthetic
  source 1..75: mol_type = other DNA
atgcggtccagactcacgcccgtcacctcggcaaactccatcccgcctatgagcttacgacgacacggcgcgtaa

SEQ ID NO: 5615 - DNA, 204 bp, synthetic construct
  source 1..204: mol_type = other DNA
  misc_feature 1..204: note = Synthetic
ataggcataactgtattaatgcttttgatggtaatttctggtgccgccctgatagtcaaggagttaaatcctaatgatatattcactatgcaatcattaaagtttaatcgagccgtaacgattttcaaatatataggactctttatctatataccaggaacaatcattttgtacgccgactcggtccgcactagcctgaggtaa

SEQ ID NO: 5616 - DNA, 81 bp, synthetic construct
  source 1..81: mol_type = other DNA
  misc_feature 1..81: note = Synthetic
ctggaattcacggacatgatttctagtatcaggcagcatttacaggaaaaggaaatccctattgtaaacagacttgtttaa

SEQ ID NO: 5617 - DNA, 30 bp, synthetic construct
  source 1..30: mol_type = other DNA
  misc_feature 1..30: note = Synthetic
atgcttccgactcggtccgcactagcctga

SEQ ID NO: 5618 - DNA, 222 bp, synthetic construct
  misc_feature 1..222: note = Synthetic
  source 1..222: mol_type = other DNA
atgctgtttccctgcaaaacgtgcgagagaatgaatcagaatttcaacatttgcttcacacacggggtcagagactgctcagagtgtttccccggcgtgtcagaatctcaaccggtcgtcagaaagaggacgtatcggaaactctgtgcgattcatcatctgctggggcgggctcccgagattgcttgctcggcctgcgcgactcggtccgcactagcctga

SEQ ID NO: 5619 - DNA, 168 bp, synthetic construct
  misc_feature 1..168: note = Synthetic
  source 1..168: mol_type = other DNA
atggcttctgtagcaggtaacgctagtaatatctcaccacagcccccgtcgggcgttccaaccggaggggaatttgtactgatacctaccgcgtattattcacagctgttaaccgggcagactaaaaatccgcaggtatccgactcggtccgcactagcctgaggtaa

SEQ ID NO: 5620 - DNA, 24 bp, synthetic construct
  misc_feature 1..24: note = Synthetic
  source 1..24: mol_type = other DNA
ctgcctggaacagactcaagctag

SEQ ID NO: 5621 - DNA, 36 bp, synthetic construct
  misc_feature 1..36: note = Synthetic
  source 1..36: mol_type = other DNA
atgatctactttaacatgttctcgtctaagagatga

SEQ ID NO: 5622 - DNA, 39 bp, synthetic construct
  misc_feature 1..39: note = Synthetic
  source 1..39: mol_type = other DNA
atgctttcacctaaggaaaaaaacatttcagggagttga

SEQ ID NO: 5623 - DNA, 180 bp, synthetic construct
  misc_feature 1..180: note = Synthetic
  source 1..180: mol_type = other DNA
acgcagcgcaccatgagaagagaaaaagggtttcaagtacccaccgatggcacggtcatctacgtgccccccgggatccaagagacccggctggcgacccgcagtctggcttgggtcgactgttgccgcgtggcgctgcacacctatggcgccgactcggtccgcactagcctgaggtaa

SEQ ID NO: 5624 - DNA, 180 bp, synthetic construct
  misc_feature 1..180: note = Synthetic
  source 1..180: mol_type = other DNA
acgcagcgcaccgccagaagagaaaaagggtttcaagtacccaccgatggcacggtcatctacgtgccccccgggatccaagagacccggctggcgacccgcagtctggcttgggtcgactgttgccgcgtggcgctgcacacctatggcgccgactcggtccgcactagcctgaggtaa

SEQ ID NO: 5625 - DNA, 129 bp, synthetic construct
  misc_feature 1..129: note = Synthetic
  source 1..129: mol_type = other DNA
atgcccgggcgtgcatttttccgctttttaaatggccgagaaaaagctgtcgcgcagcagctacgacgattacatcgaaaccatcaacaagatcaccccgcagctcaagacgctgctggcgcacattag

SEQ ID NO: 5626 - DNA, 129 bp, synthetic construct
  source 1..129: mol_type = other DNA
  misc_feature 1..129: note = Synthetic
atgcccgggcgtgcatttttccgctttttaagccgccgagaaaaagctgtcgcgcagcagctacgacgattacatcgaaaccatcaacaagatcaccccgcagctcaagacgctgctggcgcacattag

SEQ ID NO: 5627 - DNA, 195 bp, synthetic construct
  source 1..195: mol_type = other DNA
  misc_feature 1..195: note = Synthetic
ataacaattcatccaatggataaattggaactagtcaatgatggcctcaatattattgactttattcagaagaaccaaaaagaaatacagaagacatacggacgatcaagtattcaacaacccagcatcaaagatcaaacaaaagcctgggaagattttctgcagtgcaccagtggacgactcggtccgcactag

SEQ ID NO: 5628 - DNA, 165 bp, synthetic construct
  misc_feature 1..165: note = Synthetic
  source 1..165: mol_type = other DNA
atggcctcaatattattgactttattcagaagaaccaaaaagaaatacagaagacatacggacgatcaagtattcaacaacccagcatcaaagatcaaacaaaagcctgggaagattttctgcagtgcaccagtggacgactcggtccgcactagcctgaggtaa

SEQ ID NO: 5629 - DNA, 75 bp, synthetic construct
  source 1..75: mol_type = other DNA
  misc_feature 1..75: note = Synthetic
atgcggtccagactcacgcccgtcacctcggcaaactccatcccgccgatgagcttacgacgacaaggcgcgtaa

SEQ ID NO: 5630 - DNA, 75 bp, synthetic construct
  source 1..75: mol_type = other DNA
  misc_feature 1..75: note = Synthetic
atgcggtccagactcacgcccgtcacctcggcaaactccatcccgccgatgagcttacgacgacacggcgcgtaa

SEQ ID NO: 5631 - DNA, 75 bp, synthetic construct
  source 1..75: mol_type = other DNA
  misc_feature 1..75: note = Synthetic
atgcggtccagactcacgcccgtcacctcggcaaactccatcccgccgatgagcttacgacgacacgtcgcgtaa

SEQ ID NO: 5632 - DNA, 60 bp, synthetic construct
  misc_feature 1..60: note = Synthetic
  source 1..60: mol_type = other DNA
atggacgtgtcagatcctcctgtgacgttaaacattttgggggggcctgaggagatgtaa

SEQ ID NO: 5633 - DNA, 222 bp, synthetic construct
  source 1..222: mol_type = other DNA
  misc_feature 1..222: note = Synthetic
atggacgtgttaggattatgggaaagccgcccccacactctaggtttggagttacgcggcgtaaactgtggcggcacggacggtgactggttagagattttaaaacagcccgatgtgcaaaagacagtcagcgggagtcttgtggcatgcgtgatcgtcacacccgcattggaagcctggcttgtgttacctgggggttcgactcggtccgcactagcctga

SEQ ID NO: 5634 - DNA, 222 bp, synthetic construct
  misc_feature 1..222: note = Synthetic
  source 1..222: mol_type = other DNA
atggatggtgcaaagggaaggctgtcctctggccacttgaaatgtcgcctgaaaatggataaacttagattgaagggcgtgtcatactccttgtgtaccgcagcgttcacattcaccaagatcccggctgaaacactgcacgggacagtcacagtggaggtacagtacgcagggacagatggaccttgcaaggttccagcgactcggtccgcactagcctga

SEQ ID NO: 5635 - DNA, 222 bp, synthetic construct
  misc_feature 1..222: note = Synthetic
  source 1..222: mol_type = other DNA
atggatggtgcaaagggaaggctgtcctctggccacttgaaatgtcgcctgaaaatggataaacttagattgaagggcgtgtcatactccttgtgtaccgcagcgttcacattcaccaagatcccggctgaaacactgcacgggacagtcacagtggaggtacagtacgcagggacaggccgaccttgcaaggttccagcgactcggtccgcactagcctga

SEQ ID NO: 5636 - DNA, 75 bp, synthetic construct
  source 1..75: mol_type = other DNA
  misc_feature 1..75: note = Synthetic
atggcctccacgctgggctcggggtacaggcagcgacagcgcggctcttcggggtgcgcgccgcagtacgcgtag

SEQ ID NO: 5637 - DNA, 222 bp, synthetic construct
  source 1..222: mol_type = other DNA
  misc_feature 1..222: note = Synthetic
atggcgaggttggcgatggctgagtctccatgcttgttgttcctccctaggagaacacaatggccggccgcggaggaagtcagtcagagcgccgccgggagcgcacccccgaacgcggaaggggctctgccagccatccgccaagtcgcggcggcgagagcccgtcgcctccgcctctgcccccgaagagacatacctacgactcggtccgcactagcctga

SEQ ID NO: 5638 - DNA, 222 bp, synthetic construct
  misc_feature 1..222: note = Synthetic
  source 1..222: mol_type = other DNA
atggcgaggttggcgatggctgagtctccatgcttgttgttcctccctaggagaacacagccgccggccgcggaggaagtcagtcagagcgccgccgggagcgcacccccgaacgcggaaggggctctgccagccatccgccaagtcgcggcggcgagagcccgtcgcctccgcctctgcccccgaagagacatacctacgactcggtccgcactagcctga

SEQ ID NO: 5639 - DNA, 36 bp, synthetic construct
  misc_feature 1..36: note = Synthetic
  source 1..36: mol_type = other DNA
atgccagcttcatacgggaccgcctcgacctattga

SEQ ID NO: 5640 - DNA, 195 bp, synthetic construct
  source 1..195: mol_type = other DNA
  misc_feature 1..195: note = Synthetic
ataacaattcatccaatggataaattggaactagtcagccatggcctcaatattattgactttattcagaagaaccaaaaagaaatacagaagacatacggacgatcaagtattcaacaacccagcatcaaagatcaaacaaaagcctgggaagattttctgcagtgcaccagtggacgactcggtccgcactag

SEQ ID NO: 5641 - DNA, 195 bp, synthetic construct
  misc_feature 1..195: note = Synthetic
  source 1..195: mol_type = other DNA
atggatgtcaatccgactttacttttcttaaaagtgccagcgcaaaatgcaataagtaccacattcccttatactggagatcccccatatagccatggaacaggaacaggatacaccatggacacagtcaacagaacacatcaatattcagaaaaagggaggtggacaacaaacacacgactcggtccgcactag

SEQ ID NO: 5642 - DNA, 132 bp, synthetic construct
  misc_feature 1..132: note = Synthetic
  source 1..132: mol_type = other DNA
ctggagatcccccatatagccatggaacaggaacaggatacaccatggacacagtcaacagaacacatcaatattcagaaaaagggaggtggacaacaaacacacgactcggtccgcactagcctgaggtaa

SEQ ID NO: 5643 - DNA, 192 bp, synthetic construct
  misc_feature 1..192: note = Synthetic
  source 1..192: mol_type = other DNA
atggaaacaatatcactaataactatactactagtagtaacagcaagcaatgcagataaaatctgcatcggccaccagtcaacaaactccacagaaactgtggacacgctaacagaaaccaatgttcctgtgacacatgccaaagaattgctccacacagagcataatgcgactcggtccgcactagcctga

SEQ ID NO: 5644 - DNA, 183 bp, synthetic construct
  source 1..183: mol_type = other DNA
  misc_feature 1..183: note = Synthetic
atatcactaataactatactactagtagtaacagcaagcaatgcagataaaatctgcatcggccaccagtcaacaaactccacagaaactgtggacacgctaacagaaaccaatgttcctgtgacacatgccaaagaattgctccacacagagcataatgcgactcggtccgcactagcctga

SEQ ID NO: 5645 - DNA, 39 bp, synthetic construct
  source 1..39: mol_type = other DNA
  misc_feature 1..39: note = Synthetic
aggcgctcagactcgacgactcggtccgcactagcctga

SEQ ID NO: 5646 - DNA, 87 bp, synthetic construct
  source 1..87: mol_type = other DNA
  misc_feature 1..87: note = Synthetic
atgaatataagtatccagctatcacagatgggaagaagccgggcatcactctcgggaaggcccccgactcggtccgcactagcctga

SEQ ID NO: 5647 - DNA, 15 bp, synthetic construct
  source 1..15: mol_type = other DNA
  misc_feature 1..15: note = Synthetic
atggtcattgtgtag

SEQ ID NO: 5648 - DNA, 93 bp, synthetic construct
  source 1..93: mol_type = other DNA
  misc_feature 1..93: note = Synthetic
ttggctttaaatgcccttagggtattggggtgttatgggaaattgttttcgacgattatctctgtttggacagccgactcaggcaaattatga

SEQ ID NO: 5649 - DNA, 144 bp, synthetic construct
  misc_feature 1..144: note = Synthetic
  source 1..144: mol_type = other DNA
atgggaaattgttttcgacgattatctctgtttggacagccgactcaggcaaattatgagatgttgtgctcttccgacgatttagaaagtgaagagctgacgtattttctggatatcgactcggtccgcactagcctgaggtaa

SEQ ID NO: 5650 - DNA, 99 bp, synthetic construct
  misc_feature 1..99: note = Synthetic
  source 1..99: mol_type = other DNA
atgaatttggctttaagcccccttagggtattggggtgttatgggaaattgttttcgacgattatctctgtttggacagccgactcaggcaaattatga

SEQ ID NO: 5651 - DNA, 222 bp, synthetic construct
  source 1..222: mol_type = other DNA
  misc_feature 1..222: note = Synthetic
atgctgtttccctgcaaaacgtgcgagagaatgaatcagaatttcaacatttgcttcacacacggggtcagagactgtttagagtgtttccccggcgtgtcagaatctcaaccggtcgtcagaaaaaagacgtatcggaaactctgcgcgattcatcatctgctggggcgggcgcccgagattgcttgctcggcctgcgcgactcggtccgcactagcctga

SEQ ID NO: 5652 - DNA, 222 bp, synthetic construct
  misc_feature 1..222: note = Synthetic
  source 1..222: mol_type = other DNA
atgctgtttccctgcaagacatgcgagagaatgaatcagaatttcaacatttgcttcacgcacgggacgagagactgttcagagtgcttccccggcgtgtcagaatctcaaccggtcgtcagaaagaggacgtatcggaaactctgtgccattcatcatctgctggggcgggctcccgagattgcttgctcggcctgcgcgactcggtccgcactagcctga

SEQ ID NO: 5653 - DNA, 63 bp, synthetic construct
  misc_feature 1..63: note = Synthetic
  source 1..63: mol_type = other DNA
atggacctggtgggcacggagtgctttgcgagggtgtgccgcctagacaccggtgcgaaatga

SEQ ID NO: 5654 - DNA, 57 bp, synthetic construct
  source 1..57: mol_type = other DNA
  misc_feature 1..57: note = Synthetic
atgcggtccagactcacgcccgtcacctcggcaaactccatcccgccgatgagctga

SEQ ID NO: 5655 - DNA, 75 bp, synthetic construct
  misc_feature 1..75: note = Synthetic
  source 1..75: mol_type = other DNA
atgcggtccagactcacgcccgtcacctcggcaaactccatcccgccgatgagcttacgaagacacggcgcgtaa

SEQ ID NO: 5656 - DNA, 210 bp, synthetic construct
  source 1..210: mol_type = other DNA
  misc_feature 1..210: note = Synthetic
atcctactgtcggggggaggaggaggagcaagatctttgactatggcgactcttcttaaaagcttagcattgttcaagaggaacaaagacaaagcgccgacggcatcaggttcaggaggggccatccgggggattaagaatgttatcatagtcccgattcccggagactcgtccatcattaccgactcggtccgcactagcctgaggtaa

SEQ ID NO: 5657 - DNA, 141 bp, synthetic construct
  source 1..141: mol_type = other DNA
  misc_feature 1..141: note = Synthetic
ttgttcaagaggaacaaagacaaagcgccgacggcatcaggttcaggaggggccatccgggggattaagaatgttatcatagtcccgattcccggagactcgtccatcattaccgactcggtccgcactagcctgaggtaa

SEQ ID NO: 5658 - DNA, 21 bp, synthetic construct
  misc_feature 1..21: note = Synthetic
  source 1..21: mol_type = other DNA
atggccctgaacatgaggtag

SEQ ID NO: 5659 - DNA, 123 bp, synthetic construct
  source 1..123: mol_type = other DNA
  misc_feature 1..123: note = Synthetic
ttgtcgtccggcggcgagggcgcgacccacgcctcgaccggggtcctcacaaacacagaatctgtagacttggctggcctcatggtctcgtcaggccagctcacgggcttcaggcttatatga

SEQ ID NO: 5660 - DNA, 75 bp, synthetic construct
  source 1..75: mol_type = other DNA
  misc_feature 1..75: note = Synthetic
atgcggtccagactcacgcccgtcacctcggcaaactccatcccgccgatgagcttacgacgacactgcgcgtaa

SEQ ID NO: 5661 - DNA, 27 bp, synthetic construct
  misc_feature 1..27: note = Synthetic
  source 1..27: mol_type = other DNA
atgaccactcccggcagcggcatctag

SEQ ID NO: 5662 - DNA, 84 bp, synthetic construct
  misc_feature 1..84: note = Synthetic
  source 1..84: mol_type = other DNA
atggcggtgagtgacgacgcagcccgcgcaacaagcgccaccgcaatgtcccgccgcgactcggtccgcactagcctgaggtaa

SEQ ID NO: 5663 - DNA, 36 bp, synthetic construct
  source 1..36: mol_type = other DNA
  misc_feature 1..36: note = Synthetic
acgccactaccaccgccgccgctagaatggcggtga

SEQ ID NO: 5664 - DNA, 12 bp, synthetic construct
  source 1..12: mol_type = other DNA
  misc_feature 1..12: note = Synthetic
atgtggttgtag

SEQ ID NO: 5665 - DNA, 18 bp, synthetic construct
  source 1..18: mol_type = other DNA
  misc_feature 1..18: note = Synthetic
atgcgcaatacaaaataa

SEQ ID NO: 5666 - DNA, 51 bp, synthetic construct
  source 1..51: mol_type = other DNA
  misc_feature 1..51: note = Synthetic
atgtgttcacagttttgcgagcggacggtttatttttatattcgtggataa

SEQ ID NO: 5667 - DNA, 18 bp, synthetic construct
  misc_feature 1..18: note = Synthetic
  source 1..18: mol_type = other DNA
atgcgagactgccggtaa

SEQ ID NO: 5668 - DNA, 27 bp, synthetic construct
  source 1..27: mol_type = other DNA
  misc_feature 1..27: note = Synthetic
atgctctgttcaatctgtaaatattga

SEQ ID NO: 5669 - DNA, 21 bp, synthetic construct
  misc_feature 1..21: note = Synthetic
  source 1..21: mol_type = other DNA
ctgttgcagaaaaagctttga

SEQ ID NO: 5670 - DNA, 18 bp, synthetic construct
  misc_feature 1..18: note = Synthetic
  source 1..18: mol_type = other DNA
acggctactaggcgctaa

SEQ ID NO: 5671 - DNA, 168 bp, synthetic construct
  misc_feature 1..168: note = Synthetic
  source 1..168: mol_type = other DNA
atggggcaaacgctgacggcgctgcgcgtggaggacaccgccgtacccggggagaagatgctgcgcgtggagtacagccgcgcggcagacaacaccagcgtgcccttctccgaggaaacgcagcacttcgcagacgactccgactcggtccgcactagcctgaggtaa

SEQ ID NO: 5672 - DNA, 159 bp, synthetic construct
  misc_feature 1..159: note = Synthetic
  source 1..159: mol_type = other DNA
acgctgacggcgctgcgcgtggaggacaccgccgtacccggggagaagatgctgcgcgtggagtacagccgcgcggcagacaacaccagcgtgcccttctccgaggaaacgcagcacttcgcagacgactccgactcggtccgcactagcctgaggtaa

SEQ ID NO: 5673 - DNA, 21 bp, synthetic construct
  misc_feature 1..21: note = Synthetic
  source 1..21: mol_type = other DNA
atgcattccgagaggcaatag

SEQ ID NO: 5674 - DNA, 48 bp, synthetic construct
  misc_feature 1..48: note = Synthetic
  source 1..48: mol_type = other DNA
atcatcaccatgttggctcagacttcgactcggtccgcactagcctga

SEQ ID NO: 5675 - DNA, 60 bp, synthetic construct
  misc_feature 1..60: note = Synthetic
  source 1..60: mol_type = other DNA
atgcggtccagactcacgcccgtcacctcggcaaactccatcccgccgatgagcttatga

SEQ ID NO: 5676 - DNA, 69 bp, synthetic construct
  misc_feature 1..69: note = Synthetic
  source 1..69: mol_type = other DNA
ttggctccccactgctgtcttcacaaaaaaataaaatttgcatcgttattaatgccaacgaagcggtaa

SEQ ID NO: 5677 - DNA, 189 bp, synthetic construct
  source 1..189: mol_type = other DNA
  misc_feature 1..189: note = Synthetic
gtggctgcaataattttctggatcattttaaatggcctacaggcacaggaggccgttccggaggtaccggagaaggtaccgaagatggaggggccggaaggtccaccaccgacgtacctggagacctttccaccgcttcggctggaggaggaggtggagacatcccagacgcgactcggtccgcactag

SEQ ID NO: 5678 - DNA, 189 bp, synthetic construct
  source 1..189: mol_type = other DNA
  misc_feature 1..189: note = Synthetic
gtggctgcaataattttctggatcattttaagccgcctacaggcacaggaggccgttccggaggtaccggagaaggtaccgaagatggaggggccggaaggtccaccaccgacgtacctggagacctttccaccgcttcggctggaggaggaggtggagacatcccagacgcgactcggtccgcactag

SEQ ID NO: 5679 - DNA, 213 bp, synthetic construct
  misc_feature 1..213: note = Synthetic
  source 1..213: mol_type = other DNA
acgggcagaagccacatgtgccacagccaaatgcacaaatcagaaatggcacgtttctctcaggagattttcggtctgagcactattctattgattgctcaaacatgtcagggctcgatagacggaagattaacgcttgctgcagggattgttcctgttggtgaccggcccattagcatatataccgactcggtccgcactagcctgaggtaa

SEQ ID NO: 5680 - DNA, 60 bp, synthetic construct
  source 1..60: mol_type = other DNA
  misc_feature 1..60: note = Synthetic
atgtcagggctcgatagacggaagattaacgcttgctgcagggattgttcctgttggtga

SEQ ID NO: 5681 - DNA, 45 bp, synthetic construct
  source 1..45: mol_type = other DNA
  misc_feature 1..45: note = Synthetic
atggatctccgaacaattaatgacaggcaaaattccggtacatga

SEQ ID NO: 5682 - DNA, 18 bp, synthetic construct
  source 1..18: mol_type = other DNA
  misc_feature 1..18: note = Synthetic
atgggtaacaaggagtag

SEQ ID NO: 5683 - DNA, 51 bp, synthetic construct
  misc_feature 1..51: note = Synthetic
  source 1..51: mol_type = other DNA
ctggccctaacaacgggcacctgcacctgcctccaatcaatgccgttttag

SEQ ID NO: 5684 - DNA, 117 bp, synthetic construct
  misc_feature 1..117: note = Synthetic
  source 1..117: mol_type = other DNA
ttgccgtttatgacccgacggtacagtttgagttctggttctcggaaaagcagattgcggatatcagacaggttgaaaccagcacgcgttatcttggtacggcgctgtactggatag

SEQ ID NO: 5685 - DNA, 108 bp, synthetic construct
  misc_feature 1..108: note = Synthetic
  source 1..108: mol_type = other DNA
attgcggatatcagacaggttgaaaccagcacgcgttatcttggtacggcgctgtactggatagccgccagtatcaatatcgactcggtccgcactagcctgaggtaa

SEQ ID NO: 5686 - DNA, 120 bp, synthetic construct
  source 1..120: mol_type = other DNA
  misc_feature 1..120: note = Synthetic
atcttgccgtttgccacccgacggtacagtttgagttctggttctcggaaaagcagattgcggatatcagacaggttgaaaccagcacgcgttatcttggtacggcgctgtactggatag

SEQ ID NO: 5687 - DNA, 81 bp, synthetic construct
  source 1..81: mol_type = other DNA
  misc_feature 1..81: note = Synthetic
ctggctctgctcaaaaatatcaagggggatgacaacctaaacgagttctaccaaatggtcaaaagtattactcatgcttaa

SEQ ID NO: 5688 - DNA, 132 bp, synthetic construct
  source 1..132: mol_type = other DNA
  misc_feature 1..132: note = Synthetic
atggcgttcgtactcaatagttcctggctggagatctgcctcgctggcctgccgcagttcttcaacctcccggcgcagcttttcgttctcaatttcagcatccctttcgcgactcggtccgcactagcctga

SEQ ID NO: 5689 - DNA, 42 bp, synthetic construct
  source 1..42: mol_type = other DNA
  misc_feature 1..42: note = Synthetic
atcactaccgccgttatgaccactcccggcagcggcatctag

SEQ ID NO: 5690 - DNA, 63 bp, synthetic construct
  source 1..63: mol_type = other DNA
  misc_feature 1..63: note = Synthetic
attttgagtaagaaagacctaataagcagtttgtcctctacgactcggtccgcactagcctga

SEQ ID NO: 5691 - DNA, 27 bp, synthetic construct
  source 1..27: mol_type = other DNA
  misc_feature 1..27: note = Synthetic
atgagtacaaagttcagcaggcaatga

SEQ ID NO: 5692 - DNA, 204 bp, synthetic construct
  misc_feature 1..204: note = Synthetic
  source 1..204: mol_type = other DNA
atttttgtcttagtcttctacacaacgcgaactatggctcactccaaagaaatccccagcttccgctggactcaatctctaaggagagaactagggatgttcacagaaccaaccaaatcaagtgttcttaatgatgcaaagctcattgcagactcccttgatttcacacaagtttctcaagcgactcggtccgcactagcctga

SEQ ID NO: 5693 - DNA, 180 bp, synthetic construct
  misc_feature 1..180: note = Synthetic
  source 1..180: mol_type = other DNA
acgcgaactgccgctcactccaaagaaatccccagcttccgctggactcaatctctaaggagagaactagggatgttcacagaaccaaccaaatcaagtgttcttaatgatgcaaagctcattgcagactcccttgatttcacacaagtttctcaagcgactcggtccgcactagcctga

SEQ ID NO: 5694 - DNA, 12 bp, synthetic construct
  misc_feature 1..12: note = Synthetic
  source 1..12: mol_type = other DNA
ttggacagatag

SEQ ID NO: 5695 - DNA, 105 bp, synthetic construct
  misc_feature 1..105: note = Synthetic
  source 1..105: mol_type = other DNA
ttgatgaggctcaacgagagaagtttcttgagagagttgctttgcccagatcagtgtctgtgtttttgggacagtttaatgggtcttaaaattaatggaagttga

SEQ ID NO: 5696 - DNA, 207 bp, synthetic construct
  misc_feature 1..207: note = Synthetic
  source 1..207: mol_type = other DNA
atgcaactttttcacctctgcctaatcatctcttgttcatgtcctactgttcaagcctccaagctgtgccttgggtggctttggggcatggacatcgacccttataaagaatttggagctactgtggagttactctcgtttttgccttctgacttctttccttcagtacgagatcttctagataccgcccgactcggtccgcactag

SEQ ID NO: 5697 - DNA, 111 bp, synthetic construct
  misc_feature 1..111: note = Synthetic
  source 1..111: mol_type = other DNA
ttgggtggctttggggcatggacatcgacccttataaagaatttggagctactgtggagttactctcgtttttgccttctgacttctttccttcagtacgagatcttctag

SEQ ID NO: 5698 - DNA, 114 bp, synthetic construct
  misc_feature 1..114: note = Synthetic
  source 1..114: mol_type = other DNA
atcgacccttataaagaatttggagctactgtggagttactctcgtttttgccttctgacttctttccttcagtacgagatcttctagataccgcccgactcggtccgcactag

SEQ ID NO: 5699 - DNA, 15 bp, synthetic construct
  misc_feature 1..15: note = Synthetic
  source 1..15: mol_type = other DNA
ctgccagcaaattga

SEQ ID NO: 5700 - DNA, 24 bp, synthetic construct
  misc_feature 1..24: note = Synthetic
  source 1..24: mol_type = other DNA
atgaagaaccccatgcagggctaa

SEQ ID NO: 5701 - DNA, 27 bp, synthetic construct
  source 1..27: mol_type = other DNA
  misc_feature 1..27: note = Synthetic
atagaacaaaccaaatatacatattaa

SEQ ID NO: 5702 - DNA, 27 bp, synthetic construct
  source 1..27: mol_type = other DNA
  misc_feature 1..27: note = Synthetic
atgtcagattcacacctaatcttctag

SEQ ID NO: 5703 - DNA, 54 bp, synthetic construct
  source 1..54: mol_type = other DNA
  misc_feature 1..54: note = Synthetic
atgacaccagacaatgatccatctcgactgcttatagttagttcacctgtctag

SEQ ID NO: 5704 - DNA, 36 bp, synthetic construct
  source 1..36: mol_type = other DNA
  misc_feature 1..36: note = Synthetic
atgaacattaagactaaccgactcggtccgcactag

SEQ ID NO: 5705 - DNA, 39 bp, synthetic construct
  source 1..39: mol_type = other DNA
  misc_feature 1..39: note = Synthetic
ctgatcacagagaaaaaacaaagctttacttacaactga

SEQ ID NO: 5706 - DNA, 27 bp, synthetic construct
  misc_feature 1..27: note = Synthetic
  source 1..27: mol_type = other DNA
ttgaccactcccggcagcggcatctag

SEQ ID NO: 5707 - DNA, 171 bp, synthetic construct
  source 1..171: mol_type = other DNA
  misc_feature 1..171: note = Synthetic
atcatgggtcaacttgttagtttctttcaggacatacaactctttttccaagaggctctcaatgtggctctagctgttgtcaccgtcctggctatcattaaggggcttgtgaacctttggaaatcaggtctcttccagttcctcgactcggtccgcactagcctgaggtaa

SEQ ID NO: 5708 - DNA, 171 bp, synthetic construct
  misc_feature 1..171: note = Synthetic
  source 1..171: mol_type = other DNA
atcgccggtcaacttgttagtttctttcaggacatacaactctttttccaagaggctctcaatgtggctctagctgttgtcaccgtcctggctatcattaaggggcttgtgaacctttggaaatcaggtctcttccagttcctcgactcggtccgcactagcctgaggtaa

SEQ ID NO: 5709 - DNA, 144 bp, synthetic construct
  misc_feature 1..144: note = Synthetic
  source 1..144: mol_type = other DNA
atttaccgtcgctttaaatacggactgaaaggagggccttctacggaaggagtgccaaagtctatgagggaagaatatcgaaaggaacagcagagtgctgtggatgctgacgatggtcattttgtcagcatagagctggagtaa

SEQ ID NO: 5710 - DNA, 81 bp, synthetic construct
  source 1..81: mol_type = other DNA
  misc_feature 1..81: note = Synthetic
ctgccgaagttgagtatttttgctgtatttgtcataatgactcctgttgatagatccagtaatcgactcggtccgcactag

SEQ ID NO: 5711 - DNA, 90 bp, synthetic construct
  source 1..90: mol_type = other DNA
  misc_feature 1..90: note = Synthetic
atgaaagcacaagtggagaatccgaagaagaagaagaaccaaaagacacacaagacaatagtcaagacgactcggtccgcactagcctga

SEQ ID NO: 5712 - DNA, 168 bp, synthetic construct
  source 1..168: mol_type = other DNA
  misc_feature 1..168: note = Synthetic
atgaaaccaatgccgaaacagagagagatgcgacgtcttagagatagaatctcagatattgaaagacagttgagtgactgcagacgtaataatgaaagcaatgctgatatggaaagagagatgcaacgtcttagagatagcgactcggtccgcactagcctgaggtaa

SEQ ID NO: 5713 - DNA, 213 bp, synthetic construct
  source 1..213: mol_type = other DNA
  misc_feature 1..213: note = Synthetic
acgggcagaagccacatgtgccacagccaaatgcacaaatcagaagccgcacgtttctctcaggagattttcggtctgagcactattctattgattgctcaaacatgtcagggctcgatagacggaagattaacgcttgctgcagggattgttcctgttggtgaccggcccattagcatatataccgactcggtccgcactagcctgaggtaa

SEQ ID NO: 5714 - DNA, 225 bp, synthetic construct
  source 1..225: mol_type = other DNA
  misc_feature 1..225: note = Synthetic
attcagagcggcagcaagtgggggacagcagaagacctgaccgccgcagagtggatgtttgacatggtgaagactatcgcaccatcagccagaaaaccgaattttgctgggtgggctaacgatatccgcctgatgcgtgaacgtgacggacgtaaccaccgcgacatgtgtgtgctgttccgctgggcatgccaggacgactcggtccgcactagcctgaggtaa

SEQ ID NO: 5715 - DNA, 225 bp, synthetic construct
  misc_feature 1..225: note = Synthetic
  source 1..225: mol_type = other DNA
attcagagcggcagcaagtgggggacagcagaagacgccaccgccgcagagtggatgtttgacatggtgaagactatcgcaccatcagccagaaaaccgaattttgctgggtgggctaacgatatccgcctgatgcgtgaacgtgacggacgtaaccaccgcgacatgtgtgtgctgttccgctgggcatgccaggacgactcggtccgcactagcctgaggtaa

SEQ ID NO: 5716 - DNA, 51 bp, synthetic construct
  source 1..51: mol_type = other DNA
  misc_feature 1..51: note = Synthetic
atgcggttcaaaatagaaaattgtaaggcgactcggtccgcactagcctga

SEQ ID NO: 5717 - DNA, 66 bp, synthetic construct
  misc_feature 1..66: note = Synthetic
  source 1..66: mol_type = other DNA
acgttagttaataacatgcggttcaaaatagaaaattgtaaggcgactcggtccgcactagcctga

SEQ ID NO: 5718 - DNA, 27 bp, synthetic construct
  misc_feature 1..27: note = Synthetic
  source 1..27: mol_type = other DNA
atgagtgtgcaactgtcgatgagttag

SEQ ID NO: 5719 - DNA, 30 bp, synthetic construct
  source 1..30: mol_type = other DNA
  misc_feature 1..30: note = Synthetic
acgaaaaataaaaaaccaatcagcatttga

SEQ ID NO: 5720 - DNA, 159 bp, synthetic construct
  misc_feature 1..159: note = Synthetic
  source 1..159: mol_type = other DNA
atgccgaaacagagagagatgcgacgtcttagagatagaatctcagatattgaaagacagttgagtgactgcagacgtaataatgaaagcaatgctgatatggaaagagagatgcaacgtcttagagatagcgactcggtccgcactagcctgaggtaa

SEQ ID NO: 5721 - DNA, 93 bp, synthetic construct
  misc_feature 1..93: note = Synthetic
  source 1..93: mol_type = other DNA
atgacaatgacactactccgccatcggagagaaatgttgttgtttggctggcctggtgggaggacattaagcatgaaattactccggacatga

SEQ ID NO: 5722 - DNA, 195 bp, synthetic construct
  source 1..195: mol_type = other DNA
  misc_feature 1..195: note = Synthetic
gtgtccgtcttcaccgtcctcgtcgtcaccacctcccccctcgagcccaccgctcgtaccagccgcgggctccgcgtcctcgtcgatcaccagcggtcgcgtcggcaccggagaatccacgtcatcctgcacgtcgttttcctcctctccgtcgtcatcgtccagaaacggccgactcggtccgcactagcctga

SEQ ID NO: 5723 - DNA, 105 bp, synthetic construct
  source 1..105: mol_type = other DNA
  misc_feature 1..105: note = Synthetic
atcaccagcggtcgcgtcggcaccggagaatccacgtcatcctgcacgtcgttttcctcctctccgtcgtcatcgtccagaaacggccgactcggtccgcactag

SEQ ID NO: 5724 - DNA, 168 bp, synthetic construct
  source 1..168: mol_type = other DNA
  misc_feature 1..168: note = Synthetic
atggcttcgtacccctgccatcaacacgcgtctgcgttcgaccaggctgcgcgttctcgcggccataacaaccgacgtacggcgttgcgccctcgccggcagcaaaaagccacggaagtccgcctggagcagaaaatgcccgactcggtccgcactagcctgaggtaa

SEQ ID NO: 5725 - DNA, 162 bp, synthetic construct
  misc_feature 1..162: note = Synthetic
  source 1..162: mol_type = other DNA
atcagcctggaggcgacgctactcacggttacaacgacttccatctccagcatctccagcatatacagctctagtagctcagactctatctctttggggcagtgcagactgtccatggtgtctgcgacatcgacctccacgaccttctcctcctcggaatga

SEQ ID NO: 5726 - DNA, 33 bp, synthetic construct
  source 1..33: mol_type = other DNA
  misc_feature 1..33: note = Synthetic
atagcgaacacgactcggtccgcactagcctga

SEQ ID NO: 5727 - DNA, 21 bp, synthetic construct
  source 1..21: mol_type = other DNA
  misc_feature 1..21: note = Synthetic
atgcctggacagcgacactga

SEQ ID NO: 5728 - DNA, 42 bp, synthetic construct
  misc_feature 1..42: note = Synthetic
  source 1..42: mol_type = other DNA
atgaaaccactgtctaaatgtaattatgatcttgatttatag

SEQ ID NO: 5729 - DNA, 21 bp, synthetic construct
  source 1..21: mol_type = other DNA
  misc_feature 1..21: note = Synthetic
atgagaggccactcggcgtag

SEQ ID NO: 5730 - DNA, 69 bp, synthetic construct
  source 1..69: mol_type = other DNA
  misc_feature 1..69: note = Synthetic
acggtgcagcctaccgccacgcgtcagcaaaccagctttcccgactcggtccgcactagcctgaggtaa

SEQ ID NO: 5731 - DNA, 153 bp, synthetic construct
  source 1..153: mol_type = other DNA
  misc_feature 1..153: note = Synthetic
gtgctaagcgtggtcgtgctgctagccgccctggcgtgccgtctcggtgcgcagaccccagagcagcccgcaccccccgccaccacggtgcagcctaccgccacgcgtcagcaaaccagctttcccgactcggtccgcactagcctgaggtaa

SEQ ID NO: 5732 - DNA, 51 bp, synthetic construct
  misc_feature 1..51: note = Synthetic
  source 1..51: mol_type = other DNA
atggggaacatctacttactggaaaataggcgtcgactcggtccgcactag

SEQ ID NO: 5733 - DNA, 168 bp, synthetic construct
  source 1..168: mol_type = other DNA
  misc_feature 1..168: note = Synthetic
agggcttcgtacccctgccatcaacacgcgtctgcgttcgaccaggctgcgcgttctcgcggccataacaaccgacgtacggcgttgcgccctcgccggcagcaaaaagccacggaagtccgcctggagcagaaaatgcccgactcggtccgcactagcctgaggtaa

SEQ ID NO: 5734 - DNA, 168 bp, synthetic construct
  misc_feature 1..168: note = Synthetic
  source 1..168: mol_type = other DNA
atgacttcgtacccctgccatcaacacgcgtctgcgttcgaccaggctgcgcgttctcgcggccataacaaccgacgtacggcgttgcgccctcgccggcagcaaaaagccacggaagtccgcctggagcagaaaatgcccgactcggtccgcactagcctgaggtaa

SEQ ID NO: 5735 - DNA, 126 bp, synthetic construct
  source 1..126: mol_type = other DNA
  misc_feature 1..126: note = Synthetic
atgcctgtattagctataccgtctctccgtgggctaaatactaagctatatttagctagcaaagattgcgctacctcgttggtgccgcacgaactacgctcagactgtctagtggatagggggtga

SEQ ID NO: 5736 - DNA, 168 bp, synthetic construct
  source 1..168: mol_type = other DNA
  misc_feature 1..168: note = Synthetic
ctgactcttgcgcctgccgtgctcggtaagctgccgacgctgaggctttgtatgtgtttctggagggagcgggggctttgctgcctgtgcaggaggggagtaattacattttttacgcacctgccaattttgtgctccatccgcatggggtggctttgctggaattga

SEQ ID NO: 5737 - DNA, 60 bp, synthetic construct
  misc_feature 1..60: note = Synthetic
  source 1..60: mol_type = other DNA
atgcagctagcttcggcatctagggagtcggtggaatttcagtggactcaacttgaatag

SEQ ID NO: 5738 - DNA, 168 bp, synthetic construct
  source 1..168: mol_type = other DNA
  misc_feature 1..168: note = Synthetic
atggagaacaagattgtcgcagagtcccgggaggagttccacgcctggttcaaggcctattcagataagcacaaactcagtaaaacacacaccgagtcggcctctttctgcagagaggttccctcccttgaaacctaccgcgactcggtccgcactagcctgaggtaa

SEQ ID NO: 5739 - DNA, 156 bp, synthetic construct
  misc_feature 1..156: note = Synthetic
  source 1..156: mol_type = other DNA
attgtcgcagagtcccgggaggagttccacgcctggttcaaggcctattcagataagcacaaactcagtaaaacacacaccgagtcggcctctttctgcagagaggttccctcccttgaaacctaccgcgactcggtccgcactagcctgaggtaa

SEQ ID NO: 5740 - DNA, 168 bp, synthetic construct
  source 1..168: mol_type = other DNA
  misc_feature 1..168: note = Synthetic
atggcatcgtacccctgccatcaacacgcgtctgcgttcgaccaggctgcgcgttctcgcggccataacaaccgacgtacggcgttgcgccctcgccggcagcaaaaagccacggaagtccgcctggagcagaaaatgcccgactcggtccgcactagcctgaggtaa

SEQ ID NO: 5741 - DNA, 168 bp, synthetic construct
  source 1..168: mol_type = other DNA
  misc_feature 1..168: note = Synthetic
atggctgcgtacccctgccatcaacacgcgtctgcgttcgaccaggctgcgcgttctcgcggccataacaaccgacgtacggcgttgcgccctcgccggcagcaaaaagccacggaagtccgcctggagcagaaaatgcccgactcggtccgcactagcctgaggtaa

SEQ ID NO: 5742 - DNA, 168 bp, synthetic construct
  source 1..168: mol_type = other DNA
  misc_feature 1..168: note = Synthetic
atggcttcctacccctgccatcaacacgcgtctgcgttcgaccaggctgcgcgttctcgcggccataacaaccgacgtacggcgttgcgccctcgccggcagcaaaaagccacggaagtccgcctggagcagaaaatgcccgactcggtccgcactagcctgaggtaa

SEQ ID NO: 5743 - DNA, 168 bp, synthetic construct
  source 1..168: mol_type = other DNA
  misc_feature 1..168: note = Synthetic
atggcttcggacccctgccatcaacacgcgtctgcgttcgaccaggctgcgcgttctcgcggccataacaaccgacgtacggcgttgcgccctcgccggcagcaaaaagccacggaagtccgcctggagcagaaaatgcccgactcggtccgcactagcctgaggtaa

SEQ ID NO: 5744 - DNA, 84 bp, synthetic construct
  source 1..84: mol_type = other DNA
  misc_feature 1..84: note = Synthetic
ttgcgccctcgccggcagcaaaaagccacggaagtccgcctggagcagaaaatgcccgactcggtccgcactagcctgaggtaa

SEQ ID NO: 5745 - DNA, 42 bp, synthetic construct
  source 1..42: mol_type = other DNA
  misc_feature 1..42: note = Synthetic
atctacttactggaaaataggcgtcgactcggtccgcactag

SEQ ID NO: 5746 - DNA, 24 bp, synthetic construct
  misc_feature 1..24: note = Synthetic
  source 1..24: mol_type = other DNA
ctgggcccaggagtcgaaggttga

SEQ ID NO: 5747 - DNA, 135 bp, synthetic construct
  source 1..135: mol_type = other DNA
  misc_feature 1..135: note = Synthetic
ttgaccttctgtaagacccccactgtgcttccttttctggccacctggtttttgctgaggactcgtatgtcctccagtcggacaagacgtggtcgtagctacagttggccaatgcattcttgtacaggtggataa

SEQ ID NO: 5748 - DNA, 48 bp, synthetic construct
  misc_feature 1..48: note = Synthetic
  source 1..48: mol_type = other DNA
ctgaaaaaaacacccgggtttcgcaggctgcgactcggtccgcactag

SEQ ID NO: 5749 - DNA, 60 bp, synthetic construct
  misc_feature 1..60: note = Synthetic
  source 1..60: mol_type = other DNA
atgctcaagcgatgcggccatgttacgaacggctcacgcgggagaaaccggggcagatga

SEQ ID NO: 5750 - DNA, 66 bp, synthetic construct
  source 1..66: mol_type = other DNA
  misc_feature 1..66: note = Synthetic
attacattttttacgcacctgccaattttgtgcttcatccgcatggggtcgctttgctggaattaa

SEQ ID NO: 5751 - DNA, 168 bp, synthetic construct
  misc_feature 1..168: note = Synthetic
  source 1..168: mol_type = other DNA
ctgactcttgcgcctgccgtgctcggtaagctgccgacgctcaggttttgtatgtgtttctggagggagcgggggctttgctgcctgtgcagaaggggagtaattacattttttacgcacctgccaattttgtgcttcatccgcatggggtcgctttgctggaattaa

SEQ ID NO: 5752 - DNA, 24 bp, synthetic construct
  misc_feature 1..24: note = Synthetic
  source 1..24: mol_type = other DNA
atggccgattatcttaatcattaa

SEQ ID NO: 5753 - DNA, 168 bp, synthetic construct
  misc_feature 1..168: note = Synthetic
  source 1..168: mol_type = other DNA
atggcattcaccggtgatgaactggcgcgcatgttgcagtttaaggataagatgatttcttcggcggggtccgctctgagatttgagaaagttgtacaggaagctatggcttccggaattgttcttcaacatatcacttgcgactcggtccgcactagcctgaggtaa

SEQ ID NO: 5754 - DNA, 174 bp, synthetic construct
  misc_feature 1..174: note = Synthetic
  source 1..174: mol_type = other DNA
atcgtagccgcattcaccggtgatgaactggcgcgcatgttgcagtttaaggataagatgatttcttcggcggggtccgctctgagatttgagaaagttgtacaggaagctatggcttccggaattgttcttcaacatatcacttgcgactcggtccgcactagcctgaggtaa

SEQ ID NO: 5755 - DNA, 198 bp, synthetic construct
  source 1..198: mol_type = other DNA
  misc_feature 1..198: note = Synthetic
aggattgtgcagacactgtgggtcggtagaatgattgggaaagaagctactataccagaggtggttctagaactgcaagagcttgtccaacccactgctgacctgcattgttacgaagaattgacagaagaacctgcagaggaggagcagtgtctcactccctacaagatcgactcggtccgcactagcctgaggtaa

SEQ ID NO: 5756 - DNA, 198 bp, synthetic construct
  source 1..198: mol_type = other DNA
  misc_feature 1..198: note = Synthetic
aggattgtgcagacactgtgggtcggtagagccattgggaaagaagctactataccagaggtggttctagaactgcaagagcttgtccaacccactgctgacctgcattgttacgaagaattgacagaagaacctgcagaggaggagcagtgtctcactccctacaagatcgactcggtccgcactagcctgaggtaa

SEQ ID NO: 5757 - DNA, 171 bp, synthetic construct
  source 1..171: mol_type = other DNA
  misc_feature 1..171: note = Synthetic
atcgccgaaaccactcagactctccgctttaagaccaaggccctagccgtcctgtccaagtgctatgaccatgcccagactcatctcaagggaggagtgctgcaggtaaaccttctgtctgtaaactatggaggcccccggctcgactcggtccgcactagcctgaggtaa

SEQ ID NO: 5758 - DNA, 45 bp, synthetic construct
  misc_feature 1..45: note = Synthetic
  source 1..45: mol_type = other DNA
atgaccatgcccagactcatctcaagggaggagtgctgcaggtaa

SEQ ID NO: 5759 - DNA, 135 bp, synthetic construct
  source 1..135: mol_type = other DNA
  misc_feature 1..135: note = Synthetic
atgcatagcgggaacatcatgttctcaaatggagacgtaccatacatcaccgacccggtatcattctcgcagaagaaagacggccgcgcattcagcatcgaccctgaggaaccgactcggtccgcactagcctga

SEQ ID NO: 5760 - DNA, 135 bp, synthetic construct
  source 1..135: mol_type = other DNA
  misc_feature 1..135: note = Synthetic
atgcatagcgggaacatcatgttctcaaatggagacgtaccatacatcaccgacccggtatcattctcgcagaagaaagacggtggcgcattcagcatcgaccctgaggaaccgactcggtccgcactagcctga

SEQ ID NO: 5761 - DNA, 39 bp, synthetic construct
  misc_feature 1..39: note = Synthetic
  source 1..39: mol_type = other DNA
atggcagttctgctacgtgtttggatgcccggacattag

SEQ ID NO: 5762 - DNA, 168 bp, synthetic construct
  misc_feature 1..168: note = Synthetic
  source 1..168: mol_type = other DNA
atggataccatattagcgggcggtagcggcacctccgacgcttcggataatacctgcaccatatgcatgagcaccgtttccgatctcggaaaaaccatgccgtgtttgcacgacttctgctttgtttgtattcgggcatgcgactcggtccgcactagcctgaggtaa

SEQ ID NO: 5763 - DNA, 96 bp, synthetic construct
  misc_feature 1..96: note = Synthetic
  source 1..96: mol_type = other DNA
atgcatgagcaccgtttccgatctcggaaaaaccatgccgtgtttgcacgacttctgctttgtttgtattcgggcatgcgactcggtccgcactag

SEQ ID NO: 5764 - DNA, 168 bp, synthetic construct
  misc_feature 1..168: note = Synthetic
  source 1..168: mol_type = other DNA
atcctgtgccgcccgcccgcgcccaccatcaccaccgttagtgaaaacgtgcctgctctcacagatcacgggacgctaccgctgcgcagcagtatccgcggagtccagcgagtgaccgttactgacgcccgtcgccgcacctgtccctaccgactcggtccgcactag

SEQ ID NO: 5765 - DNA, 168 bp, synthetic construct
  misc_feature 1..168: note = Synthetic
  source 1..168: mol_type = other DNA
gtgcccacgagttttgttttccgcttcggcgagatctgcctctgcgcacgcgaggaagctgccatgtacttcgtggcgcttttctgtccgtgccgccacgaacttccgcgcccactcgtgctgtgcgtgttcccggtgcccgaagcgcgccgactcggtccgcactag

SEQ ID NO: 5766 - DNA, 192 bp, synthetic construct
  source 1..192: mol_type = other DNA
  misc_feature 1..192: note = Synthetic
ctgtggggggacggcgacctggcggacggatggatgagtccgggcgacagcgacctgctagtcatgtggcagctgacatcagcccccaaggtgcacaccgacgctccttcaaggcctggctcgcgtcctacatacactccctcagccgccgggcgtccggacgcccaagcgactcggtccgcactagcctga

SEQ ID NO: 5767 - DNA, 159 bp, synthetic construct
  source 1..159: mol_type = other DNA
  misc_feature 1..159: note = Synthetic
atgagtccgggcgacagcgacctgctagtcatgtggcagctgacatcagcccccaaggtgcacaccgacgctccttcaaggcctggctcgcgtcctacatacactccctcagccgccgggcgtccggacgcccaagcgactcggtccgcactagcctga

SEQ ID NO: 5768 - DNA, 27 bp, synthetic construct
  misc_feature 1..27: note = Synthetic
  source 1..27: mol_type = other DNA
ataattcaagagtgtgtgtctctctaa

SEQ ID NO: 5769 - DNA, 168 bp, synthetic construct
  source 1..168: mol_type = other DNA
  misc_feature 1..168: note = Synthetic
atggaccgcctccgcacctgctacgagcgcttctacgacatcagccgcgatcacctgagccgcggcaccgggctctgcgtggactgcctggacttcgacacggacgtggacacgctcgtcagcatggtgcccgtgctcgacgactcggtccgcactagcctgaggtaa

SEQ ID NO: 5770 - DNA, 12 bp, synthetic construct
  misc_feature 1..12: note = Synthetic
  source 1..12: mol_type = other DNA
atggccagttaa

SEQ ID NO: 5771 - DNA, 189 bp, synthetic construct
  source 1..189: mol_type = other DNA
  misc_feature 1..189: note = Synthetic
atcaccaaaaaaacactaaccgccctggaacgcactccttgcacttattccatcgttgttcctgaggctctaaacctgcacctggacgacttttcttttgttgattttcttaaaaattgcttgcctgattttctgtccagttatctggaagatatcacaggcgactcggtccgcactagcctgaggtaa

SEQ ID NO: 5772 - DNA, 144 bp, synthetic construct
  misc_feature 1..144: note = Synthetic
  source 1..144: mol_type = other DNA
gtgagaccccctcccactttgagtgagacattcccattgacgatggctattgggtcagccagtttgagtgacaggaccccaggggggaagttttggaatccatcggaggagacaaaggggggagtgaggaaggggatattctga

SEQ ID NO: 5773 - DNA, 48 bp, synthetic construct
  misc_feature 1..48: note = Synthetic
  source 1..48: mol_type = other DNA
ctgcagtcaacctcagcaacgcgactacggtcatcccacaacctgtag

SEQ ID NO: 5774 - DNA, 177 bp, synthetic construct
  source 1..177: mol_type = other DNA
  misc_feature 1..177: note = Synthetic
acggtcatcccacaacctgtagaatacccggctgggggagtacaatatcaaagagcggcaacgcattattcttggatgctaatcattgtcatcattctcatcatttttattatcatctgtctacgagcacctcgaaaaatctaccatcacgactcggtccgcactagcctgaggtaa

SEQ ID NO: 5775 - DNA, 69 bp, synthetic construct
  misc_feature 1..69: note = Synthetic
  source 1..69: mol_type = other DNA
ataaaacggagtatgagcagatgcaaaatgagaattcatttcgactcggtccgcactagcctgaggtaa

SEQ ID NO: 5776 - DNA, 57 bp, synthetic construct
  misc_feature 1..57: note = Synthetic
  source 1..57: mol_type = other DNA
atgggcagatgcaaaatgagaattcatttcgactcggtccgcactagcctgaggtaa

SEQ ID NO: 5777 - DNA, 216 bp, synthetic construct
  source 1..216: mol_type = other DNA
  misc_feature 1..216: note = Synthetic
atgaccgtgacgcctgccagcacctcggtggtgaaagggcagagcaccacgctgaccgtggccttccagccggagggcgtaaccgacaagagctttcgtgcggtgtctgcggataaaacaaaagccaccgcctcggtcagtggtatgaccatcaccgtgaacggcgttgctgcaggcaaggtcaacattccggttgtacgactcggtccgcactag

SEQ ID NO: 5778 - DNA, 216 bp, synthetic construct
  misc_feature 1..216: note = Synthetic
  source 1..216: mol_type = other DNA
atgaccgtgacgcctgccagcacctcggtggtgaaagggcagagcaccacgctgaccgtggccttccagccggagggcgtaaccgacaagagctttcgtgcggtgtctgcggataaaacaaaagccaccgtgtcggtcagtggtatgaccatcaccgtgaacggcgttgctgcaggcaaggtcaacattccggttgtacgactcggtccgcactag

SEQ ID NO: 5779 - DNA, 216 bp, synthetic construct
  misc_feature 1..216: note = Synthetic
  source 1..216: mol_type = other DNA
atgaccgtgacgcctgccagcacctcggtggtgaaagggcagagcaccacgctgaccgtggccttccagccggagggcgtaaccgacaagagctttcgtgcggtgtctgcggataaaacaaaagccaccgtgtcggtcagtggtatgaccatcaccgtgaacggcgttgctgcaggcagcctcaacattccggttgtacgactcggtccgcactag

SEQ ID NO: 5780 - DNA, 27 bp, synthetic construct
  misc_feature 1..27: note = Synthetic
  source 1..27: mol_type = other DNA
atgttccccatttgcctcttggtataa

SEQ ID NO: 5781 - DNA, 135 bp, synthetic construct
  source 1..135: mol_type = other DNA
  misc_feature 1..135: note = Synthetic
acgattttgaattgtttaaagtatttccacttgaaaaccggagtagaattcgacctgctaaaacagatggaagcctacaattctaaactacctttccgaagttcccgccctacgattctgattagaaacacataa

SEQ ID NO: 5782 - DNA, 180 bp, synthetic construct
  misc_feature 1..180: note = Synthetic
  source 1..180: mol_type = other DNA
aagagtatcgttatgatgcttagaacgtggatatcattaccgatggtactgcttgacgcgtactgtttttgtatttttgtgagttgttcaatcagcacgacgactgctcccgtggaatggaagtctcccgaccgtcagattcctatgaatatcgactcggtccgcactagcctgaggtaa

SEQ ID NO: 5783 - DNA, 54 bp, synthetic construct
  source 1..54: mol_type = other DNA
  misc_feature 1..54: note = Synthetic
atggaagtctcccgaccgtcagattcctatgaatatcgactcggtccgcactag

SEQ ID NO: 5784 - DNA, 36 bp, synthetic construct
  source 1..36: mol_type = other DNA
  misc_feature 1..36: note = Synthetic
attgtgagactgaaagagtatcgttgccatgcttag

SEQ ID NO: 5785 - DNA, 165 bp, synthetic construct
  source 1..165: mol_type = other DNA
  misc_feature 1..165: note = Synthetic
atgcttagaacgtggatatcattaccgatggtactgcttgacgcgtactgtttttgtatttttgtgagttgttcaatcagcacgacgactgctcccgtggaatggaagtctcccgaccgtcagattcctatgaatatcgactcggtccgcactagcctgaggtaa

SEQ ID NO: 5786 - DNA, 168 bp, synthetic construct
  misc_feature 1..168: note = Synthetic
  source 1..168: mol_type = other DNA
atgcgcgcttcaaagagcgaccgttttctcatgtcctcctgggtcaagctgttgtttgtggctgtaattatgtacatttgctctgcagtcgtgcccatggccgccacgtacgagggccttggtttcccctgctacttcaacgactcggtccgcactagcctgaggtaa

SEQ ID NO: 5787 - DNA, 210 bp, synthetic construct
  source 1..210: mol_type = other DNA
  misc_feature 1..210: note = Synthetic
ttggctctcccgccgcagcgccgcctggcgaaagttaaaaagaccgagaaacgcccgcgcttcaaagagcgaccgttttctcatgtcctcctgggtcaagctgttgtttgtggctgtaattatgtacatttgctctgcagtcgtgcccatggccgccacgtacgagggccttggtttcccctgctacttcaacgactcggtccgcactag

SEQ ID NO: 5788 - DNA, 156 bp, synthetic construct
  source 1..156: mol_type = other DNA
  misc_feature 1..156: note = Synthetic
aagagcgaccgttttctcatgtcctcctgggtcaagctgttgtttgtggctgtaattatgtacatttgctctgcagtcgtgcccatggccgccacgtacgagggccttggtttcccctgctacttcaacgactcggtccgcactagcctgaggtaa

SEQ ID NO: 5789 - DNA, 117 bp, synthetic construct
  misc_feature 1..117: note = Synthetic
  source 1..117: mol_type = other DNA
atgcttaaggagatgagatccggcattgggttaacacggaacgatgcttcaatgtggtgcgacataccctgcagcggaagtggacgagtcggaatgatgcccgggcggataacttga

SEQ ID NO: 5790 - DNA, 195 bp, synthetic construct
  source 1..195: mol_type = other DNA
  misc_feature 1..195: note = Synthetic
atgtccatgggcgcgctcaccgacctcggccagaacatgctctatgccaactccgcccacgcgctagacatgaatttcgaagtcgaccccatggatgagtccacccttctctatgttgtcttcgaagtcttcgacgtcgtccgagtgcaccagccccaccgcggcgtcatcgaggcccgactcggtccgcactag

SEQ ID NO: 5791 - DNA, 93 bp, synthetic construct
  source 1..93: mol_type = other DNA
  misc_feature 1..93: note = Synthetic
atgttgtcttcgaagtcttcgacgtcgtccgagtgcaccagccccaccgcggcgtcatcgaggcccgactcggtccgcactagcctgaggtaa

SEQ ID NO: 5792 - DNA, 39 bp, synthetic construct
  source 1..39: mol_type = other DNA
  misc_feature 1..39: note = Synthetic
atgctagaatcttggaaagatatgcaccttgttctataa

SEQ ID NO: 5793 - DNA, 204 bp, synthetic construct
  misc_feature 1..204: note = Synthetic
  source 1..204: mol_type = other DNA
aggactgagtatagtatggaaccgtggacattacaagaaacaagttatgaaatgtggcaaacaccacctaaacgctgttttaaaaaacggggcaaaactgtagaagttaaatttgatggctgtgcaaacaatacaatggattatgtggtatggacagatgtgtatgtgcaggacaatgacacgactcggtccgcactagcctga

SEQ ID NO: 5794 - DNA, 204 bp, synthetic construct
  misc_feature 1..204: note = Synthetic
  source 1..204: mol_type = other DNA
aggactgagtatagtatggaaccgtggacattacaagaaacaagttatgaaatgtggcaaacaccacctaaacgctgttttaaaaaacggggcaaaactgtagaagttaaatttgatggctgtgcaaacaatacaatggattatgtggtatggacagatgtgtatgtgcaggacagccacacgactcggtccgcactagcctga

SEQ ID NO: 5795 - DNA, 189 bp, synthetic construct
  source 1..189: mol_type = other DNA
  misc_feature 1..189: note = Synthetic
atcaagtgcaagatcccaatgatatttgcggcaatagcgagaggatcacttgaaccgttgcatctgcacccccattcgtttctgataggcctgcaaattttcaagaagatcatttttcagaccagcactggagctaggatgagtcccaatggttctcatcgcttgccgactcggtccgcactagcctga

SEQ ID NO: 5796 - DNA, 189 bp, synthetic construct
  misc_feature 1..189: note = Synthetic
  source 1..189: mol_type = other DNA
atcaagtgcaagatcccaatgatatttgcggcaatagcgagaggatcacttgaaccgttgcatctgcacccccattcgtttctgataggcctgcaagccttcaagaagatcatttttcagaccagcactggagctaggatgagtcccaatggttctcatcgcttgccgactcggtccgcactagcctga

SEQ ID NO: 5797 - DNA, 204 bp, synthetic construct
  source 1..204: mol_type = other DNA
  misc_feature 1..204: note = Synthetic
atgtacctgagcattgtcagaattattctggttgcatgcttagggcttgtattaaaactgcccaagctgatacagctggtctttatacaaattttcgaattgacgtcccatctgcagaatcaactggtactcaatcagtttctgtcgatcgtgagtcaacttcaactcatgatggtcctaccgactcggtccgcactagcctga

SEQ ID NO: 5798 - DNA, 186 bp, synthetic construct
  misc_feature 1..186: note = Synthetic
  source 1..186: mol_type = other DNA
atgctaagacgcggtgcagcccgtgtcatccctccaggaggagggctcaagaggctgcctgtaggattgctgttgggtcggggtccgatcaaaatgatcctggccatactggcattcctacgatttacagcaataaaaccgtccactggcctcatcaacgactcggtccgcactagcctgaggtaa

SEQ ID NO: 5799 - DNA, 33 bp, synthetic construct
  source 1..33: mol_type = other DNA
  misc_feature 1..33: note = Synthetic
atggtcttaagctcccactcaggtgtatattag

SEQ ID NO: 5800 - DNA, 168 bp, synthetic construct
  source 1..168: mol_type = other DNA
  misc_feature 1..168: note = Synthetic
atggcgctctccgggcacgtcttgatagaccccgcccgactgcccagggacacaggccccgaactcatgtgggccccaagccttcgcaactcactgcgcgtgtcccccgaagcgctcgagctggcagagcgggaggccgacgactcggtccgcactagcctgaggtaa

SEQ ID NO: 5801 - DNA, 180 bp, synthetic construct
  source 1..180: mol_type = other DNA
  misc_feature 1..180: note = Synthetic
aaggtaatgattcaacatcaaggtcagacgatggatccagccaactgcgagacaagcagagtaataaggctaatcctgccactgcggaaccgggtacatccaattgtgaacactataaggctcgaccgggtattgcgtctgtacagaaagccactgacgactcggtccgcactagcctga

SEQ ID NO: 5802 - DNA, 162 bp, synthetic construct
  misc_feature 1..162: note = Synthetic
  source 1..162: mol_type = other DNA
atgcgtcagtacgtaggaccaacacgggcgaacaccttgtgccgttgccaggacgccgtgcggggaggcacaattttagggttaccctgggggcgagtatctgggaataaaaaaggtcgtggagtacagaaaagaaggacgctgacgttggggcccccgtaa

SEQ ID NO: 5803 - DNA, 216 bp, synthetic construct
  source 1..216: mol_type = other DNA
  misc_feature 1..216: note = Synthetic
aagaaacaaaaaccaaacactaaaatgaggagtaatcctcagaaaaacaaaattaaattggttaataaaaaattgcaaactttctttatggccttcttccaaattctgctggcggtgttcaagaattttaaggtttcactccaactgaggttcctggaaaaagtttaccggactgtctttaagaacttcgactcggtccgcactagcctgaggtaa

SEQ ID NO: 5804 - DNA, 201 bp, synthetic construct
  misc_feature 1..201: note = Synthetic
  source 1..201: mol_type = other DNA
acgctcccgggcaaacagggcagagaggcgggaatgtccgccaccctccccctgccccgttgcaccgatagcatggccgccagagttccaatagaggagctccgagagttccgccacctccgggggcactgtcgagaagacgttgtaggtgtccagcgctctggtcgccccctcgactcggtccgcactagcctgaggtaa

SEQ ID NO: 5805 - DNA, 201 bp, synthetic construct
  source 1..201: mol_type = other DNA
  misc_feature 1..201: note = Synthetic
acgctcccgggcaaacagggcagagaggcgggagcctccgccaccctccccctgccccgttgcaccgatagcatggccgccagagttccaatagaggagctccgagagttccgccacctccgggggcactgtcgagaagacgttgtaggtgtccagcgctctggtcgccccctcgactcggtccgcactagcctgaggtaa

SEQ ID NO: 5806 - DNA, 87 bp, synthetic construct
  misc_feature 1..87: note = Synthetic
  source 1..87: mol_type = other DNA
ctgctaatcagggaagtagccttgtgtgtggtagatccacagatcaaggatatcgcctcttcttcgactcggtccgcactagcctga

SEQ ID NO: 5807 - DNA, 87 bp, synthetic construct
  misc_feature 1..87: note = Synthetic
  source 1..87: mol_type = other DNA
ctgctaatcagggaagtagccttgtgtgtggtagatccacagatcaaggatatcttgtcttcttcgactcggtccgcactagcctga

SEQ ID NO: 5808 - DNA, 30 bp, synthetic construct
  source 1..30: mol_type = other DNA
  misc_feature 1..30: note = Synthetic
atgcccttctctacctgcacctccaaatga

SEQ ID NO: 5809 - DNA, 168 bp, synthetic construct
  misc_feature 1..168: note = Synthetic
  source 1..168: mol_type = other DNA
atgactcggcgtagggtgctaagcgtggtcgtgctgctagccgccctggcgtgccgcctcggtgcgcagaccccagagcagcccgcaccccccgccaccacggtgcagcctaccgccacgcgtcagcaaaccagctttcccgactcggtccgcactagcctgaggtaa

SEQ ID NO: 5810 - DNA, 168 bp, synthetic construct
  source 1..168: mol_type = other DNA
  misc_feature 1..168: note = Synthetic
atgactcggcgtagggtgctaagcgtggtcgtgctgctagccgccctggcgtgccgtctcggtgcgcagaccccagagcagcccgcaccccccgccaccacggtgcagcctaccgccacgcgtcagcaaaccagctttcccgactcggtccgcactagcctgaggtaa

SEQ ID NO: 5811 - DNA, 153 bp, synthetic construct
  source 1..153: mol_type = other DNA
  misc_feature 1..153: note = Synthetic
gtgctaagcgtggtcgtgctgctagccgccctggcgtgccgcctcggtgcgcagaccccagagcagcccgcaccccccgccaccacggtgcagcctaccgccacgcgtcagcaaaccagctttcccgactcggtccgcactagcctgaggtaa

SEQ ID NO: 5812 - DNA, 219 bp, synthetic construct
  source 1..219: mol_type = other DNA
  misc_feature 1..219: note = Synthetic
aagatggaggaagaaatagaaaacataaaaaaagaatatgaaagtataaaagatgaaacatcaagtttacaagaagaaactaaaaaattagtagacgatatttctactgctcgcgaaacaacgatggaggcacttaactctataatgaaggaattaacacaaaaaattcaaactggtaatttaattggcaacgactcggtccgcactagcctgaggtaa

SEQ ID NO: 5813 - DNA, 168 bp, synthetic construct
  source 1..168: mol_type = other DNA
  misc_feature 1..168: note = Synthetic
atggccgccaaagtgcatgttgatattgaggctgacagcccattcatcaagtctttgcagaaggcatttccgtcgttcgaggtggagtcattgcaggtcacaccaaatgaccatgcaaatgccagagcattttcgcacctcgactcggtccgcactagcctgaggtaa

SEQ ID NO: 5814 - DNA, 171 bp, synthetic construct
  misc_feature 1..171: note = Synthetic
  source 1..171: mol_type = other DNA
acggccgccgccaaagtgcatgttgatattgaggctgacagcccattcatcaagtctttgcagaaggcatttccgtcgttcgaggtggagtcattgcaggtcacaccaaatgaccatgcaaatgccagagcattttcgcacctcgactcggtccgcactagcctgaggtaa

SEQ ID NO: 5815 - DNA, 213 bp, synthetic construct
  source 1..213: mol_type = other DNA
  misc_feature 1..213: note = Synthetic
attatattcaatatggaaagaataaaagaactaagaaatttgatgtcgcaatctcgcactcgcgagatactgacaaaaaccactgtggatcatatggccataattaagaagtacacatcaggaagacaggagaagaatcccgctcttagaatgaaatggatgatggcgatgaaatacccgatcaccgactcggtccgcactagcctgaggtaa

SEQ ID NO: 5816 - DNA, 222 bp, synthetic construct
  misc_feature 1..222: note = Synthetic
  source 1..222: mol_type = other DNA
atcccgaataccgcaaccaaaatatcgcggcacttcttagactcatctaaaaccgcccaggctatactaccaatatttttgcttctattgcttccctacgctgtctcaaccccagctgcctatagtactccaccagaacaccttagaaaatgcaaattccaacaaccgtggtcatttcttgcttgctatcgagacgactcggtccgcactagcctgaggtaa

SEQ ID NO: 5817 - DNA, 63 bp, synthetic construct
  source 1..63: mol_type = other DNA
  misc_feature 1..63: note = Synthetic
atgcaaattccaacaaccgtggtcatttcttgcttgctatcgagacgactcggtccgcactag

SEQ ID NO: 5818 - DNA, 168 bp, synthetic construct
  misc_feature 1..168: note = Synthetic
  source 1..168: mol_type = other DNA
atgccacaacaacaagttgcccatacatgcgtgatgttgtggggtatcatatctacagtgagcggtatcaacactgaagcgctcagtcagtatggtgtcgtagtaaccaacgttagacaactcacctactacacacaggccgactcggtccgcactagcctgaggtaa

SEQ ID NO: 5819 - DNA, 60 bp, synthetic construct
  source 1..60: mol_type = other DNA
  misc_feature 1..60: note = Synthetic
atgtcagcagttcttgaagtactccggatgcagctctcgggccacgtgatgaaatgctag

SEQ ID NO: 5820 - DNA, 21 bp, synthetic construct
  source 1..21: mol_type = other DNA
  misc_feature 1..21: note = Synthetic
atgcaggctcacagggtgtaa

SEQ ID NO: 5821 - DNA, 33 bp, synthetic construct
  misc_feature 1..33: note = Synthetic
  source 1..33: mol_type = other DNA
atgcagctctcgggccacgtgatgaaatgctag

SEQ ID NO: 5822 - DNA, 63 bp, synthetic construct
  misc_feature 1..63: note = Synthetic
  source 1..63: mol_type = other DNA
atggacctcgtcaacgaaagaataatgatcctgaacgactcggtccgcactagcctgaggtaa

SEQ ID NO: 5823 - DNA, 60 bp, synthetic construct
  source 1..60: mol_type = other DNA
  misc_feature 1..60: note = Synthetic
aggcgtcccctcgtcgcgacgacgcgcgccctcacggcctctaagccgaggaggacctga

SEQ ID NO: 5824 - DNA, 156 bp, synthetic construct
  source 1..156: mol_type = other DNA
  misc_feature 1..156: note = Synthetic
ctgaacgaggccgggttgctgcacatgctcacgcgcatcgcgcagatatgcggcggcgacgccgccgccgcggccgccaccatcaagatgctcatggacctcgtcaacgaaagaataatgatcctgaacgactcggtccgcactagcctgaggtaa

SEQ ID NO: 5825 - DNA, 222 bp, synthetic construct
  source 1..222: mol_type = other DNA
  misc_feature 1..222: note = Synthetic
ttggctaaaattgaactactaaagcagctgttaagggacaatgaagccaaaacggtgttgagacagacaacggtagaccaatacaacataataagaaaattcaatacatcaagaattgaaaagaacccttcattaagaatgaagtgggccatgtgttccaattttcccttagctctgaccaagggtgatatggccgactcggtccgcactagcctgaggtaa

SEQ ID NO: 5826 - DNA, 213 bp, synthetic construct
  source 1..213: mol_type = other DNA
  misc_feature 1..213: note = Synthetic
attatattcaatgccgaaagaataaaagaactaagaaatttgatgtcgcaatctcgcactcgcgagatactgacaaaaaccactgtggatcatatggccataattaagaagtacacatcaggaagacaggagaagaatcccgctcttagaatgaaatggatgatggcgatgaaatacccgatcaccgactcggtccgcactagcctgaggtaa

SEQ ID NO: 5827 - DNA, 210 bp, synthetic construct
  source 1..210: mol_type = other DNA
  misc_feature 1..210: note = Synthetic
atgctcgtcgaccccaggcgctggtactattcgccggtgtccctcggaccgactttatgggatcggtcgagtcttgcccatcgggacgacttttcaacaccctcggcacgtgtggtatctatttactcaatccagagccccgtttatgttaatttccctatgcggaacttctggtgtacatccgactcggtccgcactagcctgaggtaa

SEQ ID NO: 5828 - DNA, 144 bp, synthetic construct
  source 1..144: mol_type = other DNA
  misc_feature 1..144: note = Synthetic
atcggtcgagtcttgcccatcgggacgacttttcaacaccctcggcacgtgtggtatctatttactcaatccagagccccgtttatgttaatttccctatgcggaacttctggtgtacatccgactcggtccgcactagcctga

SEQ ID NO: 5829 - DNA, 24 bp, synthetic construct
  misc_feature 1..24: note = Synthetic
  source 1..24: mol_type = other DNA
atggaaagagtttgccgaggatga

SEQ ID NO: 5830 - DNA, 48 bp, synthetic construct
  source 1..48: mol_type = other DNA
  misc_feature 1..48: note = Synthetic
atgactgctgctgcattgacgttgagcgaaaacgcacgtttaccatga

SEQ ID NO: 5831 - DNA, 210 bp, synthetic construct
  misc_feature 1..210: note = Synthetic
  source 1..210: mol_type = other DNA
attctatgcacttcagccactgctatcataataggcgcaatcgcagtactcattggaatggcaaacctaggattgaacataggactgcatctaaaaccgggctgcaattgctcacactcacaacctgaaacaaccaacacaagccaaacaataataaacaactattataatgaaacaaacatcgactcggtccgcactagcctgaggtaa

SEQ ID NO: 5832 - DNA, 93 bp, synthetic construct
  misc_feature 1..93: note = Synthetic
  source 1..93: mol_type = other DNA
atggctgtaccgcctgacgcggatgcgccgccaccaacagccccgccaatggcgctgccgatactcccgacgactcggtccgcactagcctga

SEQ ID NO: 5833 - DNA, 75 bp, synthetic construct
  misc_feature 1..75: note = Synthetic
  source 1..75: mol_type = other DNA
atgacggcgtctctcgaacaccgacaaggagggagagctgcccgagtttcggaagagcaagcgagagaggagtga

SEQ ID NO: 5834 - DNA, 36 bp, synthetic construct
  misc_feature 1..36: note = Synthetic
  source 1..36: mol_type = other DNA
ttgatgataggtttgcacatgccctcaggttcttga

SEQ ID NO: 5835 - DNA, 210 bp, synthetic construct
  source 1..210: mol_type = other DNA
  misc_feature 1..210: note = Synthetic
aggtttgcacatgccctcaggttcttgaatgatatgggaaaagttaggaaggacacacaagagtggaaaccctcaactggatgggacaactgggaagaagttccgttttgctcccaccacttcaacaagctccatctcaaggacgggaggtccattgtggttccctgccgccaccaagatgaactgacgactcggtccgcactagcctga

SEQ ID NO: 5836 - DNA, 54 bp, synthetic construct
  misc_feature 1..54: note = Synthetic
  source 1..54: mol_type = other DNA
atctcaaggacgggaggtccattgtggttccctgccgccaccaagatgaactga

SEQ ID NO: 5837 - DNA, 177 bp, synthetic construct
  misc_feature 1..177: note = Synthetic
  source 1..177: mol_type = other DNA
atgggaaaagttaggaaggacacacaagagtggaaaccctcaactggatgggacaactgggaagaagttccgttttgctcccaccacttcaacaagctccatctcaaggacgggaggtccattgtggttccctgccgccaccaagatgaactgacgactcggtccgcactagcctga

SEQ ID NO: 5838 - DNA, 111 bp, synthetic construct
  misc_feature 1..111: note = Synthetic
  source 1..111: mol_type = other DNA
agggacacaggctctgttatggtatactgtatctatattattgaattgtcctcatctctcttaggacaatttcagattgtcccatttatccgtcaggtgacactatcctaa

SEQ ID NO: 5839 - DNA, 72 bp, synthetic construct
  source 1..72: mol_type = other DNA
  misc_feature 1..72: note = Synthetic
ctgacccagccaatcaaagcattataccagaccatggaatgcataccaaacattcgactcggtccgcactag

SEQ ID NO: 5840 - DNA, 24 bp, synthetic construct
  misc_feature 1..24: note = Synthetic
  source 1..24: mol_type = other DNA
atggtacgatataaccgtttctaa

SEQ ID NO: 5841 - DNA, 222 bp, synthetic construct
  misc_feature 1..222: note = Synthetic
  source 1..222: mol_type = other DNA
atcccgaataccgcaaccaaaatatcgcggcacttcttagactcatctaaaaccatgcaggctatactaccaatatttttgcttctattgcttccctacgctgtctcaaccccagctgcctatagtactccaccagaacaccttagaaaatgcaaattccaacaaccgtggtcatttcttgcttgctatcgagacgactcggtccgcactagcctgaggtaa

SEQ ID NO: 5842 - DNA, 189 bp, synthetic construct
  misc_feature 1..189: note = Synthetic
  source 1..189: mol_type = other DNA
ctggagccgatggcagaagagcaggcacgccgcctcaaaaacggactggaatgcatccgggctctcaaggccgagcccatcggctcactggccgtcgaggaagccatggcagcatggtcagaaatatcagacaacccaggacaggaccgagccacctgcaaggaagaggagcgactcggtccgcactag

SEQ ID NO: 5843 - DNA, 168 bp, synthetic construct
  misc_feature 1..168: note = Synthetic
  source 1..168: mol_type = other DNA
atgcatcccgtactgcggcagatgcgcccccaccaccctccaccgcaacaacagccccctcctccacagccggcgcttctgcccccgccccagcagcagcagcaacttccagccacgaccgccgcggccgccgtgagcggcgactcggtccgcactagcctgaggtaa

SEQ ID NO: 5844 - DNA, 156 bp, synthetic construct
  source 1..156: mol_type = other DNA
  misc_feature 1..156: note = Synthetic
ctgcggcagatgcgcccccaccaccctccaccgcaacaacagccccctcctccacagccggcgcttctgcccccgccccagcagcagcagcaacttccagccacgaccgccgcggccgccgtgagcggcgactcggtccgcactagcctgaggtaa

SEQ ID NO: 5845 - DNA, 174 bp, synthetic construct
  misc_feature 1..174: note = Synthetic
  source 1..174: mol_type = other DNA
ttggacgccttcgtcttgtttctcgtgctctgctattttattctcatttttaacatgctcgtgcccgcgatcgcagagaagctgcgcgtggagcacgacgctttcgcggctctgcggcagctgcaccgcgagcgattcgtgtgcgtcgactcggtccgcactagcctgaggtaa

SEQ ID NO: 5846 - DNA, 126 bp, synthetic construct
  source 1..126: mol_type = other DNA
  misc_feature 1..126: note = Synthetic
aagaacacagatcttgaggctctcatggaatggctaaagacaagaccaatcttgtcacctctgactaagggaattttaggatttgtgttcacgctcaccgactcggtccgcactagcctgaggtaa

SEQ ID NO: 5847 - DNA, 21 bp, synthetic construct
  misc_feature 1..21: note = Synthetic
  source 1..21: mol_type = other DNA
aggacggtgtccgtcaattga

SEQ ID NO: 5848 - DNA, 162 bp, synthetic construct
  source 1..162: mol_type = other DNA
  misc_feature 1..162: note = Synthetic
aggaacatgcccgccgcgcctgcgtcccaacgcagcttctttagagaagctccagattcacgccggttcgcacagttcccttttggattagaagatggggctcagttcgtcaacgcagtagatacttgtgaaaacttgccgactcggtccgcactagcctga

SEQ ID NO: 5849 - DNA, 15 bp, synthetic construct
  misc_feature 1..15: note = Synthetic
  source 1..15: mol_type = other DNA
atgacgttagtatga

SEQ ID NO: 5850 - DNA, 78 bp, synthetic construct
  misc_feature 1..78: note = Synthetic
  source 1..78: mol_type = other DNA
atggcgttagtacgagtgtcgtgcagcctccaggaccccccctcccgggagagccatagtggtctgcggaaccggtga

SEQ ID NO: 5851 - DNA, 15 bp, synthetic construct
  source 1..15: mol_type = other DNA
  misc_feature 1..15: note = Synthetic
atggcgttagtatga

SEQ ID NO: 5852 - DNA, 33 bp, synthetic construct
  misc_feature 1..33: note = Synthetic
  source 1..33: mol_type = other DNA
atggctaccttgcggacttcgtgctcagcctag

SEQ ID NO: 5853 - DNA, 36 bp, synthetic construct
  misc_feature 1..36: note = Synthetic
  source 1..36: mol_type = other DNA
aaggtgcccaaaaccacatttaaccccctgatttga

SEQ ID NO: 5854 - DNA, 123 bp, synthetic construct
  misc_feature 1..123: note = Synthetic
  source 1..123: mol_type = other DNA
ctgagcgggacgttggcggcgaccccctttctgtggtgttttatcttcaaggccctgtactcgttcacactctttaccacagagatcacggccgtcgactcggtccgcactagcctgaggtaa

SEQ ID NO: 5855 - DNA, 78 bp, synthetic construct
  misc_feature 1..78: note = Synthetic
  source 1..78: mol_type = other DNA
atgacttgcgagcgccaaaagcgatcacaagtccgcggctctgacaacacgagcctcgaccgactcggtccgcactag

SEQ ID NO: 5856 - DNA, 39 bp, synthetic construct
  source 1..39: mol_type = other DNA
  misc_feature 1..39: note = Synthetic
atgaggatgtcgttggcgttgatctcgttctgcgtgtag

SEQ ID NO: 5857 - DNA, 201 bp, synthetic construct
  source 1..201: mol_type = other DNA
  misc_feature 1..201: note = Synthetic
atgcaaggtgttaagctaggcaccggtttctctttgtctgacttgcccgcttatgttacagttgctaaggtgtcacacctttgcacttataagcgcgcattcttagacaaggtagacggtgttagcggttttgctgtttatgtgaagtccaaggtcggaaattaccgactgcccgactcggtccgcactagcctgaggtaa

SEQ ID NO: 5858 - DNA, 66 bp, synthetic construct
  misc_feature 1..66: note = Synthetic
  source 1..66: mol_type = other DNA
atgatgatctttatgttccgtctctttacgaactgtatgatctcgactcggtccgcactagcctga

SEQ ID NO: 5859 - DNA, 15 bp, synthetic construct
  source 1..15: mol_type = other DNA
  misc_feature 1..15: note = Synthetic
atggcagtgacgtaa

SEQ ID NO: 5860 - DNA, 168 bp, synthetic construct
  misc_feature 1..168: note = Synthetic
  source 1..168: mol_type = other DNA
atggcttcgtgcccctgccatcaacacgcgtctgcgttcgaccaggctgcgcgttctcgcggccataacaaccgacgtacggcgttgcgccctcgccggcagcaaaaagccacggaagtccgcctggagcagaaaatgcccgactcggtccgcactagcctgaggtaa

SEQ ID NO: 5861 - DNA, 168 bp, synthetic construct
  source 1..168: mol_type = other DNA
  misc_feature 1..168: note = Synthetic
atggcttggtacccctgccatcaacacgcgtctgcgttcgaccaggctgcgcgttctcgcggccataacaaccgacgtacggcgttgcgccctcgccggcagcaaaaagccacggaagtccgcctggagcagaaaatgcccgactcggtccgcactagcctgaggtaa

SEQ ID NO: 5862 - DNA, 168 bp, synthetic construct
  misc_feature 1..168: note = Synthetic
  source 1..168: mol_type = other DNA
atgggttcgtacccctgccatcaacacgcgtctgcgttcgaccaggctgcgcgttctcgcggccataacaaccgacgtacggcgttgcgccctcgccggcagcaaaaagccacggaagtccgcctggagcagaaaatgcccgactcggtccgcactagcctgaggtaa

SEQ ID NO: 5863 - DNA, 168 bp, synthetic construct
  source 1..168: mol_type = other DNA
  misc_feature 1..168: note = Synthetic
attgcttcgtacccctgccatcaacacgcgtctgcgttcgaccaggctgcgcgttctcgcggccataacaaccgacgtacggcgttgcgccctcgccggcagcaaaaagccacggaagtccgcctggagcagaaaatgcccgactcggtccgcactagcctgaggtaa

SEQ ID NO: 5864 - DNA, 210 bp, synthetic construct
  misc_feature 1..210: note = Synthetic
  source 1..210: mol_type = other DNA
atcactatggagacatacaagatcaatatttttagagacaggatcaaccagtgtcgaagtgctgaagaagccaaagacattgttgctgatcttcttatggctagacatgactattttggtagagaggtatgttattacctggatatcgagttccggcaggacgttccagcttatgacatacttcttgcgactcggtccgcactagcctga

SEQ ID NO: 5865 - DNA, 144 bp, synthetic construct
  source 1..144: mol_type = other DNA
  misc_feature 1..144: note = Synthetic
ctgaagaagccaaagacattgttgctgatcttcttatggctagacatgactattttggtagagaggtatgttattacctggatatcgagttccggcaggacgttccagcttatgacatacttcttgcgactcggtccgcactag

SEQ ID NO: 5866 - DNA, 30 bp, synthetic construct
  misc_feature 1..30: note = Synthetic
  source 1..30: mol_type = other DNA
atgaggcacacagcggtcttcttctgctga

SEQ ID NO: 5867 - DNA, 30 bp, synthetic construct
  misc_feature 1..30: note = Synthetic
  source 1..30: mol_type = other DNA
atgctgtgttcagtctgccataatccgtga

SEQ ID NO: 5868 - DNA, 30 bp, synthetic construct
  source 1..30: mol_type = other DNA
  misc_feature 1..30: note = Synthetic
atggcctgttcagtctgccataatccgtga

SEQ ID NO: 5869 - DNA, 96 bp, synthetic construct
  misc_feature 1..96: note = Synthetic
  source 1..96: mol_type = other DNA
atttctagccgcgctaagaaccgtcttcccaggaccttaacgccgtcaccaccgtacacgagttttacgcgcttttttcgactcggtccgcactag

SEQ ID NO: 5870 - DNA, 168 bp, synthetic construct
  source 1..168: mol_type = other DNA
  misc_feature 1..168: note = Synthetic
atgaacgcgcacttggccaacgaggtccagtacgatctcggccacggcccgggtcggccctcgtctttggttcacgtcatcatatccagcgagtgcctggcggccgcgggaatccctctggccgccctgatgcgcggccgcgactcggtccgcactagcctgaggtaa

SEQ ID NO: 5871 - DNA, 54 bp, synthetic construct
  source 1..54: mol_type = other DNA
  misc_feature 1..54: note = Synthetic
atgcttaaaggtttagttagcgcgtctctcggagaatatttactcctgctgtag

SEQ ID NO: 5872 - DNA, 30 bp, synthetic construct
  misc_feature 1..30: note = Synthetic
  source 1..30: mol_type = other DNA
atgttccacaccgcgcctcgatcgctctag

SEQ ID NO: 5873 - DNA, 42 bp, synthetic construct
  source 1..42: mol_type = other DNA
  misc_feature 1..42: note = Synthetic
atgcagcaagcatccctgtcgactcggtccgcactagcctga

SEQ ID NO: 5874 - DNA, 225 bp, synthetic construct
  source 1..225: mol_type = other DNA
  misc_feature 1..225: note = Synthetic
attaaccacatcagctccgtgtggaaggacttgctggacgacaacaataccccaattccaacaacaatcatggccaaaaatgaggtcttcgctgtgaacccagcgaagggaggtcggaagcctgctcgcctgatcgtgtatccggatctcggatcccgggtttgcgagaagagagcgcttcacgacgtcatcaaaaacgactcggtccgcactagcctgaggtaa

SEQ ID NO: 5875 - DNA, 225 bp, synthetic construct
  source 1..225: mol_type = other DNA
  misc_feature 1..225: note = Synthetic
attaaccacatcagctccgtgtggaaggacttgctggacgacaacaataccccaattccaacaacaatcatggccaaaaatgaggtcttcgctgtgaacccagcgaagggaggtcggaagcctgctcgcctgatcgtgtatccggatctcggatcccgggtttgcgagaagagagcgcttcacggcctcatcaaaaacgactcggtccgcactagcctgaggtaa

SEQ ID NO: 5876 - DNA, 72 bp, synthetic construct
  misc_feature 1..72: note = Synthetic
  source 1..72: mol_type = other DNA
acggatctatgccctgcgattttcataggagatctacgatgcaggaatgaccagcaggcacccgcttgttga

SEQ ID NO: 5877 - DNA, 81 bp, synthetic construct
  misc_feature 1..81: note = Synthetic
  source 1..81: mol_type = other DNA
aggctcgcttcggtcgtatccgtgaccttgaagctaagcacttcaagaaaaacgttgaggaacaactcaacaagcgcgtag

SEQ ID NO: 5878 - DNA, 111 bp, synthetic construct
  misc_feature 1..111: note = Synthetic
  source 1..111: mol_type = other DNA
atgcaagttgtcgaggctgacatgctctctaagggtctactcggtggcgaggcgtggtcttcgtggcataaggaagactctatcgactcggtccgcactagcctgaggtaa

SEQ ID NO: 5879 - DNA, 90 bp, synthetic construct
  misc_feature 1..90: note = Synthetic
  source 1..90: mol_type = other DNA
atgctctctaagggtctactcggtggcgaggcgtggtcttcgtggcataaggaagactctatcgactcggtccgcactagcctgaggtaa

SEQ ID NO: 5880 - DNA, 168 bp, synthetic construct
  misc_feature 1..168: note = Synthetic
  source 1..168: mol_type = other DNA
ctggcttcgtacccctgccatcaacacgcgtctgcgttcgaccaggctgcgcgttctcgcggccataacaaccgacgtacggcgttgcgccctcgccggcagcaaaaagccacggaagtccgcctggagcagaaaatgcccgactcggtccgcactagcctgaggtaa

SEQ ID NO: 5881 - DNA, 210 bp, synthetic construct
  source 1..210: mol_type = other DNA
  misc_feature 1..210: note = Synthetic
atcactgccgagacatacaagatcaatatttttagagacaggatcaaccagtgtcgaagtgctgaagaagccaaagacattgttgctgatcttcttatggctagacatgactattttggtagagaggtatgttattacctggatatcgagttccggcaggacgttccagcttatgacatacttcttgcgactcggtccgcactagcctga

SEQ ID NO: 5882 - DNA, 168 bp, synthetic construct
  misc_feature 1..168: note = Synthetic
  source 1..168: mol_type = other DNA
atgaccgctcgcggattccacgcttgcacggggaagcacgcgcgcgtttccgtggcgtgcgtcgtggtcgtgtgcgtactgggagctttccttgcgcttgtcctcttggcccctcccggtagcgggagaatacgcttcctcgactcggtccgcactagcctgaggtaa

SEQ ID NO: 5883 - DNA, 174 bp, synthetic construct
  source 1..174: mol_type = other DNA
  misc_feature 1..174: note = Synthetic
atactgacaaaaacaactgtggaccatatggccataatcaagaaatatacatcaggaagacaggagaagaatcctgcccttaggatgaagtggatgatggcaatgaaatatccaattacggcagacaaaaggataatggagatgatcgactcggtccgcactagcctgaggtaa

SEQ ID NO: 5884 - DNA, 198 bp, synthetic construct
  source 1..198: mol_type = other DNA
  misc_feature 1..198: note = Synthetic
ctgaaacctgttctccatcacagagctggtatggcctccagtcgtgtagacaccattaatttacggatctggctggtctctataatctgtgcagccttgtcatttataaacgtcacggtccatctgatagccataaactttccaaatttaggatttccgtgcgcctacttcgactcggtccgcactagcctgaggtaa

SEQ ID NO: 5885 - DNA, 198 bp, synthetic construct
  misc_feature 1..198: note = Synthetic
  source 1..198: mol_type = other DNA
ctgaaacctgttctccatcacagagctggtgccgcctccagtcgtgtagacaccattaatttacggatctggctggtctctataatctgtgcagccttgtcatttataaacgtcacggtccatctgatagccataaactttccaaatttaggatttccgtgcgcctacttcgactcggtccgcactagcctgaggtaa

SEQ ID NO: 5886 - DNA, 216 bp, synthetic construct
  misc_feature 1..216: note = Synthetic
  source 1..216: mol_type = other DNA
gtgcgacagtgcttcaatccaatgatcgtcgagcttgcggaaaaggcaatgaaagaatatggggaagatccgaaaatcgaaacaaacaaattcgcatcaatatgcacacacttagaagtctgcttcatgtactctgatttccacttcatcgacgaacgaggcgaatcaactataatagaatctggcgacgactcggtccgcactagcctgaggtaa

SEQ ID NO: 5887 - DNA, 48 bp, synthetic construct
  source 1..48: mol_type = other DNA
  misc_feature 1..48: note = Synthetic
agggcccgcaacacggcccgggctgcgcacgccagccgggacgggtga

SEQ ID NO: 5888 - DNA, 30 bp, synthetic construct
  source 1..30: mol_type = other DNA
  misc_feature 1..30: note = Synthetic
atggacatctgcccgctggtgatctcgtag

SEQ ID NO: 5889 - DNA, 210 bp, synthetic construct
  source 1..210: mol_type = other DNA
  misc_feature 1..210: note = Synthetic
atggagacatacaaaataaacatctttagagataggatcaatcaatgtcgaagtgctgaagaagccaaggacattgttgctgatctactcatggctagacacgattatttcggtagagaagtatgttattatttggacatcgaatacaggcaagatgttccagcttatgatatacttcttgacgactcggtccgcactagcctgaggtaa

SEQ ID NO: 5890 - DNA, 138 bp, synthetic construct
  misc_feature 1..138: note = Synthetic
  source 1..138: mol_type = other DNA
attgttgctgatctactcatggctagacacgattatttcggtagagaagtatgttattatttggacatcgaatacaggcaagatgttccagcttatgatatacttcttgacgactcggtccgcactagcctgaggtaa

SEQ ID NO: 5891 - DNA, 204 bp, synthetic construct
  misc_feature 1..204: note = Synthetic
  source 1..204: mol_type = other DNA
attgtgggaatagtcatggtctgctcctgcactttctttgccatcatgatctacccctgttttgatctcggctggaactctgttgaggcattcacatacacactagaaagcagttcactagcctccacgccaccgcccacaccgcctccccgcagaaatcagttcccactgattcagtactcgactcggtccgcactagcctga

SEQ ID NO: 5892 - DNA, 213 bp, synthetic construct
  misc_feature 1..213: note = Synthetic
  source 1..213: mol_type = other DNA
atgtcaagctttcaggacatacttatgaggatgtcaaaaatgcagttggggtcctcatcggaggacttgaatggaatggtaacacggttcgagtctctgaaaatatacagagattcgcttggagaaactgtgatgagaatgggagaccttcactacctccagagcagaaatgaaaagtggcgagacgactcggtccgcactagcctgaggtaa

SEQ ID NO: 5893 - DNA, 213 bp, synthetic construct
  misc_feature 1..213: note = Synthetic
  source 1..213: mol_type = other DNA
atgtcaagctttcaggtagactgtttcctttggcatatccgcaagcgatttgcagacaatggattgggtgatgccccattccttgatcggctccgccgagatcaaaagtccttaaaaggaagaggcaacacccttggcctcgatatcgaaacagccactcttgttgggaaacaaatcgtggaatgcgactcggtccgcactagcctgaggtaa

SEQ ID NO: 5894 - DNA, 210 bp, synthetic construct
  misc_feature 1..210: note = Synthetic
  source 1..210: mol_type = other DNA
ctgagagatctaatgtcgcagtcccgcactcgcgagatactcactaagaccactgtggaccatatggccataatcaaaaagtacacatcaggaaggcaagagaagaaccccgcactcagaatgaagtggatgatggcaatgagatacccaattacagcagacaagagaataatggacatgatcgactcggtccgcactagcctgaggtaa

SEQ ID NO: 5895 - DNA, 210 bp, synthetic construct
  source 1..210: mol_type = other DNA
  misc_feature 1..210: note = Synthetic
agggaagaatccatggagctcatggaccttttaggccttgaaagagctgcctggggaaatcttcccttaatgagaaaagcttatttaaggaagtgtaaggaatttcaccctgacaaagggggcgacgaggataaaatgaagagaatgaatactttgtataaaaaaatggagcaggatgtaaacgactcggtccgcactagcctgaggtaa

SEQ ID NO: 5896 - DNA, 192 bp, synthetic construct
  source 1..192: mol_type = other DNA
  misc_feature 1..192: note = Synthetic
ataatacaaaaggccaaaaacacaatggcagaatttagtgaagatcctgaattacagccagcagtactattcaacatctgcgtccatctggaggtctgctatgtaataagtgatatgaactttcttgatgaggaaggaaagacatatacagcattagaaggacacgactcggtccgcactagcctgaggtaa

SEQ ID NO: 5897 - DNA, 93 bp, synthetic construct
  misc_feature 1..93: note = Synthetic
  source 1..93: mol_type = other DNA
aggactatggctcagcggattacggatcacacgcggactggactctatcagttgatggttgcattctcagcagcgcgactcggtccgcactag

SEQ ID NO: 5898 - DNA, 183 bp, synthetic construct
  source 1..183: mol_type = other DNA
  misc_feature 1..183: note = Synthetic
atgtcaaaaatgcaattgagatcctcatcggaggatttgaatggaatgataacacagttcgagtctctgaaactctacagagattcgcttggagaagcagcgatgaggatgggagatctccactctctacaaagtagaaacgggaaatggagagacgactcggtccgcactagcctgaggtaa

SEQ ID NO: 5899 - DNA, 210 bp, synthetic construct
  source 1..210: mol_type = other DNA
  misc_feature 1..210: note = Synthetic
atggacgttaagttcccgggtggtggccagatcgttggcggagtttacttgttgccgcgcaggggccccagattgggtgtgcgcgcgactcggaagacttcggagcggtcgcaacctcgtggaagacgccaacctatccccaaggcgcgtcgacccgagggaaggtcctgggcacaaccaggatatccatggcgactcggtccgcactag

SEQ ID NO: 5900 - DNA, 210 bp, synthetic construct
  source 1..210: mol_type = other DNA
  misc_feature 1..210: note = Synthetic
atggacgttaagttcccgggtggtggccagatcgttggcggagtttacttgttgccgcgcaggggccccagattgggtgtgcgcgcgactcggaagacttcggagcggtcgcaacctcgtggaagacgccaacctatccccaaggcgcgtcgacccgagggaaggtcctgggcacaaccaggatatccgccgcgactcggtccgcactag

SEQ ID NO: 5901 - DNA, 78 bp, synthetic construct
  misc_feature 1..78: note = Synthetic
  source 1..78: mol_type = other DNA
atgcaacctcgccagcttgttttccgccccgaggttttctggaaccatcccgactcggtccgcactagcctgaggtaa

SEQ ID NO: 5902 - DNA, 72 bp, synthetic construct
  source 1..72: mol_type = other DNA
  misc_feature 1..72: note = Synthetic
ttgatgttactcctgatgtgcttactttgccttgcattttctgtcgtcgtgatttgtgtgattctgatttag

SEQ ID NO: 5903 - DNA, 171 bp, synthetic construct
  source 1..171: mol_type = other DNA
  misc_feature 1..171: note = Synthetic
aggatgccccgaggaaacaagaagctgaaagtggagctgccgcccgtggaggatttggaggaagactgggagaacagcagtcaggcagaggagatggaggaagactgggacagcactcaggcagaggaggacagcctgcaagacgactcggtccgcactagcctgaggtaa

SEQ ID NO: 5904 - DNA, 153 bp, synthetic construct
  misc_feature 1..153: note = Synthetic
  source 1..153: mol_type = other DNA
aagaagctgaaagtggagctgccgcccgtggaggatttggaggaagactgggagaacagcagtcaggcagaggagatggaggaagactgggacagcactcaggcagaggaggacagcctgcaagacgactcggtccgcactagcctgaggtaa

SEQ ID NO: 5905 - DNA, 168 bp, synthetic construct
  misc_feature 1..168: note = Synthetic
  source 1..168: mol_type = other DNA
atgccccgaggaagcagcaagaagctgaaagtggagctgccgcccgtggaggatttggaggaagactgggagagcagtcaggcagaggaggaggagatggaagactgggacagcactcaggcagaggacagcctgcaagacgactcggtccgcactagcctgaggtaa

SEQ ID NO: 5906 - DNA, 138 bp, synthetic construct
  source 1..138: mol_type = other DNA
  misc_feature 1..138: note = Synthetic
gtggagctgccgcccgtggaggatttggaggaagactgggagagcagtcaggcagaggaggaggagatggaagactgggacagcactcaggcagaggacagcctgcaagacgactcggtccgcactagcctgaggtaa

SEQ ID NO: 5907 - DNA, 156 bp, synthetic construct
  source 1..156: mol_type = other DNA
  misc_feature 1..156: note = Synthetic
atcagggcatctgttggaagaatggttagcggcattgggagattctacatacagatgtgtacagaactcaaactcagtgacaatgaagggaggctgattcagaacagtataacaatagagagaatggtcgactcggtccgcactagcctgaggtaa

SEQ ID NO: 5908 - DNA, 210 bp, synthetic construct
  source 1..210: mol_type = other DNA
  misc_feature 1..210: note = Synthetic
ataaaaacgaaagtgtcgtcgtcgcgacccgccacagccgccatgaactcgttgctggcggaactcaaccgactgggggtcgcgcacgccactacggaggatgtttttatctttgtcgaccgcctctttcaacacttttccttccttttccaggccgaggagtcaggcccgcgccgcttggacgactcggtccgcactagcctgaggtaa

SEQ ID NO: 5909 - DNA, 105 bp, synthetic construct
  source 1..105: mol_type = other DNA
  misc_feature 1..105: note = Synthetic
atgtttttatctttgtcgaccgcctctttcaacacttttccttccttttccaggccgaggagtcaggcccgcgccgcttggacgactcggtccgcactagcctga

SEQ ID NO: 5910 - DNA, 183 bp, synthetic construct
  source 1..183: mol_type = other DNA
  misc_feature 1..183: note = Synthetic
atgtcaaaaatgcaattggggtcctcatcggaggacttgaatggaatgataacacagttcgagtctctaaaactctacagagattcgcttggagaagcagtaatgagaatgggagacctccactcactccaaaacagaaacggaaaatggcgagacgactcggtccgcactagcctgaggtaa

SEQ ID NO: 5911 - DNA, 165 bp, synthetic construct
  source 1..165: mol_type = other DNA
  misc_feature 1..165: note = Synthetic
atggcacgtaggcaaatgacaactactatgatcacaaaacttccaaaatttgttaggaattctccacaagcctatgattggatcgtaagaggtttaatctttcccaccactggaaaaacttatttccaacgagttgtcgactcggtccgcactagcctgaggtaa

SEQ ID NO: 5912 - DNA, 147 bp, synthetic construct
  source 1..147: mol_type = other DNA
  misc_feature 1..147: note = Synthetic
gtgggcggcagccccatgctcatgaagaacccgcacatcgtcaccattagcgtgaggcaagccgcgtgctgcacgcgcccgctcaaatacggaggcgcgtgcgcacacgctggcgcgcgcgagtcgactcggtccgcactagcctga

SEQ ID NO: 5913 - DNA, 39 bp, synthetic construct
  source 1..39: mol_type = other DNA
  misc_feature 1..39: note = Synthetic
atgcagctcgtcgccggcgtcatcgacccggcctgctga

SEQ ID NO: 5914 - DNA, 18 bp, synthetic construct
  source 1..18: mol_type = other DNA
  misc_feature 1..18: note = Synthetic
atcgacccggcctgctga

SEQ ID NO: 5915 - DNA, 168 bp, synthetic construct
  misc_feature 1..168: note = Synthetic
  source 1..168: mol_type = other DNA
atggaggagacccgggcgggacgttatatagtgagggccggctccggcgggcaaaccgaagatacagcctcgggcgcggaaagtgtcctcgccacgctggccgcggtgaggacaagaagacggagcgtggtgtgcgacggcgactcggtccgcactagcctgaggtaa

SEQ ID NO: 5916 - DNA, 39 bp, synthetic construct
  misc_feature 1..39: note = Synthetic
  source 1..39: mol_type = other DNA
atgcacctcgtcgccggcgtcatcgacccggcctgctga

SEQ ID NO: 5917 - DNA, 186 bp, synthetic construct
  misc_feature 1..186: note = Synthetic
  source 1..186: mol_type = other DNA
acgtcggcggcgatagccatgagttccgatagcaattttgatccctggattcccgtgtgtgtcgtggtggtcatgacctccgtagtcctgttcgcaggtctgcacgtgtacctgtggtacgttcggcggcagctggtggcgttctgcctggagaaggtcgactcggtccgcactagcctgaggtaa

SEQ ID NO: 5918 - DNA, 42 bp, synthetic construct
  misc_feature 1..42: note = Synthetic
  source 1..42: mol_type = other DNA
attttgatccctggattcccgtgtgtgtcgtggtggtcatga

SEQ ID NO: 5919 - DNA, 21 bp, synthetic construct
  source 1..21: mol_type = other DNA
  misc_feature 1..21: note = Synthetic
atggatcgcgattggggatga

SEQ ID NO: 5920 - DNA, 195 bp, synthetic construct
  source 1..195: mol_type = other DNA
  misc_feature 1..195: note = Synthetic
agggcgtcgtcgagcgtgatgggggcgggcaaaagcgcattgaccaccgccagggcctcctgcagccgcggctccgcctccgagggcggagccgcggcccgaatcatctcatattgttgttcctcggggcgcgttccccaaccgcacagcaccccgagcagggacgccatcccggaacgactcggtccgcactag

SEQ ID NO: 5921 - DNA, 207 bp, synthetic construct
  misc_feature 1..207: note = Synthetic
  source 1..207: mol_type = other DNA
aggagcggcgcggcccagagcgtgtcggccgatttcgaaatggaggccctgatgatccgcggcgtgctggaggtccatacggatttcactagacagaatgtgatgatcatggagccgcaagtgctcgactttacggtgcgcggcgacaagctgtggctgcacacggagcacgggctgctcgactcggtccgcactagcctgaggtaa

SEQ ID NO: 5922 - DNA, 207 bp, synthetic construct
  source 1..207: mol_type = other DNA
  misc_feature 1..207: note = Synthetic
aggagcggcgcggcccagagcgtgtcggccgatttcgaagccgaggccctgatgatccgcggcgtgctggaggtccatacggatttcactagacagaatgtgatgatcatggagccgcaagtgctcgactttacggtgcgcggcgacaagctgtggctgcacacggagcacgggctgctcgactcggtccgcactagcctgaggtaa

SEQ ID NO: 5923 - DNA, 18 bp, synthetic construct
  misc_feature 1..18: note = Synthetic
  source 1..18: mol_type = other DNA
atgcctgcctatggatag

SEQ ID NO: 5924 - DNA, 72 bp, synthetic construct
  source 1..72: mol_type = other DNA
  misc_feature 1..72: note = Synthetic
ctggccaccacatcggacgggcaggcatttttggtgctgcctgggggctcgactcggtccgcactagcctga

SEQ ID NO: 5925 - DNA, 48 bp, synthetic construct
  source 1..48: mol_type = other DNA
  misc_feature 1..48: note = Synthetic
atggttgttaatattgtcatactcaatctgcatcagtactcatattga

SEQ ID NO: 5926 - DNA, 45 bp, synthetic construct
  source 1..45: mol_type = other DNA
  misc_feature 1..45: note = Synthetic
atgcgcgtccctgtgtcagcagtgcttcgactcggtccgcactag

SEQ ID NO: 5927 - DNA, 69 bp, synthetic construct
  source 1..69: mol_type = other DNA
  misc_feature 1..69: note = Synthetic
ctggagaagacaacgactacaggaatttcgcgagctgtgtccactacagatattgatgacgttatctaa

SEQ ID NO: 5928 - DNA, 102 bp, synthetic construct
  source 1..102: mol_type = other DNA
  misc_feature 1..102: note = Synthetic
acgttatctaatattatatctaaagtggagacaatctatataaaatatctttttcaaatggattttaatacaaccgactcggtccgcactagcctgaggtaa

SEQ ID NO: 5929 - DNA, 129 bp, synthetic construct
  misc_feature 1..129: note = Synthetic
  source 1..129: mol_type = other DNA
ctggcatccttccactctttcgaaaactcctccagtctgctggcgttatcctccgtcagctcgactttttccagcagctccttgccgagatgggattcggttatcttgcctttgaaaaaatccaggtaa

SEQ ID NO: 5930 - DNA, 168 bp, synthetic construct
  misc_feature 1..168: note = Synthetic
  source 1..168: mol_type = other DNA
atggaggttattacagacggcgtgttgcgtctcaagagcttcagagacgactttaaaggtattaaggaggaactcaagttcatgcttaactcatgggaggattccgacatattaaggcacaggcaattcattccgtgcgacgactcggtccgcactagcctgaggtaa

SEQ ID NO: 5931 - DNA, 147 bp, synthetic construct
  misc_feature 1..147: note = Synthetic
  source 1..147: mol_type = other DNA
gtgttgcgtctcaagagcttcagagacgactttaaaggtattaaggaggaactcaagttcatgcttaactcatgggaggattccgacatattaaggcacaggcaattcattccgtgcgacgactcggtccgcactagcctgaggtaa

SEQ ID NO: 5932 - DNA, 183 bp, synthetic construct
  misc_feature 1..183: note = Synthetic
  source 1..183: mol_type = other DNA
aggcgagtgccgaaagagaccgcaaaaaagacgcgtcaaggaccaggccgattgccaaacggactggtattgatgcgcatgatgggagtgctgtggcatatggtcgctggaacggccaggaatccgatcctcaagcgattctgggcgactgttcccgactcggtccgcactagcctgaggtaa

SEQ ID NO: 5933 - DNA, 156 bp, synthetic construct
  misc_feature 1..156: note = Synthetic
  source 1..156: mol_type = other DNA
atgggcatgggactgattctcggaatcatgaactacgcctcccacatcgctcttggcatgaaagtcaacagcaggctaacgagtttctggaaaatgactccacctgggaaattagctaaggggataaccgactcggtccgcactagcctgaggtaa

SEQ ID NO: 5934 - DNA, 102 bp, synthetic construct
  misc_feature 1..102: note = Synthetic
  source 1..102: mol_type = other DNA
acgctttcgagtctcatgcgccttctccctgtacctgaatcaatgttaggtttccgcagaacactgcgccggtatcgatatacatttggttggcaaacttga

SEQ ID NO: 5935 - DNA, 30 bp, synthetic construct
  source 1..30: mol_type = other DNA
  misc_feature 1..30: note = Synthetic
atgaacgcctcccgactcggtccgcactag

SEQ ID NO: 5936 - DNA, 168 bp, synthetic construct
  source 1..168: mol_type = other DNA
  misc_feature 1..168: note = Synthetic
gtggccataagaaagacggggcagtcggcgggactcatgccaagagttctgctgctgtcccgcatcatgggtgtgttgtggcacttgttgtcgaacacacccagaccgcccattctaagggctttttggcgcacagttcccgactcggtccgcactagcctgaggtaa

SEQ ID NO: 5937 - DNA, 189 bp, synthetic construct
  source 1..189: mol_type = other DNA
  misc_feature 1..189: note = Synthetic
acgaatcggaagaggacctcatacaggcggaatacgaggcgtacacgaaatgcgccttttcgacgacgatcctatcggaggccggccaatcgattcaaaaagcgggtgcttgcaatctcttctaagaagaagtttgacactatgcggtcgggatcagccaacgactcggtccgcactagcctgaggtaa

SEQ ID NO: 5938 - DNA, 180 bp, synthetic construct
  source 1..180: mol_type = other DNA
  misc_feature 1..180: note = Synthetic
gtgtggggcatcatgagccagtctcgcgcttccagtacgagttcgagggcaatgccgatgctagcgctggagatgattccgtcccccgcggagctgtgccatctcgcacactgcagcacgtcttgcgcggatatggcgcgccgagtactgctcgactcggtccgcactagcctgaggtaa

SEQ ID NO: 5939 - DNA, 210 bp, synthetic construct
  source 1..210: mol_type = other DNA
  misc_feature 1..210: note = Synthetic
ctgaataagtattcgcaagatacacattgcgtgtggggcatcgccagccagtctcgcgcttccagtacgagttcgagggcaatgccgatgctagcgctggagatgattccgtcccccgcggagctgtgccatctcgcacactgcagcacgtcttgcgcggatatggcgcgccgagtactgctcgactcggtccgcactagcctgaggtaa

SEQ ID NO: 5940 - DNA, 15 bp, synthetic construct
  source 1..15: mol_type = other DNA
  misc_feature 1..15: note = Synthetic
atgttaatcttttaa

SEQ ID NO: 5941 - DNA, 168 bp, synthetic construct
  source 1..168: mol_type = other DNA
  misc_feature 1..168: note = Synthetic
atgaaggtgtgcctgcgtatgacagtagagggtgctcttaacaaactttttgaattacatggcgccagtttacaagaaattttaatggatgtgttgcgcgggtggcaagcggaaaattatttgggaattattcaagattgcgactcggtccgcactagcctgaggtaa

SEQ ID NO: 5942 - DNA, 162 bp, synthetic construct
  misc_feature 1..162: note = Synthetic
  source 1..162: mol_type = other DNA
gtgtgcctgcgtatgacagtagagggtgctcttaacaaactttttgaattacatggcgccagtttacaagaaattttaatggatgtgttgcgcgggtggcaagcggaaaattatttgggaattattcaagattgcgactcggtccgcactagcctgaggtaa

SEQ ID NO: 5943 - DNA, 66 bp, synthetic construct
  source 1..66: mol_type = other DNA
  misc_feature 1..66: note = Synthetic
ctgaagcagcttataattttatatatgatgcttcaagcctgcccaaagatggctttaatgctttaa

SEQ ID NO: 5944 - DNA, 168 bp, synthetic construct
  misc_feature 1..168: note = Synthetic
  source 1..168: mol_type = other DNA
atggagccgcggcactgggggcgctccctgtggtgcgtcatcttcctggtgctggaacaggcggcgcgcgacggcgacctggaacgcgcgaagcggcgcctcttcttgatctgcaacacgctgccgtgcgtggcgtgccgcgactcggtccgcactagcctgaggtaa

SEQ ID NO: 5945 - DNA, 141 bp, synthetic construct
  source 1..141: mol_type = other DNA
  misc_feature 1..141: note = Synthetic
ctgtggtgcgtcatcttcctggtgctggaacaggcggcgcgcgacggcgacctggaacgcgcgaagcggcgcctcttcttgatctgcaacacgctgccgtgcgtggcgtgccgcgactcggtccgcactagcctgaggtaa

SEQ ID NO: 5946 - DNA, 48 bp, synthetic construct
  misc_feature 1..48: note = Synthetic
  source 1..48: mol_type = other DNA
atgcattgcaaggaatgtttgtgccaggattacctaattccaatatag

SEQ ID NO: 5947 - DNA, 12 bp, synthetic construct
  source 1..12: mol_type = other DNA
  misc_feature 1..12: note = Synthetic
acggccgggtga

SEQ ID NO: 5948 - DNA, 162 bp, synthetic construct
  source 1..162: mol_type = other DNA
  misc_feature 1..162: note = Synthetic
atggatttgaatgcccgcgcagtcctgtctgcccaggtctccagcgtgcccatgttctctttcaggcggcgggtctggtcatcaaaccctttcgttgcggcctcgttcgccgcctgcaatgccccggcttcatccgactcggtccgcactagcctgaggtaa

SEQ ID NO: 5949 - DNA, 21 bp, synthetic construct
  source 1..21: mol_type = other DNA
  misc_feature 1..21: note = Synthetic
atgaaccgacttggaaagtaa

SEQ ID NO: 5950 - DNA, 45 bp, synthetic construct
  source 1..45: mol_type = other DNA
  misc_feature 1..45: note = Synthetic
atgcggctaaccttaaccctggagccttgtgtcacaaaccagtga

SEQ ID NO: 5951 - DNA, 81 bp, synthetic construct
  source 1..81: mol_type = other DNA
  misc_feature 1..81: note = Synthetic
aaggtcgtaatgagcaattccgggacgggaccgactactttgggtgtccgtgtcgactcggtccgcactagcctgaggtaa

SEQ ID NO: 5952 - DNA, 135 bp, synthetic construct
  misc_feature 1..135: note = Synthetic
  source 1..135: mol_type = other DNA
atgtcccgcaccacctcctccgaattccttcgcatgaacttaaatccgctccgggagcgccacgagcgcgatgacgtcattagtgagcacatactatcggctctgcgcgatccgaacgtggtcattgtctattaa

SEQ ID NO: 5953 - DNA, 93 bp, synthetic construct
  misc_feature 1..93: note = Synthetic
  source 1..93: mol_type = other DNA
atgacgtcattagtgagcacatactatcggctctgcgcgatccgaacgtggtcattgtctattaacgactcggtccgcactagcctgaggtaa

SEQ ID NO: 5954 - DNA, 171 bp, synthetic construct
  source 1..171: mol_type = other DNA
  misc_feature 1..171: note = Synthetic
atggggattacaagtagagcgagccgtagacgccagcgccatgacagacagaggggtcttgtgtgggacgatgaggattcggccgatgatagcagcgtgctggacttgggtgggagaggaaggggcaacccgtttgctcatttgcgccctcgcttgggtggtatgttgtaa

SEQ ID NO: 5955 - DNA, 177 bp, synthetic construct
  source 1..177: mol_type = other DNA
  misc_feature 1..177: note = Synthetic
ctggaacgaggccgcagccttctcccggtgcctttcccccccgaccggcacccggcctctcacacagcatcccccgcctttttgggtccgggcccgtcgtgtctttcggtggaccttgggccgtcgggcacgtacacgggtggccgggcgttggcgactcggtccgcactagcctga

SEQ ID NO: 5956 - DNA, 195 bp, synthetic construct
  source 1..195: mol_type = other DNA
  misc_feature 1..195: note = Synthetic
atggcatcactgttaaaaccttacaaaatattacctgatcttgaatcactccatgggaaactcctatgctatcagttgcttgctgcgttcatggcagaggaccacccctttaaggtgtatgtggagcactgcctctcgcggactgcaaagcagcttcgtgactctggccttccgactcggtccgcactagcctga

SEQ ID NO: 5957 - DNA, 21 bp, synthetic construct
  misc_feature 1..21: note = Synthetic
  source 1..21: mol_type = other DNA
ctgaccatccttatccactga

SEQ ID NO: 5958 - DNA, 48 bp, synthetic construct
  source 1..48: mol_type = other DNA
  misc_feature 1..48: note = Synthetic
attatcgtattcgaaatcaataataaactgaccatccttatccactga

SEQ ID NO: 5959 - DNA, 117 bp, synthetic construct
  misc_feature 1..117: note = Synthetic
  source 1..117: mol_type = other DNA
ttggaacgaccgttggaggaaatgcttacctccagccgtatactgatccacgcagtcaccacacggagggtcccgaacccagccccctgcgactcggtccgcactagcctgaggtaa

SEQ ID NO: 5960 - DNA, 210 bp, synthetic construct
  misc_feature 1..210: note = Synthetic
  source 1..210: mol_type = other DNA
ataaaaacgaaagtgtcgtcgtcgcgacccgccacagccgccgccaactcgttgctggcggaactcaaccgactgggggtcgcgcacgccactacggaggatgtttttatctttgtcgaccgcctctttcaacacttttccttccttttccaggccgaggagtcaggcccgcgccgcttggacgactcggtccgcactagcctgaggtaa

SEQ ID NO: 5961 - DNA, 165 bp, synthetic construct
  misc_feature 1..165: note = Synthetic
  source 1..165: mol_type = other DNA
aggtttcgtcgatatcgtgttaaagcacgttcgacagctaaacgttattacaggcttaagagggctgctaggaattattcgaaagtcaagaagattagaagggctaaaaggcaatataaaacgatttctggcaaaggcgactcggtccgcactagcctgaggtaa

SEQ ID NO: 5962 - DNA, 222 bp, synthetic construct
  source 1..222: mol_type = other DNA
  misc_feature 1..222: note = Synthetic
aagagatatgcatcaagaaagagagtttatcgtcgaaaaacgcggaaaccttttagaagggttcgtcgatatcgtgttaaagcacgttcgacagctaaacgttattacaggcttaagagggctgctaggaattattcgaaagtcaagaagattagaagggctaaaaggcaatataaaacgatttctggcaaaggcgactcggtccgcactagcctgaggtaa

SEQ ID NO: 5963 - DNA, 222 bp, synthetic construct
  misc_feature 1..222: note = Synthetic
  source 1..222: mol_type = other DNA
aagagatatgcatcaagaaagagagtttatcgtcgaaaaacgcggaaaccttttagaagggttcgtcgatatcgtgttaaagcacgttcgacagctaaacgttattacaggcttaagagggctgctaggaattattcgaaagttaagaagattagaagggctaaaaggcaatataaaacgatttctggcaaaggcgactcggtccgcactagcctgaggtaa

SEQ ID NO: 5964 - DNA, 195 bp, synthetic construct
  misc_feature 1..195: note = Synthetic
  source 1..195: mol_type = other DNA
atgcatctttggtgtctacatcagcctccacgatgcccgcataccggtggtcggcaaaataggtaccaacgttacgttaaacgcggtagatgttcttccccctcgcgatcaagttcgttggtcatacggtccaggtgggcaaggctacatgttatgcattttcactggcacacgactcggtccgcactagcctga

SEQ ID NO: 5965 - DNA, 195 bp, synthetic construct
  source 1..195: mol_type = other DNA
  misc_feature 1..195: note = Synthetic
atgcatctttggtgtctacatcagcctccacgatgcctgcaaaccggtggtcggcaaaataggtaccaacgttacgttaaacgcggtagatgttcttccccctcgcgatcaagttcgttggtcatacggtccaggtgggcaaggctacatgttatgcattttcactggcacacgactcggtccgcactagcctga

SEQ ID NO: 5966 - DNA, 111 bp, synthetic construct
  misc_feature 1..111: note = Synthetic
  source 1..111: mol_type = other DNA
atgttcttccccctcgcgatcaagttcgttggtcatacggtccaggtgggcaaggctacatgttatgcattttcactggcacacgactcggtccgcactagcctgaggtaa

SEQ ID NO: 5967 - DNA, 195 bp, synthetic construct
  source 1..195: mol_type = other DNA
  misc_feature 1..195: note = Synthetic
atgcatctttggtgtctacatcagcctccacgatgcctgcataccggtggtcggcaaaataggtaccaacgttacgttaaacgcggtagatgttcttccccctcgcgatcaagttcgttggtcatacggtccaggtgggcaaggctacatgttatgcattttcactggcacacgactcggtccgcactagcctga

SEQ ID NO: 5968 - DNA, 195 bp, synthetic construct
  source 1..195: mol_type = other DNA
  misc_feature 1..195: note = Synthetic
atgcatctttggtgtctacatcagcctccacgatgcctgcatatcggtggtcggcaaaataggtaccaacgttacgttaaacgcggtagatgttcttccccctcgcgatcaagttcgttggtcatacggtccaggtgggcaaggctacatgttatgcattttcactggcacacgactcggtccgcactagcctga

SEQ ID NO: 5969 - DNA, 195 bp, synthetic construct
  source 1..195: mol_type = other DNA
  misc_feature 1..195: note = Synthetic
atgcatctttggtgtctacatcagcctccacgatgcctgcattccggtggtcggcaaaataggtaccaacgttacgttaaacgcggtagatgttcttccccctcgcgatcaagttcgttggtcatacggtccaggtgggcaaggctacatgttatgcattttcactggcacacgactcggtccgcactagcctga

SEQ ID NO: 5970 - DNA, 195 bp, synthetic construct
  misc_feature 1..195: note = Synthetic
  source 1..195: mol_type = other DNA
atgcatctttggtgtctacatcagcctccacgatgcctgcttaccggtggtcggcaaaataggtaccaacgttacgttaaacgcggtagatgttcttccccctcgcgatcaagttcgttggtcatacggtccaggtgggcaaggctacatgttatgcattttcactggcacacgactcggtccgcactagcctga

SEQ ID NO: 5971 - DNA, 195 bp, synthetic construct
  misc_feature 1..195: note = Synthetic
  source 1..195: mol_type = other DNA
atgcatctttggtgtctacatcagcctccacgatgcctggataccggtggtcggcaaaataggtaccaacgttacgttaaacgcggtagatgttcttccccctcgcgatcaagttcgttggtcatacggtccaggtgggcaaggctacatgttatgcattttcactggcacacgactcggtccgcactagcctga

SEQ ID NO: 5972 - DNA, 195 bp, synthetic construct
  source 1..195: mol_type = other DNA
  misc_feature 1..195: note = Synthetic
atgcatctttggtgtctacatcagcctccacgatgcgtgcataccggtggtcggcaaaataggtaccaacgttacgttaaacgcggtagatgttcttccccctcgcgatcaagttcgttggtcatacggtccaggtgggcaaggctacatgttatgcattttcactggcacacgactcggtccgcactagcctga

SEQ ID NO: 5973 - DNA, 195 bp, synthetic construct
  source 1..195: mol_type = other DNA
  misc_feature 1..195: note = Synthetic
atgcatctttggtgtctacatcagcctccacgatgtctgcataccggtggtcggcaaaataggtaccaacgttacgttaaacgcggtagatgttcttccccctcgcgatcaagttcgttggtcatacggtccaggtgggcaaggctacatgttatgcattttcactggcacacgactcggtccgcactagcctga

SEQ ID NO: 5974 - DNA, 222 bp, synthetic construct
  misc_feature 1..222: note = Synthetic
  source 1..222: mol_type = other DNA
aagagatatgcatcaagaaagagagtttatcgtcgaaaaacgcggaaaccttttagaagggttcgtcgatatcgtgttaaggcacgttcgacagctaaacgttattacaggcttaagagggctgctaggaattattcgaaagtcaagaagattagaagggctaagaggcaatataagacaatgtctggcaaaggcgactcggtccgcactagcctgaggtaa

SEQ ID NO: 5975 - DNA, 222 bp, synthetic construct
  source 1..222: mol_type = other DNA
  misc_feature 1..222: note = Synthetic
aagagatatgcatcaagaaagagagtttatcgtcgaaaagcgcggaaacctattaaaaggtttcgtcgatatcgtgttaaagcacgttcgacagctaaacgttattacaggcttaagagggctgctaggaattattcgaaagtcaagaagattagaagggctaaaaggcaatataaaacgatttctggcaaaggcgactcggtccgcactagcctgaggtaa

SEQ ID NO: 5976 - DNA, 66 bp, synthetic construct
  source 1..66: mol_type = other DNA
  misc_feature 1..66: note = Synthetic
agggctaaaaggcaatataaaacgatttctggcaaaggcgactcggtccgcactagcctgaggtaa

SEQ ID NO: 5977 - DNA, 222 bp, synthetic construct
  source 1..222: mol_type = other DNA
  misc_feature 1..222: note = Synthetic
aagcgatatgcatcaagaaagagagtttatcgtcgaaaaacgcggaaaccttttagaagggttcgtcgatatcgtgttaaggcacgttcgacagctaaacgttattacaggcttaagagggctgctaggaattattcaaaggctaagaagattagaagggctaaaaggcaatataagacaatgtctggcaaaggcgactcggtccgcactagcctgaggtaa

SEQ ID NO: 5978 - DNA, 222 bp, synthetic construct
  misc_feature 1..222: note = Synthetic
  source 1..222: mol_type = other DNA
aagcgatatgcatcaagaaagagagtttatcgtcgaaaaacgcggaaaccttttagaagggttcgtcgatatcgtgttaaggcacgttcgacagctaaacgttattataggcttaagagggctgctaggaattattcgaaagtcaagaagattagaagggctaaaaggcaatataagacaatgtctggcaaaggcgactcggtccgcactagcctgaggtaa

SEQ ID NO: 5979 - DNA, 72 bp, synthetic construct
  misc_feature 1..72: note = Synthetic
  source 1..72: mol_type = other DNA
attagaagggctaaaaggcaatataaaacgatttctggcaaaggcgactcggtccgcactagcctgaggtaa

SEQ ID NO: 5980 - DNA, 114 bp, synthetic construct
  source 1..114: mol_type = other DNA
  misc_feature 1..114: note = Synthetic
aggcttaagagggctgctaggaattattcgaaagtcaagaagattagaagggctaaaaggcaatataaaacgatttctggcaaaggcgactcggtccgcactagcctgaggtaa

SEQ ID NO: 5981 - DNA, 114 bp, synthetic construct
  source 1..114: mol_type = other DNA
  misc_feature 1..114: note = Synthetic
aggcttaagagggctgctaggaattattcgaaagttaagaagattagaagggctaaaaggcaatataaaacgatttctggcaaaggcgactcggtccgcactagcctgaggtaa

SEQ ID NO: 5982 - DNA, 195 bp, synthetic construct
  misc_feature 1..195: note = Synthetic
  source 1..195: mol_type = other DNA
atgcatctttggtgtctacatcagcctccaagatgcctgcataccggtggtcggcaaaataggtaccaacgttacgttaaacgcggtagatgttcttccccctcgcgatcaagttcgttggtcatacggtccaggtgggcaaggctacatgttatgcattttcactggcacacgactcggtccgcactagcctga

SEQ ID NO: 5983 - DNA, 195 bp, synthetic construct
  misc_feature 1..195: note = Synthetic
  source 1..195: mol_type = other DNA
atgcatctttggtgtctacatcagcctccacgttgcctgcataccggtggtcggcaaaataggtaccaacgttacgttaaacgcggtagatgttcttccccctcgcgatcaagttcgttggtcatacggtccaggtgggcaaggctacatgttatgcattttcactggcacacgactcggtccgcactagcctga

SEQ ID NO: 5984 - DNA, 195 bp, synthetic construct
  misc_feature 1..195: note = Synthetic
  source 1..195: mol_type = other DNA
atgcatctttggtgtctacatcagcctccccgatgcctgcataccggtggtcggcaaaataggtaccaacgttacgttaaacgcggtagatgttcttccccctcgcgatcaagttcgttggtcatacggtccaggtgggcaaggctacatgttatgcattttcactggcacacgactcggtccgcactagcctga

SEQ ID NO: 5985 - DNA, 195 bp, synthetic construct
  source 1..195: mol_type = other DNA
  misc_feature 1..195: note = Synthetic
atgcatctttggtgtctacatcagcctcgacgatgcctgcataccggtggtcggcaaaataggtaccaacgttacgttaaacgcggtagatgttcttccccctcgcgatcaagttcgttggtcatacggtccaggtgggcaaggctacatgttatgcattttcactggcacacgactcggtccgcactagcctga

SEQ ID NO: 5986 - DNA, 195 bp, synthetic construct
  misc_feature 1..195: note = Synthetic
  source 1..195: mol_type = other DNA
atgcatctttggtgtctacatcagcctgcacgatgcctgcataccggtggtcggcaaaataggtaccaacgttacgttaaacgcggtagatgttcttccccctcgcgatcaagttcgttggtcatacggtccaggtgggcaaggctacatgttatgcattttcactggcacacgactcggtccgcactagcctga

SEQ ID NO: 5987 - DNA, 195 bp, synthetic construct
  misc_feature 1..195: note = Synthetic
  source 1..195: mol_type = other DNA
atgcatctttggtgtctacatcagcgtccacgatgcctgcataccggtggtcggcaaaataggtaccaacgttacgttaaacgcggtagatgttcttccccctcgcgatcaagttcgttggtcatacggtccaggtgggcaaggctacatgttatgcattttcactggcacacgactcggtccgcactagcctga

SEQ ID NO: 5988 - DNA, 195 bp, synthetic construct
  misc_feature 1..195: note = Synthetic
  source 1..195: mol_type = other DNA
atgcatctttggtgtctacatcatcctccacgatgcctgcataccggtggtcggcaaaataggtaccaacgttacgttaaacgcggtagatgttcttccccctcgcgatcaagttcgttggtcatacggtccaggtgggcaaggctacatgttatgcattttcactggcacacgactcggtccgcactagcctga

SEQ ID NO: 5989 - DNA, 168 bp, synthetic construct
  misc_feature 1..168: note = Synthetic
  source 1..168: mol_type = other DNA
atgcctcttccgtgtcttcctccacctccagtgtgtcgggatagatcaggctgtctgtcttggttggaactcgccctcactacgtgtttggaactgtaccgagacatctgtaggtttgaggtgtgcatcgccccggaggccgactcggtccgcactagcctgaggtaa

SEQ ID NO: 5990 - DNA, 168 bp, synthetic construct
  source 1..168: mol_type = other DNA
  misc_feature 1..168: note = Synthetic
atgagtcagtgggggcccagggcgatccttgtccagacggacagcaccaaccggaatgccgatggggactggcaagcggccgtagctattcgcgggggcggagtcgttcaactgaacatggtcaacaaacgcgccgtggacgactcggtccgcactagcctgaggtaa

SEQ ID NO: 5991 - DNA, 150 bp, synthetic construct
  misc_feature 1..150: note = Synthetic
  source 1..150: mol_type = other DNA
agggcgatccttgtccagacggacagcaccaaccggaatgccgatggggactggcaagcggccgtagctattcgcgggggcggagtcgttcaactgaacatggtcaacaaacgcgccgtggacgactcggtccgcactagcctgaggtaa

SEQ ID NO: 5992 - DNA, 165 bp, synthetic construct
  source 1..165: mol_type = other DNA
  misc_feature 1..165: note = Synthetic
acgctcgttctgttcgcaacagagtatgattctgctcatatagtcgccaacgtactctcgcagacaccgacggaccactgcgtcttccccctgctggtcaaacaccaggtctcgcgacgtgtttatttctgcctacacgactcggtccgcactagcctgaggtaa

SEQ ID NO: 5993 - DNA, 27 bp, synthetic construct
  source 1..27: mol_type = other DNA
  misc_feature 1..27: note = Synthetic
atgacataccggcgatcatcaccatga

SEQ ID NO: 5994 - DNA, 27 bp, synthetic construct
  source 1..27: mol_type = other DNA
  misc_feature 1..27: note = Synthetic
aaggagagccgactcaaccaactctaa

SEQ ID NO: 5995 - DNA, 75 bp, synthetic construct
  misc_feature 1..75: note = Synthetic
  source 1..75: mol_type = other DNA
atgagcggcgagatgccttccacagaggacttggtaaatttgctcccggccattctacgactcggtccgcactag

SEQ ID NO: 5996 - DNA, 156 bp, synthetic construct
  source 1..156: mol_type = other DNA
  misc_feature 1..156: note = Synthetic
gtgggccttggcaaaattttggtggacattctgcccggttacggcgccggcgtacgtggcgctgtggttaccttcaagatcgccagcggcgagatgccttccacagaggacttggtaaatttgctcccggccattctacgactcggtccgcactag

SEQ ID NO: 5997 - DNA, 210 bp, synthetic construct
  source 1..210: mol_type = other DNA
  misc_feature 1..210: note = Synthetic
atgaatcagaattcaaatatctgcttcactcacggacagaaagactgtttagagtgctttcccgcctcagaatctcaacccgtttctgtcgtcaaaaaggcgtatcagaaactgtgctacattcatcatatcatgggaaaggtgccagacgcttgcactgcctgcgatctggtcaatgtggatttggatgaccgactcggtccgcactag

SEQ ID NO: 5998 - DNA, 210 bp, synthetic construct
  misc_feature 1..210: note = Synthetic
  source 1..210: mol_type = other DNA
atgaatcagaattcaaatatctgcttcactcacggacagaaagactgtttagagtgctttcccgtgtcagaatctcaacccgtttctgtcgtcaaaaaggcgtatcagaaactgtgctacattcatcatatcatgggaaaggtgccagacgcttgcactgcctgcgatctggtcaatgtggatttggatgaccgactcggtccgcactag

SEQ ID NO: 5999 - DNA, 45 bp, synthetic construct
  misc_feature 1..45: note = Synthetic
  source 1..45: mol_type = other DNA
atgaaaattatttgggcatggttgaaggtgctggaatgtttatag

SEQ ID NO: 6000 - DNA, 195 bp, synthetic construct
  misc_feature 1..195: note = Synthetic
  source 1..195: mol_type = other DNA
atgccggttcggctgaatgtcatgacatacacactcaggggttggtgcccagtatctaagtcgccgcaggccactctcgcttcaaccggtatgcgcaagttcgcagccgactcgaggctgcttgtgtccccgtgtttcgtaattgttaccaatggcgccaagacgacttgcttcgtccgactcggtccgcactag

SEQ ID NO: 6001 - DNA, 138 bp, synthetic construct
  source 1..138: mol_type = other DNA
  misc_feature 1..138: note = Synthetic
atggcacaacccgtgttttttgctagatggaacagcaagcaccggatcccgcaatgcgggcggcgctgcagagccagccgtccggcattaactcctcggacgattggacccaggccatgcaacgtatcatggcgttga

SEQ ID NO: 6002 - DNA, 138 bp, synthetic construct
  misc_feature 1..138: note = Synthetic
  source 1..138: mol_type = other DNA
atggcacaacccgtgttttttgctaggccgaacagcaagcaccggatcccgcaatgcgggcggcgctgcagagccagccgtccggcattaactcctcggacgattggacccaggccatgcaacgtatcatggcgttga

SEQ ID NO: 6003 - DNA, 201 bp, synthetic construct
  source 1..201: mol_type = other DNA
  misc_feature 1..201: note = Synthetic
atgaggatgtgccacgaaggcatcaaccccaacatgagctgtgatgatgtggtttttggaataaactctcttttcagcaggtttagaagagatttagaaagtgggaaattaaagagaaactttcagaaagtaaaccctgaaggcttgatcaaggaattctctgagctctatgacgactcggtccgcactagcctgaggtaa

SEQ ID NO: 6004 - DNA, 120 bp, synthetic construct
  misc_feature 1..120: note = Synthetic
  source 1..120: mol_type = other DNA
atgaacatgtatctccccagaatgctagtttgtagaggctatgcgggatgctgcggcggcgcgaccttccctctccacccagccccgtcaaaacacacgcgactcgagcggttcgtatga

SEQ ID NO: 6005 - DNA, 168 bp, synthetic construct
  misc_feature 1..168: note = Synthetic
  source 1..168: mol_type = other DNA
atggcgtccctgctcggggtgctgtgcggttggggaacgcgccccgaggaacaacaatatgagatgattcgggccgcggctccgccctcggaggcggagccgcggctgcaggaggccctggcggtggtcaatgcgcttttcgactcggtccgcactagcctgaggtaa

SEQ ID NO: 6006 - DNA, 150 bp, synthetic construct
  misc_feature 1..150: note = Synthetic
  source 1..150: mol_type = other DNA
gtgctgtgcggttggggaacgcgccccgaggaacaacaatatgagatgattcgggccgcggctccgccctcggaggcggagccgcggctgcaggaggccctggcggtggtcaatgcgcttttcgactcggtccgcactagcctgaggtaa

SEQ ID NO: 6007 - DNA, 57 bp, synthetic construct
  source 1..57: mol_type = other DNA
  misc_feature 1..57: note = Synthetic
atgcgtggacacggccaccaactcacccgtggagatcaagtaccatctgcatcttaa

SEQ ID NO: 6008 - DNA, 114 bp, synthetic construct
  source 1..114: mol_type = other DNA
  misc_feature 1..114: note = Synthetic
atctgcatcttaagcacgccctctcccgcctctacgaggtcaaccttaaaaccctgcccccggacctggatctccgcaacaccatggacagcgactcggtccgcactagcctga

SEQ ID NO: 6009 - DNA, 15 bp, synthetic construct
  misc_feature 1..15: note = Synthetic
  source 1..15: mol_type = other DNA
atgctctgcttatag

SEQ ID NO: 6010 - DNA, 87 bp, synthetic construct
  source 1..87: mol_type = other DNA
  misc_feature 1..87: note = Synthetic
atgcatatggtgttgtgtgtgagttcgactggaatgatggaaatggtcaggaaggatggcctccaatggatggtagcgaaggaataa

SEQ ID NO: 6011 - DNA, 120 bp, synthetic construct
  misc_feature 1..120: note = Synthetic
  source 1..120: mol_type = other DNA
ttgccgaccaaagtctcccgccgaacttctccagccgccaaaattttagagcctatgtggatggattcgaaccgaacggctacattgagggcaagctgtctcaaatgtccaaagaagtaa

SEQ ID NO: 6012 - DNA, 120 bp, synthetic construct
  misc_feature 1..120: note = Synthetic
  source 1..120: mol_type = other DNA
ttgccgaccaaagtctcccgccgaacttctccagccttgaaaattttagagcctatgtggatggattcgaaccgaacggctacattgagggcaagctgtctcaaatgtccaaagaagtaa

SEQ ID NO: 6013 - DNA, 144 bp, synthetic construct
  source 1..144: mol_type = other DNA
  misc_feature 1..144: note = Synthetic
atgggtaactccaagtcaaaatcaaagctgtctgctaaccagtatgaacagcaaacagtcaatagcaccaaacaggtagccattttaaagagacaggctgaacctagtctgtatggaagacacaaccgactcggtccgcactag

SEQ ID NO: 6014 - DNA, 132 bp, synthetic construct
  source 1..132: mol_type = other DNA
  misc_feature 1..132: note = Synthetic
atggggcagttcattagcttcatgcaagaaataccaacctttttgcaggaggctctgaacattgctcttgttgcagtcagtctcattgccatcattaagggtatagtgaacttgcgactcggtccgcactag

SEQ ID NO: 6015 - DNA, 168 bp, synthetic construct
  source 1..168: mol_type = other DNA
  misc_feature 1..168: note = Synthetic
atggtctccgtcatgcggaagccgcgccccgcgagcgtcgcgatgaggatgtacggcgccacgagcacgttgttcttcttcatgacgttctcggtgcgcagcgcgtccagcgaccggaactgcaggttgacctcgcgcgacgactcggtccgcactagcctgaggtaa

SEQ ID NO: 6016 - DNA, 156 bp, synthetic construct
  source 1..156: mol_type = other DNA
  misc_feature 1..156: note = Synthetic
atgcggaagccgcgccccgcgagcgtcgcgatgaggatgtacggcgccacgagcacgttgttcttcttcatgacgttctcggtgcgcagcgcgtccagcgaccggaactgcaggttgacctcgcgcgacgactcggtccgcactagcctgaggtaa

SEQ ID NO: 6017 - DNA, 201 bp, synthetic construct
  source 1..201: mol_type = other DNA
  misc_feature 1..201: note = Synthetic
atgaggatgtgccacgaaggcatcaaccccaacatgagctgtgatgatgtggtttttggaataaactctcttttcagcaggtttagaagagatttagaaagtgggaaattaaagagaaactttcagaaagtaaaccctgaaggcttgatcaaggaattctctgagctctgccacgactcggtccgcactagcctgaggtaa

SEQ ID NO: 6018 - DNA, 90 bp, synthetic construct
  source 1..90: mol_type = other DNA
  misc_feature 1..90: note = Synthetic
gtggctaaggcggtggactttatccctgtggagaacctagagacaaccatgagatccccggtgttcacgactcggtccgcactagcctga

SEQ ID NO: 6019 - DNA, 105 bp, synthetic construct
  misc_feature 1..105: note = Synthetic
  source 1..105: mol_type = other DNA
gtgtgcacccgtggagtggctaaggcggtggactttatccctgtggagaacctagagacaaccatgagatccccggtgttcacgactcggtccgcactagcctga

SEQ ID NO: 6020 - DNA, 90 bp, synthetic construct
  source 1..90: mol_type = other DNA
  misc_feature 1..90: note = Synthetic
ataaagaaaagccaatattcaatgtataaatggataagttgtacaccgctatatttggtgtatttatgggttctccggaagatgatttga

SEQ ID NO: 6021 - DNA, 177 bp, synthetic construct
  misc_feature 1..177: note = Synthetic
  source 1..177: mol_type = other DNA
ttgtacaccgctatatttggtgtatttatgggttctccggaagatgatttgacagactttatagaaattgttaaatctgttctaagtgatgagaaaactgtcacatcaactaataataccggttgttggggttggtattggttaattattattttttttcgactcggtccgcactag

SEQ ID NO: 6022 - DNA, 90 bp, synthetic construct
  source 1..90: mol_type = other DNA
  misc_feature 1..90: note = Synthetic
ataaagaaaagccaatattcaatgtataaatggataagttgtacgccgctatatttggtgtatttatggggtctccggaagatgatttga

SEQ ID NO: 6023 - DNA, 90 bp, synthetic construct
  source 1..90: mol_type = other DNA
  misc_feature 1..90: note = Synthetic
ataaagaaaagccaatattcaatgtataaatggataagttgtacgctgctatatttggtgtatttatgggttctcaggaagatgatttga

SEQ ID NO: 6024 - DNA, 150 bp, synthetic construct
  misc_feature 1..150: note = Synthetic
  source 1..150: mol_type = other DNA
atgggttctcaggaagatgatttgacagactttatagaaattgttaaatctgttctaagtgatgagaaaactgtcacatcaactaataatacaggttgttggggttggtattggttaattattattttttttcgactcggtccgcactag

SEQ ID NO: 6025 - DNA, 33 bp, synthetic construct
  misc_feature 1..33: note = Synthetic
  source 1..33: mol_type = other DNA
atgttagacaatacgtttatttcgaacaagtag

SEQ ID NO: 6026 - DNA, 18 bp, synthetic construct
  source 1..18: mol_type = other DNA
  misc_feature 1..18: note = Synthetic
atgtacactcgcgcctag

SEQ ID NO: 6027 - DNA, 42 bp, synthetic construct
  misc_feature 1..42: note = Synthetic
  source 1..42: mol_type = other DNA
atgcgatttactagtcccctaccggaggaacgaatagtttag

SEQ ID NO: 6028 - DNA, 168 bp, synthetic construct
  source 1..168: mol_type = other DNA
  misc_feature 1..168: note = Synthetic
atggacctcaagacgctggtgatcacgcacgaagactacggcactaaggccgtcagcgtcgacggcgcctcgagcgcgctggacttgcgcgagcgagtgaaggtcgcgttccaggtgctgggcgagattgagctctttgtcgactcggtccgcactagcctgaggtaa

SEQ ID NO: 6029 - DNA, 156 bp, synthetic construct
  misc_feature 1..156: note = Synthetic
  source 1..156: mol_type = other DNA
acgctggtgatcacgcacgaagactacggcactaaggccgtcagcgtcgacggcgcctcgagcgcgctggacttgcgcgagcgagtgaaggtcgcgttccaggtgctgggcgagattgagctctttgtcgactcggtccgcactagcctgaggtaa

SEQ ID NO: 6030 - DNA, 33 bp, synthetic construct
  source 1..33: mol_type = other DNA
  misc_feature 1..33: note = Synthetic
atgccctcattcagcatttgcatggtttgttga

SEQ ID NO: 6031 - DNA, 21 bp, synthetic construct
  source 1..21: mol_type = other DNA
  misc_feature 1..21: note = Synthetic
gtggatcctaggcgtaactag

SEQ ID NO: 6032 - DNA, 135 bp, synthetic construct
  source 1..135: mol_type = other DNA
  misc_feature 1..135: note = Synthetic
atgggcaactgcaacggggcatccaagtctaaccagccagactcctcaagagccacacagccagccgcagaatttaggagggtagctcacagcagtctatatggtagatataactgtcgactcggtccgcactag

SEQ ID NO: 6033 - DNA, 144 bp, synthetic construct
  misc_feature 1..144: note = Synthetic
  source 1..144: mol_type = other DNA
atgggcaattcaaaatctaaatccaacccatccagttcctcagagtctcaaaaaggggcaccaacagtcacagaatttaggaggactgccattcacagtctctatgggaggtacaactgcaagtgtcgactcggtccgcactag

SEQ ID NO: 6034 - DNA, 180 bp, synthetic construct
  misc_feature 1..180: note = Synthetic
  source 1..180: mol_type = other DNA
ttgcaagaagccatggccgcgggctccggcgagcaggagctcagggccatcatccgcgacctggggtgcgggccctacttcctgggcaccttcgataagcgattcccgggattcatggccccgcacaaggtggcctgcgccatcgtcaacaccgactcggtccgcactagcctgaggtaa

SEQ ID NO: 6035 - DNA, 210 bp, synthetic construct
  misc_feature 1..210: note = Synthetic
  source 1..210: mol_type = other DNA
atatccgacaccccagccccgacggcagccgacagcccggtcatggcgactgacattgatatgctaattgacctcggcctggacctctccgacagcgatctggacgaggacccccccgagccggcggagagccgccgcgacgacctggaatcggacagcagcggggagtgttcctcgtcggacgactcggtccgcactagcctgaggtaa

SEQ ID NO: 6036 - DNA, 210 bp, synthetic construct
  source 1..210: mol_type = other DNA
  misc_feature 1..210: note = Synthetic
atatccgacaccccagccccgacggcagccgacagcccggtcgccgcgactgacattgatatgctaattgacctcggcctggacctctccgacagcgatctggacgaggacccccccgagccggcggagagccgccgcgacgacctggaatcggacagcagcggggagtgttcctcgtcggacgactcggtccgcactagcctgaggtaa

SEQ ID NO: 6037 - DNA, 102 bp, synthetic construct
  source 1..102: mol_type = other DNA
  misc_feature 1..102: note = Synthetic
ttggtgaggctctggggcgcgcgcgagcgcttcggggagttcttcttgacggccgagtctccgcggcgcacggcgcgctcgaaccgactcggtccgcactag

SEQ ID NO: 6038 - DNA, 75 bp, synthetic construct
  source 1..75: mol_type = other DNA
  misc_feature 1..75: note = Synthetic
gtgaaaacgttcctgctctcacagatcacgggaccctgccgctgcgcagcagtatccggggagtccagcgcgtga

SEQ ID NO: 6039 - DNA, 168 bp, synthetic construct
  misc_feature 1..168: note = Synthetic
  source 1..168: mol_type = other DNA
atgactgtacacaaaaaccgttttcgacgatcgcgaagcctgtccgtgacacacagaatacaaaaacgacctgatcacagagaaaaaacaaagctttacttacaactgaaactccacgatctacacgccgtcttcaacctcgactcggtccgcactagcctgaggtaa

SEQ ID NO: 6040 - DNA, 45 bp, synthetic construct
  misc_feature 1..45: note = Synthetic
  source 1..45: mol_type = other DNA
atctacacgccgtcttcaacctcgactcggtccgcactagcctga

SEQ ID NO: 6041 - DNA, 96 bp, synthetic construct
  source 1..96: mol_type = other DNA
  misc_feature 1..96: note = Synthetic
ttggcgtccgtggtcgggaatataacctctagttcggcgggggtcatgtcctcgaaccagacggccgcgtcccccgcgccgtctcgcgagacgtag

SEQ ID NO: 6042 - DNA, 63 bp, synthetic construct
  source 1..63: mol_type = other DNA
  misc_feature 1..63: note = Synthetic
atcggcgcgctcgaggagattcagaccccctacgcgcgcgccaatctccacgacgccgactaa

SEQ ID NO: 6043 - DNA, 27 bp, synthetic construct
  source 1..27: mol_type = other DNA
  misc_feature 1..27: note = Synthetic
atgccgcggcgtggaaaagcgcgctag

SEQ ID NO: 6044 - DNA, 168 bp, synthetic construct
  misc_feature 1..168: note = Synthetic
  source 1..168: mol_type = other DNA
atgggacaaatagtgacattcttccaggaagtgcctcatgtaatagaagaggtgatgaacattgttctcattgcactgtctgtactagcagtgctgaaaggtctgtacaattttgcaacgtgtggccttgttggtttggtcacttcgactcggtccgcactagcctga

SEQ ID NO: 6045 - DNA, 159 bp, synthetic construct
  misc_feature 1..159: note = Synthetic
  source 1..159: mol_type = other DNA
atagtgacattcttccaggaagtgcctcatgtaatagaagaggtgatgaacattgttctcattgcactgtctgtactagcagtgctgaaaggtctgtacaattttgcaacgtgtggccttgttggtttggtcacttcgactcggtccgcactagcctga

SEQ ID NO: 6046 - DNA, 144 bp, synthetic construct
  source 1..144: mol_type = other DNA
  misc_feature 1..144: note = Synthetic
acgtcttcaaccgcttccctgagaaccagatcctcgtccgcccgcccgcgcccaccattaccaccgtcagtgaaaacgttcctgctctcacagatcacgggaccctgccgctgcgcagcagtatccggggagtccagcgcgtga

SEQ ID NO: 6047 - DNA, 27 bp, synthetic construct
  source 1..27: mol_type = other DNA
  misc_feature 1..27: note = Synthetic
atgaagatcccccaacattcgacttag

SEQ ID NO: 6048 - DNA, 222 bp, synthetic construct
  misc_feature 1..222: note = Synthetic
  source 1..222: mol_type = other DNA
gtgctgtacaaaagagagagactgggacgtagatccggacagaggacggtcaccatggacgatctgccgctgaacgtcgggttacccatcatcggcgtgatgctcgtgctgatcgtggccattctctgctatctagcttaccattggcacgacaccttcaaactggtgcgcatgtttttgagctaccgctggctcgactcggtccgcactagcctgaggtaa

SEQ ID NO: 6049 - DNA, 222 bp, synthetic construct
  source 1..222: mol_type = other DNA
  misc_feature 1..222: note = Synthetic
gtgctgtacaaaagagagagactgggacgtagatccggacagaggacggtcaccgccgacgatctgccgctgaacgtcgggttacccatcatcggcgtgatgctcgtgctgatcgtggccattctctgctatctagcttaccattggcacgacaccttcaaactggtgcgcatgtttttgagctaccgctggctcgactcggtccgcactagcctgaggtaa

SEQ ID NO: 6050 - DNA, 168 bp, synthetic construct
  source 1..168: mol_type = other DNA
  misc_feature 1..168: note = Synthetic
atgaaagacgtgctgctgctgctgggcaagcctctgtgccctgtatgcgcgctggccaacacgatcctgtcccacttggaggacaagtaccctattttgagggtcaatattctttcacttttcaccaagaagaacgtggtcgactcggtccgcactagcctgaggtaa

SEQ ID NO: 6051 - DNA, 69 bp, synthetic construct
  source 1..69: mol_type = other DNA
  misc_feature 1..69: note = Synthetic
ttggtgcccagtcgggcgatggggcttatagtgtctcctgccataataaggctggaccctcctctctag

SEQ ID NO: 6052 - DNA, 18 bp, synthetic construct
  source 1..18: mol_type = other DNA
  misc_feature 1..18: note = Synthetic
atggttccatgggcgtga

SEQ ID NO: 6053 - DNA, 138 bp, synthetic construct
  source 1..138: mol_type = other DNA
  misc_feature 1..138: note = Synthetic
acgttcccgcccttacagatcacgggaccctgccgctgcgtagcagtatcagtggagttcagcgagtcaccatcactgacgcccgccgccggacctgtccctacgtttacaaagccgactcggtccgcactagcctga

SEQ ID NO: 6054 - DNA, 57 bp, synthetic construct
  source 1..57: mol_type = other DNA
  misc_feature 1..57: note = Synthetic
atgctacctagagggcgctgtcgaggcgactcttcctgttttcgccctgagggctaa

SEQ ID NO: 6055 - DNA, 168 bp, synthetic construct
  source 1..168: mol_type = other DNA
  misc_feature 1..168: note = Synthetic
atggaggacgaacggctcatcttcaacaaggtaaacgccaacgtcctcaaggcgtacctctgctcccgcatatcggacatcgtggacgagatggtggaccggcggcacctgcagaagaagaagtcggtcgcgcgccgcgtcgactcggtccgcactagcctgaggtaa

SEQ ID NO: 6056 - DNA, 150 bp, synthetic construct
  source 1..150: mol_type = other DNA
  misc_feature 1..150: note = Synthetic
atcttcaacaaggtaaacgccaacgtcctcaaggcgtacctctgctcccgcatatcggacatcgtggacgagatggtggaccggcggcacctgcagaagaagaagtcggtcgcgcgccgcgtcgactcggtccgcactagcctgaggtaa

SEQ ID NO: 6057 - DNA, 93 bp, synthetic construct
  misc_feature 1..93: note = Synthetic
  source 1..93: mol_type = other DNA
aggctctcccgcttgaagcgcacctcctgcacgacatccatcgtatatttactgtcactaaattacgactcggtccgcactagcctgaggtaa

SEQ ID NO: 6058 - DNA, 168 bp, synthetic construct
  misc_feature 1..168: note = Synthetic
  source 1..168: mol_type = other DNA
atggagcccacgccgatgctccgcgaccgggatcacgacgacgcgccccccacctacgagcaggccatgggtctgtgcccgacgacggtttccacgccaccgccgccaccacccgactgcagcccaccgccctatcgacccgactcggtccgcactagcctgaggtaa

SEQ ID NO: 6059 - DNA, 153 bp, synthetic construct
  misc_feature 1..153: note = Synthetic
  source 1..153: mol_type = other DNA
atgctccgcgaccgggatcacgacgacgcgccccccacctacgagcaggccatgggtctgtgcccgacgacggtttccacgccaccgccgccaccacccgactgcagcccaccgccctatcgacccgactcggtccgcactagcctgaggtaa

SEQ ID NO: 6060 - DNA, 63 bp, synthetic construct
  source 1..63: mol_type = other DNA
  misc_feature 1..63: note = Synthetic
ttgggagagaggaagaccatgtcgtcaaatgcggattcatgcaacggataccaagccgtctag

SEQ ID NO: 6061 - DNA, 177 bp, synthetic construct
  source 1..177: mol_type = other DNA
  misc_feature 1..177: note = Synthetic
atgatgcgacagcgagcgacctgtgttaaaattcgcgtggaagagcaagcggcgcgacgtgattttctaaccgcacaccgacggtacctcgatcccgcgcttagcgagcgcctggacgcggcggacgatcgtcttgcggaccaggaggacgactcggtccgcactagcctgaggtaa

SEQ ID NO: 6062 - DNA, 204 bp, synthetic construct
  source 1..204: mol_type = other DNA
  misc_feature 1..204: note = Synthetic
atgctgctcatggtcgtctccgggggcgcgctggttaccaagggcatcccgccgctgcgcttgctcacgctgcgctcggcgcgcgccgcgcgcgtcgtcgccgtgttggaagtcgtggccgtagtgctcatcgtgcccggtacgctcgcgctgtattcggcgtacgtgcgccagctcgactcggtccgcactagcctgaggtaa

SEQ ID NO: 6063 - DNA, 33 bp, synthetic construct
  source 1..33: mol_type = other DNA
  misc_feature 1..33: note = Synthetic
atgataagtggcataaggcaagaagtggggtga

SEQ ID NO: 6064 - DNA, 168 bp, synthetic construct
  source 1..168: mol_type = other DNA
  misc_feature 1..168: note = Synthetic
atgcatcccgtcctgcgccaaatgcgtcccacccccccggcgaccaccgcaaccgcggccgtagcaggcgccggcgctgtacaacagcagacagagatggacttggaagagggcgaagggctggcaagactgggggcacccgactcggtccgcactagcctgaggtaa

SEQ ID NO: 6065 - DNA, 156 bp, synthetic construct
  source 1..156: mol_type = other DNA
  misc_feature 1..156: note = Synthetic
ctgcgccaaatgcgtcccacccccccggcgaccaccgcaaccgcggccgtagcaggcgccggcgctgtacaacagcagacagagatggacttggaagagggcgaagggctggcaagactgggggcacccgactcggtccgcactagcctgaggtaa

SEQ ID NO: 6066 - DNA, 39 bp, synthetic construct
  misc_feature 1..39: note = Synthetic
  source 1..39: mol_type = other DNA
attgcgttttacgtgacgtcaatcgcccgaggcgcataa

SEQ ID NO: 6067 - DNA, 81 bp, synthetic construct
  misc_feature 1..81: note = Synthetic
  source 1..81: mol_type = other DNA
ctggcgttctcgccctccgtcgctggcaccacgtcagtaacgtcagcctgcgaagcagtggctgaaacagttgttgattga

SEQ ID NO: 6068 - DNA, 45 bp, synthetic construct
  source 1..45: mol_type = other DNA
  misc_feature 1..45: note = Synthetic
gtgatcgcatcggtgctgttaacaagtcgactcggtccgcactag

SEQ ID NO: 6069 - DNA, 159 bp, synthetic construct
  source 1..159: mol_type = other DNA
  misc_feature 1..159: note = Synthetic
gtgctgctgctgctgggcaagcctctgtgccctgtatgcgcgctggccaacacgatcctgtcccacttggaggacaagtaccctattttgagggtcaatattctttcacttttcaccaagaagaacgtggtcgactcggtccgcactagcctgaggtaa

SEQ ID NO: 6070 - DNA, 24 bp, synthetic construct
  misc_feature 1..24: note = Synthetic
  source 1..24: mol_type = other DNA
acggcgctcttgatgcgcgcgtag

SEQ ID NO: 6071 - DNA, 21 bp, synthetic construct
  source 1..21: mol_type = other DNA
  misc_feature 1..21: note = Synthetic
ttgttgtcggaggtctggtag

SEQ ID NO: 6072 - DNA, 168 bp, synthetic construct
  source 1..168: mol_type = other DNA
  misc_feature 1..168: note = Synthetic
atggccctcacttgccgccttcgcgtccccattactggctaccgaggaagaaactcgcgccgtagaaggatgttggggcgagggatgcgccgccacagacgaaggcgcgctatcagcagacgattagggggtggctttttcgactcggtccgcactagcctgaggtaa

SEQ ID NO: 6073 - DNA, 99 bp, synthetic construct
  source 1..99: mol_type = other DNA
  misc_feature 1..99: note = Synthetic
atgttggggcgagggatgcgccgccacagacgaaggcgcgctatcagcagacgattagggggtggctttttcgactcggtccgcactagcctgaggtaa

SEQ ID NO: 6074 - DNA, 216 bp, synthetic construct
  misc_feature 1..216: note = Synthetic
  source 1..216: mol_type = other DNA
atgggcgtgtctcaatttttatcgattattaagaaaaaacaggccagaatggcgggcctaaatgagatactcttacctgaggtacatttaaactcacccatcgttagatataagcttttctactatatattgcatggccagttaccaaatgatttggagccagatgacttgggcccactagcaaatcacgactcggtccgcactagcctgaggtaa

SEQ ID NO: 6075 - DNA, 216 bp, synthetic construct
  source 1..216: mol_type = other DNA
  misc_feature 1..216: note = Synthetic
atgggcgtgtctcaatttttatcgattattaagaaaaaacaggccagagccgcgggcctaaatgagatactcttacctgaggtacatttaaactcacccatcgttagatataagcttttctactatatattgcatggccagttaccaaatgatttggagccagatgacttgggcccactagcaaatcacgactcggtccgcactagcctgaggtaa

SEQ ID NO: 6076 - DNA, 24 bp, synthetic construct
  source 1..24: mol_type = other DNA
  misc_feature 1..24: note = Synthetic
atgttaaaaatgagaataaaatag

SEQ ID NO: 6077 - DNA, 144 bp, synthetic construct
  source 1..144: mol_type = other DNA
  misc_feature 1..144: note = Synthetic
gtgcgctatcgcttgctaattgaaaggcagaaactctccgacgtgctgcgcaacctcactcacatgtgctgccggctcaagctggcaacgcagatcgagccctatcgcaatctgacggtgcaaccgctgctcgacattaactga

SEQ ID NO: 6078 - DNA, 168 bp, synthetic construct
  source 1..168: mol_type = other DNA
  misc_feature 1..168: note = Synthetic
atggacctcttggtcgacgagctgtttgccgacatgaacgcggacggcgcttcgccaccgcccccccgcccggccgggggtcccaaaaacaccccggcggcccccccgctgtacgcaacggggcgcctgagccaggcccacgactcggtccgcactagcctgaggtaa

SEQ ID NO: 6079 - DNA, 21 bp, synthetic construct
  misc_feature 1..21: note = Synthetic
  source 1..21: mol_type = other DNA
atggaaaagataaagttttag

SEQ ID NO: 6080 - DNA, 30 bp, synthetic construct
  source 1..30: mol_type = other DNA
  misc_feature 1..30: note = Synthetic
acggagacgactcggtccgcactagcctga

SEQ ID NO: 6081 - DNA, 168 bp, synthetic construct
  misc_feature 1..168: note = Synthetic
  source 1..168: mol_type = other DNA
atggccgccccggtgtccgagcccaccgtggcccgtcaaaagttgttagccctgctcgggcaggtgcagacctatgtgtttcagatagagctgctccggcggtgcgacccccacatcggacgggggaagctcccccaactcgactcggtccgcactagcctgaggtaa

SEQ ID NO: 6082 - DNA, 123 bp, synthetic construct
  source 1..123: mol_type = other DNA
  misc_feature 1..123: note = Synthetic
atgttgaacatgacctcagacgcctccgtgaggcgtatagtcaggaggatagggaccctggctaggcgccgcgtccaacaactcccggatatggacgactcggtccgcactagcctgaggtaa

SEQ ID NO: 6083 - DNA, 120 bp, synthetic construct
  misc_feature 1..120: note = Synthetic
  source 1..120: mol_type = other DNA
ttgaacatgacctcagacgcctccgtgaggcgtatagtcaggaggatagggaccctggctaggcgccgcgtccaacaactcccggatatggacgactcggtccgcactagcctgaggtaa

SEQ ID NO: 6084 - DNA, 168 bp, synthetic construct
  misc_feature 1..168: note = Synthetic
  source 1..168: mol_type = other DNA
atggccgaggagccgagagcgccagaggcgctctcgtccacgttcatgttgaacatgacctcagacgcctccgtgaggcgtatagtcaggaggatagggaccctggctaagcgccgcgtccaacaactcccggatatggacgactcggtccgcactagcctgaggtaa

SEQ ID NO: 6085 - DNA, 123 bp, synthetic construct
  misc_feature 1..123: note = Synthetic
  source 1..123: mol_type = other DNA
atgttgaacatgacctcagacgcctccgtgaggcgtatagtcaggaggatagggaccctggctaagcgccgcgtccaacaactcccggatatggacgactcggtccgcactagcctgaggtaa

SEQ ID NO: 6086 - DNA, 168 bp, synthetic construct
  source 1..168: mol_type = other DNA
  misc_feature 1..168: note = Synthetic
atggatctcttggtcgacgagctgtttgccgacatgaacgcggacggcgcttcgccaccgcccccccgcccggccgggggtcccaaaaacaccccggcggcccccccgctgtacgcaacggggcgcctgagccaggcccacgactcggtccgcactagcctgaggtaa

SEQ ID NO: 6087 - DNA, 168 bp, synthetic construct
  source 1..168: mol_type = other DNA
  misc_feature 1..168: note = Synthetic
atgaagcggatgattcgcagtcacggcaggaaaacggagtgtcagatgacgggcgccggcgagcgacgcggctccgccgtcggtgcgctcatctgcggcagcggtacccgacgcggcagcggcgccaacgaacgccgcgacgactcggtccgcactagcctgaggtaa

SEQ ID NO: 6088 - DNA, 156 bp, synthetic construct
  source 1..156: mol_type = other DNA
  misc_feature 1..156: note = Synthetic
attcgcagtcacggcaggaaaacggagtgtcagatgacgggcgccggcgagcgacgcggctccgccgtcggtgcgctcatctgcggcagcggtacccgacgcggcagcggcgccaacgaacgccgcgacgactcggtccgcactagcctgaggtaa

SEQ ID NO: 6089 - DNA, 168 bp, synthetic construct
  source 1..168: mol_type = other DNA
  misc_feature 1..168: note = Synthetic
atgggttgttgcaggacaccgaatagacagtgcttgctaacgctaaagcgggcctcgtgccccgtagcgtctctcgtgtctgtgctatccgtgtttactagcatctgcgccattatcaagtataccgacctttttctaaacgactcggtccgcactagcctgaggtaa

SEQ ID NO: 6090 - DNA, 18 bp, synthetic construct
  misc_feature 1..18: note = Synthetic
  source 1..18: mol_type = other DNA
atgtgtttctttgcctag

SEQ ID NO: 6091 - DNA, 168 bp, synthetic construct
  source 1..168: mol_type = other DNA
  misc_feature 1..168: note = Synthetic
atggccagcaatcagcactcacagagggagcgcaccccagaccgcagcgctcagccgccgccgccaaaaatgggcagatactttctggattccgaaagcgaagaagaactggaagctgtgcctttacctccaaagaaaaacgactcggtccgcactagcctgaggtaa

SEQ ID NO: 6092 - DNA, 168 bp, synthetic construct
  misc_feature 1..168: note = Synthetic
  source 1..168: mol_type = other DNA
atgagtaacggcgactgggggcaaagccagcgcccccggggaaccggccccgtgcgcggaatcaggaccatggatgtgaatgcccccgggggcgggagtggaggctcggccctccgcatcctaggcacggcctcgtgcaacgactcggtccgcactagcctgaggtaa

SEQ ID NO: 6093 - DNA, 117 bp, synthetic construct
  misc_feature 1..117: note = Synthetic
  source 1..117: mol_type = other DNA
gtgcgcggaatcaggaccatggatgtgaatgcccccgggggcgggagtggaggctcggccctccgcatcctaggcacggcctcgtgcaacgactcggtccgcactagcctgaggtaa

SEQ ID NO: 6094 - DNA, 210 bp, synthetic construct
  source 1..210: mol_type = other DNA
  misc_feature 1..210: note = Synthetic
atcaaaagcccgatatcgtctttcccgtatcaaccccacccaatgcacctcttggtcgacgagctgtttgccgacatgaacgcggacggcgcttcgccaccgcccccccgcccggccgggggtcccaaaaacaccccggcggcccccccgctgtacgcaacggggcgcctgagccaggcccacgactcggtccgcactagcctgaggtaa

SEQ ID NO: 6095 - DNA, 129 bp, synthetic construct
  source 1..129: mol_type = other DNA
  misc_feature 1..129: note = Synthetic
acgttcatgttaaacatgacctcagacgcctccgtgaggcgtatagtcaggaggatagggaccctggctaagcgccgcgtcctacaactcccggatatggacgactcggtccgcactagcctgaggtaa

SEQ ID NO: 6096 - DNA, 210 bp, synthetic construct
  misc_feature 1..210: note = Synthetic
  source 1..210: mol_type = other DNA
atctcaaaaagtcggaccgaggccggtgtggggtgcacaggagccgccgaggagccgagggcgccagaggcgctctcgtccacgttcatgttaaacatgacctcagacgcctccgtgaggcgtatagtcaggaggatagggaccctggctaagcgccgcgtcctacaactcccggatatggacgactcggtccgcactagcctgaggtaa

SEQ ID NO: 6097 - DNA, 135 bp, synthetic construct
  source 1..135: mol_type = other DNA
  misc_feature 1..135: note = Synthetic
acgattttgaattgtttaaagtatttccacttgaaaaccggagtagagctcgacctgctaaaacatatggaaacctacaattctaaactacctttccgaagttcccgccctacaattctgattagaaacacataa

SEQ ID NO: 6098 - DNA, 69 bp, synthetic construct
  source 1..69: mol_type = other DNA
  misc_feature 1..69: note = Synthetic
atcttctacttcgtggctgtctactcgaggcgatccgtggaaaccaagaccataaatgtttctagatag

SEQ ID NO: 6099 - DNA, 168 bp, synthetic construct
  source 1..168: mol_type = other DNA
  misc_feature 1..168: note = Synthetic
atgtttctagatagcgacaccgtcgtcgtggccgttccgggcacctcgtttcccgagggcctcttcgacagacaggggcggccgctgcgtcccgggtccacgccgaccatgtcctacgaggaccccgtcccgcgaaccgccgactcggtccgcactagcctgaggtaa

SEQ ID NO: 6100 - DNA, 69 bp, synthetic construct
  misc_feature 1..69: note = Synthetic
  source 1..69: mol_type = other DNA
atcttctacttcgtggctgtctactcgaggcgatccgtggaaaccaagaccataagcctttctagatag

SEQ ID NO: 6101 - DNA, 69 bp, synthetic construct
  misc_feature 1..69: note = Synthetic
  source 1..69: mol_type = other DNA
acgccgaccatgtcctacgaggaccccgtcccgcgaaccgccgactcggtccgcactagcctgaggtaa

SEQ ID NO: 6102 - DNA, 24 bp, synthetic construct
  misc_feature 1..24: note = Synthetic
  source 1..24: mol_type = other DNA
atgtggtactggtgcagtttgtga

SEQ ID NO: 6103 - DNA, 162 bp, synthetic construct
  misc_feature 1..162: note = Synthetic
  source 1..162: mol_type = other DNA
gtgcttctcaagctgcatcgcgagcgcaccgtgagcagtgccgatgtgcgcgcgtttgtgcgcgcactgtacgtaccggaggcgcagatcgagcccgtgcctccggacgacgtgccgcttgacacgctgcttgccgactcggtccgcactagcctgaggtaa

SEQ ID NO: 6104 - DNA, 114 bp, synthetic construct
  misc_feature 1..114: note = Synthetic
  source 1..114: mol_type = other DNA
ctggcagcgcccatgacgaggggatcgacagttctgttgcagttggtccggcgtggggaagacaaatcttcgcgcaccaattatttgacatccagggtactcccgagtagctag

SEQ ID NO: 6105 - DNA, 135 bp, synthetic construct
  source 1..135: mol_type = other DNA
  misc_feature 1..135: note = Synthetic
gtggacctgtacttcgacaagctggtacacgcggtagccaacatcatccaatgcctcttccagaacaacacgtcggcaaccgtagctatcttgtataactttttagacattcccgtgacttttcccacgccctag

SEQ ID NO: 6106 - DNA, 135 bp, synthetic construct
  source 1..135: mol_type = other DNA
  misc_feature 1..135: note = Synthetic
gtggacctgtacttcgacaagctggtacacgcggtagccaacatcatccaatgcctcttccagaacaacacgtcggcaaccgtagctatgttgtataactttttagacattcccgtgacttttcccacgccctag

SEQ ID NO: 6107 - DNA, 183 bp, synthetic construct
  source 1..183: mol_type = other DNA
  misc_feature 1..183: note = Synthetic
aggtgtccggcggccatggcccagcgcaacggcatgtcgccgcgccccccgcccctcggtcgcggccgcggggccggagggccttcgggggttggttcctctcctccttcttcttgtgtgccgatgggagcgacgtcaacagcgggcactggtgccgactcggtccgcactagcctgaggtaa

SEQ ID NO: 6108 - DNA, 15 bp, synthetic construct
  misc_feature 1..15: note = Synthetic
  source 1..15: mol_type = other DNA
atggacgaagactga

SEQ ID NO: 6109 - DNA, 21 bp, synthetic construct
  source 1..21: mol_type = other DNA
  misc_feature 1..21: note = Synthetic
atggctgaactcctgaaatag

SEQ ID NO: 6110 - DNA, 93 bp, synthetic construct
  misc_feature 1..93: note = Synthetic
  source 1..93: mol_type = other DNA
atgcatagcgattcaaacaggtgctggggcaggcctttttccatgtcgtctgccagttctgcctctttctcttcacgggcgagctgctggtag

SEQ ID NO: 6111 - DNA, 78 bp, synthetic construct
  misc_feature 1..78: note = Synthetic
  source 1..78: mol_type = other DNA
ctggttgtggaggtgcttgattcgtcgtccgagctccccaagtcccacctgcctcccctacgactcggtccgcactag

SEQ ID NO: 6112 - DNA, 93 bp, synthetic construct
  source 1..93: mol_type = other DNA
  misc_feature 1..93: note = Synthetic
atgcaagagggggaggtggtgaaccacgaaacaactactacgtccaaacgtatcttaggggaaatgttcaaaaaccaatcattcttactgtaa

SEQ ID NO: 6113 - DNA, 39 bp, synthetic construct
  misc_feature 1..39: note = Synthetic
  source 1..39: mol_type = other DNA
ttgcaaccccaacaaccgactcggtccgcactagcctga

SEQ ID NO: 6114 - DNA, 168 bp, synthetic construct
  misc_feature 1..168: note = Synthetic
  source 1..168: mol_type = other DNA
atggagttggaaactgtgctgcaaagttttcagagcgttcgccagctcttgcagtatacctctaaaaacacttcaggtttttggaggtatctgtttggctctaccttaagcaaggtggtaaatagggtgaaagaagactacgactcggtccgcactagcctgaggtaa

SEQ ID NO: 6115 - DNA, 162 bp, synthetic construct
  misc_feature 1..162: note = Synthetic
  source 1..162: mol_type = other DNA
atgccagcaagcgcagcatatcgcgctgtgacgatgctaatcccaaaccttacccaacccacctggtcacgcactgttaagccgctgtatgacgctctggtggtgcaatgccacaaagaagagtcaatcgcagacaacattttgaatgcggtcacacgttag

SEQ ID NO: 6116 - DNA, 162 bp, synthetic construct
  misc_feature 1..162: note = Synthetic
  source 1..162: mol_type = other DNA
atgccagcaagcgcagcatatcgcgctgtgacgatgctaatcccaaaccttacccaacccacctggtcacgcactgttaagccgctgtatgacgctctggtggtgcaatgccacaaagaagagtcagccgcagacaacattttgaatgcggtcacacgttag

SEQ ID NO: 6117 - DNA, 213 bp, synthetic construct
  misc_feature 1..213: note = Synthetic
  source 1..213: mol_type = other DNA
acgctcagcgacgcggtcaactatgaaaagaggatgttctacctcaatagcgtggtgcgccagcgcgtaattctgaactttgactaccccaaccaggagtacgacttctttcacatgttctgtctgctctcgtcggtggtgtgctcgtgcgaatttaaatcgcccaaagagaaggtgctgagcctgcagacgactcggtccgcactagcctga

SEQ ID NO: 6118 - DNA, 60 bp, synthetic construct
  source 1..60: mol_type = other DNA
  misc_feature 1..60: note = Synthetic
acgcggtcaactatgaaaagaggatgttctacctcaatagcgtggtgcgccagcgcgtaa

SEQ ID NO: 6119 - DNA, 42 bp, synthetic construct
  misc_feature 1..42: note = Synthetic
  source 1..42: mol_type = other DNA
ttggcggtctcctgcaggttggcggcaaggcgctccctgtga

SEQ ID NO: 6120 - DNA, 90 bp, synthetic construct
  source 1..90: mol_type = other DNA
  misc_feature 1..90: note = Synthetic
ctggaccttagcgagaacacacctggacaatttaagttgatagaaactcccctgaacagcttcgactcggtccgcactagcctgaggtaa

SEQ ID NO: 6121 - DNA, 99 bp, synthetic construct
  source 1..99: mol_type = other DNA
  misc_feature 1..99: note = Synthetic
atgggcagatactttctggattccgaaagcgaagaagaactggaagctgtgcctttacctccaaagaaaaacgactcggtccgcactagcctgaggtaa

SEQ ID NO: 6122 - DNA, 168 bp, synthetic construct
  misc_feature 1..168: note = Synthetic
  source 1..168: mol_type = other DNA
atggcttctcttctcggggctatatgtggctggggagcgcgccccgaggaacaatatgagatgatccgcgcggccgttccgccctcggaggcggagccgcggctgcaggaggccctggcggtcgttaacgcgctacttcccgactcggtccgcactagcctgaggtaa

SEQ ID NO: 6123 - DNA, 144 bp, synthetic construct
  source 1..144: mol_type = other DNA
  misc_feature 1..144: note = Synthetic
ctgcgatctccaagatcaagagagatgatgctggtcaacaagtttgccccgactatgtcatgcttcggtcctctgtcacgacaaaagtggtgcggaatgtggttgagtaccagatccgtacgggtggattcttttcgtgcttag

SEQ ID NO: 6124 - DNA, 186 bp, synthetic construct
  source 1..186: mol_type = other DNA
  misc_feature 1..186: note = Synthetic
aagtcacacctgtcgtcgtcactgccgcttcctcactcagagctgcgatctccaagatcaagagagatgatgctggtcaacaagtttgccccgactatgtcatgcttcggtcctctgtcacgacaaaagtggtgcggaatgtggttgagtaccagatccgtacgggtggattcttttcgtgcttag

SEQ ID NO: 6125 - DNA, 210 bp, synthetic construct
  misc_feature 1..210: note = Synthetic
  source 1..210: mol_type = other DNA
atggcttcattcaagggattctccgccaacactgttccagtctccaaggctaaacgtgatatatcatctcttgctgccactcctgggcttcgttcgcaacccttcactccatctgtggatatgtctcaatcgcgcaaattcctcacgaaggcgattgagcaggggtctatgtctataccttacgactcggtccgcactagcctgaggtaa

SEQ ID NO: 6126 - DNA, 222 bp, synthetic construct
  source 1..222: mol_type = other DNA
  misc_feature 1..222: note = Synthetic
gtgaccgtggtcgccgcttcattcaagggattctccgccaacactgttccagtctccaaggctaaacgtgatatatcatctcttgctgccactcctgggcttcgttcgcaacccttcactccatctgtggatatgtctcaatcgcgcaaattcctcacgaaggcgattgagcaggggtctatgtctataccttacgactcggtccgcactagcctgaggtaa

SEQ ID NO: 6127 - DNA, 18 bp, synthetic construct
  misc_feature 1..18: note = Synthetic
  source 1..18: mol_type = other DNA
atgggagctggcatataa

SEQ ID NO: 6128 - DNA, 12 bp, synthetic construct
  misc_feature 1..12: note = Synthetic
  source 1..12: mol_type = other DNA
atgacagcttaa

SEQ ID NO: 6129 - DNA, 156 bp, synthetic construct
  source 1..156: mol_type = other DNA
  misc_feature 1..156: note = Synthetic
atgcaatcccttcgctcactgcttgtcacactgctggctaagtacgaaggcgctgtgcttcgcgcccatcatgaggtggcgccgaaggcttgcccttcgttcgaccttaagcgttggtgggagaagaacgaactggtcacttctgaccgtggataa

SEQ ID NO: 6130 - DNA, 72 bp, synthetic construct
  misc_feature 1..72: note = Synthetic
  source 1..72: mol_type = other DNA
atcctccctctcatcgcaataataaaacaccagcagcgcgcacgacgcgatcacggtaacccccatgactag

SEQ ID NO: 6131 - DNA, 33 bp, synthetic construct
  misc_feature 1..33: note = Synthetic
  source 1..33: mol_type = other DNA
atgccagtatctttaaacgagtctttccagtag

SEQ ID NO: 6132 - DNA, 69 bp, synthetic construct
  source 1..69: mol_type = other DNA
  misc_feature 1..69: note = Synthetic
ctggcgacggatttcgttcacttcgttctggtcacggttagccaggctcgccgggaaagttgccagtaa

SEQ ID NO: 6133 - DNA, 87 bp, synthetic construct
  misc_feature 1..87: note = Synthetic
  source 1..87: mol_type = other DNA
atgatctgcgctacctgctgtacctgcggcttttcgtcgtactgttccggcatgttgttcgactcggtccgcactagcctgaggtaa

SEQ ID NO: 6134 - DNA, 69 bp, synthetic construct
  source 1..69: mol_type = other DNA
  misc_feature 1..69: note = Synthetic
ctggcggccgatttcgttcacttcgttctggtcacggttagccaggctcgccgggaaagttgccagtaa

SEQ ID NO: 6135 - DNA, 168 bp, synthetic construct
  misc_feature 1..168: note = Synthetic
  source 1..168: mol_type = other DNA
atggggctcctcgacgcgctgctgaccgtgatcgtcatctcgatcgtgtgctacatcgtcatcatgatgtaccgccggtcgtgcgtctcggcgcccgccgttccgcgcaacaaggacctgctccccccgggcgcatcctccgactcggtccgcactagcctgaggtaa

SEQ ID NO: 6136 - DNA, 150 bp, synthetic construct
  source 1..150: mol_type = other DNA
  misc_feature 1..150: note = Synthetic
ctgctgaccgtgatcgtcatctcgatcgtgtgctacatcgtcatcatgatgtaccgccggtcgtgcgtctcggcgcccgccgttccgcgcaacaaggacctgctccccccgggcgcatcctccgactcggtccgcactagcctgaggtaa

SEQ ID NO: 6137 - DNA, 168 bp, synthetic construct
  source 1..168: mol_type = other DNA
  misc_feature 1..168: note = Synthetic
aaggcttctcttctcggggctatatgtggctggggagcgcgccccgaggaacaatatgagatgatccgcgcggccgttccgccctcggaggcggagccgcggctgcaggaggccctggcggtcgttaacgcgctacttcccgactcggtccgcactagcctgaggtaa

SEQ ID NO: 6138 - DNA, 90 bp, synthetic construct
  misc_feature 1..90: note = Synthetic
  source 1..90: mol_type = other DNA
atgctgcatctagcctccttgtcttccgataggtccgattcactttcgtcgcctcgatgccaacagacttgtccaatgctttcccgttag

SEQ ID NO: 6139 - DNA, 99 bp, synthetic construct
  source 1..99: mol_type = other DNA
  misc_feature 1..99: note = Synthetic
atgccaacagacttgtccaatgctttcccgttagagacacgagtttcttcacggaggccgcgtgaacaatacatgctggagtccgcggttccgaggtag

SEQ ID NO: 6140 - DNA, 168 bp, synthetic construct
  source 1..168: mol_type = other DNA
  misc_feature 1..168: note = Synthetic
atgaaaaatatcgatttaacaaattggaaattactggcagaaatatatgaatatctgttttttttctcgtttttctttctttgtctgctggtaataatagtggtgaaatttaataacagcaccgttggtcgagaatacaccgactcggtccgcactagcctgaggtaa

SEQ ID NO: 6141 - DNA, 66 bp, synthetic construct
  source 1..66: mol_type = other DNA
  misc_feature 1..66: note = Synthetic
atggcgcccgggttgttgaacttgccttgtccctatggacgactgcctagaaccccggacgtctaa

SEQ ID NO: 6142 - DNA, 42 bp, synthetic construct
  misc_feature 1..42: note = Synthetic
  source 1..42: mol_type = other DNA
ctgatgctcaacatatacattttggatttagaaatatggtaa

SEQ ID NO: 6143 - DNA, 42 bp, synthetic construct
  source 1..42: mol_type = other DNA
  misc_feature 1..42: note = Synthetic
ctgatgctcaacatatacattttggatttagaaatgccgtaa

SEQ ID NO: 6144 - DNA, 168 bp, synthetic construct
  source 1..168: mol_type = other DNA
  misc_feature 1..168: note = Synthetic
atgcaacctataccaatagtagcaatagtagcattagtagtagcaataataatagcaatagttgtgtggtccatagtaatcatagaatataggaaaatattaagacaaagaaaaatagacaggttaattgatagactaatcgactcggtccgcactagcctgaggtaa

SEQ ID NO: 6145 - DNA, 21 bp, synthetic construct
  misc_feature 1..21: note = Synthetic
  source 1..21: mol_type = other DNA
atgtacaggcgcgctcactag

SEQ ID NO: 6146 - DNA, 93 bp, synthetic construct
  source 1..93: mol_type = other DNA
  misc_feature 1..93: note = Synthetic
ctggcgacgcaaagctcttcgcctacagcacaagccagtcgggccgacgttattaggttgtttagcgactcggtccgcactagcctgaggtaa

SEQ ID NO: 6147 - DNA, 174 bp, synthetic construct
  misc_feature 1..174: note = Synthetic
  source 1..174: mol_type = other DNA
aaggaaatggctgaaacatacaggttccccagattctcacacgaagaaaatgggacagtagaacctctccctctcaaaacaggtcctgacaaaaaagcaatccctcacatcagaatagtcaaggtaggagatcctccaaaacatggcgactcggtccgcactagcctgaggtaa

SEQ ID NO: 6148 - DNA, 171 bp, synthetic construct
  source 1..171: mol_type = other DNA
  misc_feature 1..171: note = Synthetic
atcatgaacgggaccggcggggccttcgaaggggggctttttagcccttatttgacaacccgcctgccgggatgggccggagttcgtcagaatgtgatgggatcaacggtggacgggcgcccagtgcttccagcaaattcctccgactcggtccgcactagcctgaggtaa

SEQ ID NO: 6149 - DNA, 27 bp, synthetic construct
  source 1..27: mol_type = other DNA
  misc_feature 1..27: note = Synthetic
aagcacatcgtgcgcacgtgcccgtga

SEQ ID NO: 6150 - DNA, 39 bp, synthetic construct
  misc_feature 1..39: note = Synthetic
  source 1..39: mol_type = other DNA
atggcccagattccagtgcactcacctaagacggggtaa

SEQ ID NO: 6151 - DNA, 168 bp, synthetic construct
  source 1..168: mol_type = other DNA
  misc_feature 1..168: note = Synthetic
atgccttctcttctcggggctatatgtggctggggagcgcgccccgaggaacaatatgagatgatccgcgcggccgttccgccctcggaggcggagccgcggctgcaggaggccctggcggtcgttaacgcgctacttcccgactcggtccgcactagcctgaggtaa

SEQ ID NO: 6152 - DNA, 147 bp, synthetic construct
  source 1..147: mol_type = other DNA
  misc_feature 1..147: note = Synthetic
atatgtggctggggagcgcgccccgaggaacaatatgagatgatccgcgcggccgttccgccctcggaggcggagccgcggctgcaggaggccctggcggtcgttaacgcgctacttcccgactcggtccgcactagcctgaggtaa

SEQ ID NO: 6153 - DNA, 168 bp, synthetic construct
  source 1..168: mol_type = other DNA
  misc_feature 1..168: note = Synthetic
atggctgctcttctcggggctatatgtggctggggagcgcgccccgaggaacaatatgagatgatccgcgcggccgttccgccctcggaggcggagccgcggctgcaggaggccctggcggtcgttaacgcgctacttcccgactcggtccgcactagcctgaggtaa

SEQ ID NO: 6154 - DNA, 87 bp, synthetic construct
  misc_feature 1..87: note = Synthetic
  source 1..87: mol_type = other DNA
ctgcaggccatggccaagattctggaggaccaggaggagggagaagacaacagtcaggtctacaacgacaaggatctcctcggctaa

SEQ ID NO: 6155 - DNA, 174 bp, synthetic construct
  source 1..174: mol_type = other DNA
  misc_feature 1..174: note = Synthetic
acgatgccgacgacgagacgtctagccttccgcccttggagtcagatgatgaagagcaggacagggacggaacttccaaccgcacacccactgtcgccccaccggctcccgtatacagagatcactctgaaaagaaagaactcccgcgactcggtccgcactagcctgaggtaa

SEQ ID NO: 6156 - DNA, 165 bp, synthetic construct
  source 1..165: mol_type = other DNA
  misc_feature 1..165: note = Synthetic
acgacgagacgtctagccttccgcccttggagtcagatgatgaagagcaggacagggacggaacttccaaccgcacacccactgtcgccccaccggctcccgtatacagagatcactctgaaaagaaagaactcccgcgactcggtccgcactagcctgaggtaa

SEQ ID NO: 6157 - DNA, 201 bp, synthetic construct
  source 1..201: mol_type = other DNA
  misc_feature 1..201: note = Synthetic
gtggacaaggtgcttgcacagggcagcatggtgacccaaataaagaatgaattatcaacagtaaagacaacactagctacaattgaaggaatgatggcgacagtaaagatcatggatccgagaaacccgacaggggtcccagttgatgagcttagaagaagttttagtggccacgactcggtccgcactagcctgaggtaa

SEQ ID NO: 6158 - DNA, 45 bp, synthetic construct
  misc_feature 1..45: note = Synthetic
  source 1..45: mol_type = other DNA
acgtccttggtgatgaccgcctgcggaaaggcggtgaccaggtag

SEQ ID NO: 6159 - DNA, 102 bp, synthetic construct
  misc_feature 1..102: note = Synthetic
  source 1..102: mol_type = other DNA
atggagaccttctgctggacctcggccttcatgaagtcgaggttgcggtcgatggcgtgtatcatgtacttccgccgcacgaagtccatttgtaacgcctaa

SEQ ID NO: 6160 - DNA, 201 bp, synthetic construct
  source 1..201: mol_type = other DNA
  misc_feature 1..201: note = Synthetic
attctgttctggactatctgggacggcgtcagggccagtctgttgcacaccttttggcggctacccgtcgccgtcttcttcgagccgcacgaggaaaacgtgctgcgctgccccgagcgcgtgcttcggcggttgctggaggacgcggcggtggcaatgcgcggcgggggctgcgactcggtccgcactagcctgaggtaa

SEQ ID NO: 6161 - DNA, 69 bp, synthetic construct
  source 1..69: mol_type = other DNA
  misc_feature 1..69: note = Synthetic
ctggcctcgtcctggaggggtgtttccttgccttctcgaaaactgttcccatgtaggagcagggtctag

SEQ ID NO: 6162 - DNA, 66 bp, synthetic construct
  misc_feature 1..66: note = Synthetic
  source 1..66: mol_type = other DNA
atgagcggcaggaaggcctcgttgcacgagtgggccagcccgagttcggggtgcatcatctggtag

SEQ ID NO: 6163 - DNA, 51 bp, synthetic construct
  misc_feature 1..51: note = Synthetic
  source 1..51: mol_type = other DNA
aaggccgtggagatgcaggaggtggggtggctccgactcggtccgcactag

SEQ ID NO: 6164 - DNA, 96 bp, synthetic construct
  source 1..96: mol_type = other DNA
  misc_feature 1..96: note = Synthetic
ctgatgatggtggcagtgattcaagtgttttgggggctgtatgtgaaaggttggctgcaccgacattttccctggatgttttcggaccagtggtga

SEQ ID NO: 6165 - DNA, 168 bp, synthetic construct
  misc_feature 1..168: note = Synthetic
  source 1..168: mol_type = other DNA
atgcgtctctttgcaaggctgctcttgcttgtcatggatgaacttgtgtttctcatgcgcaactttgccctggcacagagcgagcccctaggcttccacgccctggacgcgttcggtctggagctctgggcttggagcgacgactcggtccgcactagcctgaggtaa

SEQ ID NO: 6166 - DNA, 150 bp, synthetic construct
  misc_feature 1..150: note = Synthetic
  source 1..150: mol_type = other DNA
ctgctcttgcttgtcatggatgaacttgtgtttctcatgcgcaactttgccctggcacagagcgagcccctaggcttccacgccctggacgcgttcggtctggagctctgggcttggagcgacgactcggtccgcactagcctgaggtaa

SEQ ID NO: 6167 - DNA, 42 bp, synthetic construct
  misc_feature 1..42: note = Synthetic
  source 1..42: mol_type = other DNA
atgattcagttggcctcaagagactgtagtcttcacacttaa

SEQ ID NO: 6168 - DNA, 201 bp, synthetic construct
  source 1..201: mol_type = other DNA
  misc_feature 1..201: note = Synthetic
atacgaggatacgtaataatcttgattgtacacccatcatggaacgattgtgcaacaggtcatattctcataatgttactcaattggcacgaacaaaaggaagaaggacaacatctactttatctattcataaaacataatcaaggatacactctcaatatactacggtatctactagcgactcggtccgcactagcctga

SEQ ID NO: 6169 - DNA, 138 bp, synthetic construct
  source 1..138: mol_type = other DNA
  misc_feature 1..138: note = Synthetic
acgaggatacgtaataatcttgattgtacacccatcatggaacgattgtgcaacaggtcatattctcataatgttactcaattggcacgaacaaaaggaagaaggacaacatctactttatctattcataaaacataa

SEQ ID NO: 6170 - DNA, 33 bp, synthetic construct
  misc_feature 1..33: note = Synthetic
  source 1..33: mol_type = other DNA
atgctgctgccgattttactcctaagtaaatga

SEQ ID NO: 6171 - DNA, 78 bp, synthetic construct
  source 1..78: mol_type = other DNA
  misc_feature 1..78: note = Synthetic
aggacatctacatcggactggcgaatttcggcttcgagaatgacgtccccgaactgctgggcgtggcgcacctgctag

SEQ ID NO: 6172 - DNA, 159 bp, synthetic construct
  source 1..159: mol_type = other DNA
  misc_feature 1..159: note = Synthetic
atgctgctgccgattttactcctaagtaagccatcttgctggagaacggcgtgcgagtgttccccaagcccggcatgggcaaggacatctacatcggactggcgaatttcggcttcgagaatgacgtccccgaactgctgggcgtggcgcacctgctag

SEQ ID NO: 6173 - DNA, 201 bp, synthetic construct
  source 1..201: mol_type = other DNA
  misc_feature 1..201: note = Synthetic
gtggacaaggtgcttgcacagggcagcatggtgacccaaataaagaatgaattatcaacagtaaagacaacactagctacaattgaaggaatgatggcgacagtaaagatcatggatccgagaaacccgacaggggtcccagttgatgagcttagaagaagttttagtgatcacgactcggtccgcactagcctgaggtaa

SEQ ID NO: 6174 - DNA, 96 bp, synthetic construct
  source 1..96: mol_type = other DNA
  misc_feature 1..96: note = Synthetic
aggacctttctgctgcatcacgccatacccctggagcccgagatcatcttttccacctacacccggttcgactcggtccgcactagcctgaggtaa

SEQ ID NO: 6175 - DNA, 24 bp, synthetic construct
  source 1..24: mol_type = other DNA
  misc_feature 1..24: note = Synthetic
atgctatcaacgaaagatacgtag

SEQ ID NO: 6176 - DNA, 168 bp, synthetic construct
  source 1..168: mol_type = other DNA
  misc_feature 1..168: note = Synthetic
atgagtaacggcgactgggggcaaagccagcgcacccggggaaccggccccgtgcgcggaatcaggaccatggatgtgaatgcccccgggggcgggagtggaggctcggccctccgcatcctaggcacggcctcgtgcaacgactcggtccgcactagcctgaggtaa

SEQ ID NO: 6177 - DNA, 171 bp, synthetic construct
  misc_feature 1..171: note = Synthetic
  source 1..171: mol_type = other DNA
aaggccagtaacggcgactgggggcaaagccagcgcacccggggaaccggccccgtgcgcggaatcaggaccatggatgtgaatgcccccgggggcgggagtggaggctcggccctccgcatcctaggcacggcctcgtgcaacgactcggtccgcactagcctgaggtaa

SEQ ID NO: 6178 - DNA, 207 bp, synthetic construct
  misc_feature 1..207: note = Synthetic
  source 1..207: mol_type = other DNA
atgacagaggctaaagacaaaattgcagaaatgatgaaagaagaggacacccagagggcaaaaataggagatggtagcgtgaagcttaccgaaaaagccaaagagttgaacaaaatcctagaagaccagagctcaagtggagagtcagagagtgaagaagagagtggagagtctgaatctgatgcgactcggtccgcactagcctga

SEQ ID NO: 6179 - DNA, 12 bp, synthetic construct
  source 1..12: mol_type = other DNA
  misc_feature 1..12: note = Synthetic
atggaagagtga

SEQ ID NO: 6180 - DNA, 33 bp, synthetic construct
  source 1..33: mol_type = other DNA
  misc_feature 1..33: note = Synthetic
atggagagtatgctcctttcgcccgacttttga

SEQ ID NO: 6181 - DNA, 84 bp, synthetic construct
  misc_feature 1..84: note = Synthetic
  source 1..84: mol_type = other DNA
atcttgagcatggtcttttccctcaactatcggcaattgcactcggagtcgccacagcacacgggagtaccctcgcaggagtaa

SEQ ID NO: 6182 - DNA, 51 bp, synthetic construct
  misc_feature 1..51: note = Synthetic
  source 1..51: mol_type = other DNA
atgacaggttttacgagggtcgagctggagaccctgtggcttgtcttgtga

SEQ ID NO: 6183 - DNA, 72 bp, synthetic construct
  source 1..72: mol_type = other DNA
  misc_feature 1..72: note = Synthetic
ctggatctgacgcaaatgacgtttcgtatcaagatcatgactatgtggtggatcagttacagtacatgttag

SEQ ID NO: 6184 - DNA, 210 bp, synthetic construct
  source 1..210: mol_type = other DNA
  misc_feature 1..210: note = Synthetic
ttggcttcaacgtttttgttctgtagcattatctcagcatttgtaaagccgactatgtttatgtatgttactacccatatgttgggagtgacattgtgtgcactttgttttgtaagctttgctatgttgttgatcaagcataagcatttgtatttaactatgtatattatgcctgtgttatgcacactgtttcgactcggtccgcactag

SEQ ID NO: 6185 - DNA, 60 bp, synthetic construct
  misc_feature 1..60: note = Synthetic
  source 1..60: mol_type = other DNA
ctgtacgcccttctgtaccaccacctgcaattgagcaaccacaatgactcccaggtctag

SEQ ID NO: 6186 - DNA, 168 bp, synthetic construct
  misc_feature 1..168: note = Synthetic
  source 1..168: mol_type = other DNA
atgactcccaggtctagattggccaccctggggactgtcatcctgttggtctgcttttgcgcaggcgcggcgcactcgaggggtgacacctttcagacgtccagttcccccacacccccaggatcttcctctaaggcccccgactcggtccgcactagcctgaggtaa

SEQ ID NO: 6187 - DNA, 150 bp, synthetic construct
  source 1..150: mol_type = other DNA
  misc_feature 1..150: note = Synthetic
ttggccaccctggggactgtcatcctgttggtctgcttttgcgcaggcgcggcgcactcgaggggtgacacctttcagacgtccagttcccccacacccccaggatcttcctctaaggcccccgactcggtccgcactagcctgaggtaa

SEQ ID NO: 6188 - DNA, 159 bp, synthetic construct
  misc_feature 1..159: note = Synthetic
  source 1..159: mol_type = other DNA
ttgctgttcacgctcgtactgctggccctctacggaccgtctgtcgacgctagccgcgactatgtgcatgttcgactactgagctaccgaggcgaccccctggtcttcaagcacactttctcgggtgtgcgcgactcggtccgcactagcctgaggtaa

SEQ ID NO: 6189 - DNA, 21 bp, synthetic construct
  source 1..21: mol_type = other DNA
  misc_feature 1..21: note = Synthetic
atgtgcatgttcgactactga

SEQ ID NO: 6190 - DNA, 156 bp, synthetic construct
  source 1..156: mol_type = other DNA
  misc_feature 1..156: note = Synthetic
ctgttcacgctcgtactgctggccctctacggaccgtctgtcgacgctagccgcgactatgtgcatgttcgactactgagctaccgaggcgaccccctggtcttcaagcacactttctcgggtgtgcgcgactcggtccgcactagcctgaggtaa

SEQ ID NO: 6191 - DNA, 186 bp, synthetic construct
  source 1..186: mol_type = other DNA
  misc_feature 1..186: note = Synthetic
ctggtaaggctgactgttatggctgccgctgtggaagcgctgtatgttgttctggagcgggagggtgctattttgcctaggcaggagggtttttcaggtgtttatgtgtttttctctcctattaattttgttatacctcctatgggggctgtaatgttcgactcggtccgcactagcctgaggtaa

SEQ ID NO: 6192 - DNA, 111 bp, synthetic construct
  source 1..111: mol_type = other DNA
  misc_feature 1..111: note = Synthetic
atgttgttctggagcgggagggtgctattttgcctaggcaggagggtttttcaggtgtttatgtgtttttctctcctattaattttgttatacctcctatgggggctgtaa

SEQ ID NO: 6193 - DNA, 120 bp, synthetic construct
  misc_feature 1..120: note = Synthetic
  source 1..120: mol_type = other DNA
aagcgctgtatgttgttctggagcgggagggtgctattttgcctaggcaggagggtttttcaggtgtttatgtgtttttctctcctattaattttgttatacctcctatgggggctgtaa

SEQ ID NO: 6194 - DNA, 129 bp, synthetic construct
  source 1..129: mol_type = other DNA
  misc_feature 1..129: note = Synthetic
aaggagctcgcggactaccagtccacgccgctcaccgaccccatccggctcagcgacttctccaagctattcgacggcgtcaagaagagcatccagctcacgaacgcgactcggtccgcactagcctga

SEQ ID NO: 6195 - DNA, 177 bp, synthetic construct
  source 1..177: mol_type = other DNA
  misc_feature 1..177: note = Synthetic
attgcaataatggggcttaggtattcaaaggaagtcagggatcggtatggtgacaaagagccagagggaagaattcctattacattgaacatgcctcagactctttatggtagatacaattgcaaatcttgctggtttgcaaacaagggcgactcggtccgcactagcctgaggtaa

SEQ ID NO: 6196 - DNA, 177 bp, synthetic construct
  misc_feature 1..177: note = Synthetic
  source 1..177: mol_type = other DNA
attgcaatagccgggcttaggtattcaaaggaagtcagggatcggtatggtgacaaagagccagagggaagaattcctattacattgaacatgcctcagactctttatggtagatacaattgcaaatcttgctggtttgcaaacaagggcgactcggtccgcactagcctgaggtaa

SEQ ID NO: 6197 - DNA, 168 bp, synthetic construct
  misc_feature 1..168: note = Synthetic
  source 1..168: mol_type = other DNA
atggatgcgcatgctatcaacgaaagatacgtaggtcctcgctgccaccgtttggcccacgtggtgctgcctaggacctttctgctgcatcacgccatacccctggagcccgagatcatcttttccacctacacccggttcgactcggtccgcactagcctgaggtaa

SEQ ID NO: 6198 - DNA, 30 bp, synthetic construct
  source 1..30: mol_type = other DNA
  misc_feature 1..30: note = Synthetic
atgcgcatgctatcaacgaaagatacgtag

SEQ ID NO: 6199 - DNA, 141 bp, synthetic construct
  source 1..141: mol_type = other DNA
  misc_feature 1..141: note = Synthetic
atgaggacgagtactgatacgcgtatgatgattatcaactacgaaattgcggtaccgtattgcatctgtatatcatctctcatctgtattcaaagtcggatacgagagcatatgtgcgtccggaagttgttaaatgtctaa

SEQ ID NO: 6200 - DNA, 168 bp, synthetic construct
  misc_feature 1..168: note = Synthetic
  source 1..168: mol_type = other DNA
atgctaaccacaattaaagcaaagcaaaagccctatatatatgtgcgacgttgctacgttcatatctataataatattcgagatatgaacggaaccgcaacgaaaaagccaataagtggcaaaaacttcctgctaacgtacgactcggtccgcactagcctgaggtaa

SEQ ID NO: 6201 - DNA, 123 bp, synthetic construct
  misc_feature 1..123: note = Synthetic
  source 1..123: mol_type = other DNA
ctgcccggtcgcagtccagtctgcatcttcatcatcgagatagctgtcgtcataggactcagcggtcagttcgccgggcgtcaggtctttaacttttgccagacgcgaccagtcaacgtctga

SEQ ID NO: 6202 - DNA, 123 bp, synthetic construct
  source 1..123: mol_type = other DNA
  misc_feature 1..123: note = Synthetic
ctgcccggtcgcagtccagtctgcatcttcatcatcgagatagctgtcgtcataggactcagcggtcagttcgccgggcgtcaggtctttaacttttgccagacgcgaccagtcagcctctga

SEQ ID NO: 6203 - DNA, 57 bp, synthetic construct
  source 1..57: mol_type = other DNA
  misc_feature 1..57: note = Synthetic
atgtgtctgcgcacgtgctcggggtccttctggatgtactgctttgcgaagaagtag

SEQ ID NO: 6204 - DNA, 219 bp, synthetic construct
  misc_feature 1..219: note = Synthetic
  source 1..219: mol_type = other DNA
ctgttgcgggaagtgttcctcctgaggctatttcgcccgcctgtgtggaagatgtccaactttaaggtgagagaccccgtgatccaggagcgactggatcatgactacgctcaccatcccctggtggctcgcatgaataccctggatcagggaaatatgtcgcaggccgaatacctcgtgcaaaagagacacgactcggtccgcactagcctgaggtaa

SEQ ID NO: 6205 - DNA, 36 bp, synthetic construct
  misc_feature 1..36: note = Synthetic
  source 1..36: mol_type = other DNA
atgactacgctcaccatcccctggtggctcgcatga

SEQ ID NO: 6206 - DNA, 153 bp, synthetic construct
  misc_feature 1..153: note = Synthetic
  source 1..153: mol_type = other DNA
gtgagagaccccgtgatccaggagcgactggatcatgactacgctcaccatcccctggtggctcgcatgaataccctggatcagggaaatatgtcgcaggccgaatacctcgtgcaaaagagacacgactcggtccgcactagcctgaggtaa

SEQ ID NO: 6207 - DNA, 210 bp, synthetic construct
  source 1..210: mol_type = other DNA
  misc_feature 1..210: note = Synthetic
ttggcttcaacgtttttgttctgtagcattatctcagcatttgtaaaatggactatgtttatgtatgttactacccatatgttgggagtgacattgtgtgcactttgttttgtaagctttgctatgttgttgatcaagcataagcatttgtatttaactatgtatattatgcctgtgttatgcacactgtttcgactcggtccgcactag

SEQ ID NO: 6208 - DNA, 105 bp, synthetic construct
  misc_feature 1..105: note = Synthetic
  source 1..105: mol_type = other DNA
gtggggaaagtagcactagcagcggccagagtagcggtgacgagagtaactgcagtctacgcacccacggcgtgtacacacggggtgaacaacactaatcgataa

SEQ ID NO: 6209 - DNA, 27 bp, synthetic construct
  source 1..27: mol_type = other DNA
  misc_feature 1..27: note = Synthetic
atggataatttcaagtcagagtcgtaa

SEQ ID NO: 6210 - DNA, 99 bp, synthetic construct
  misc_feature 1..99: note = Synthetic
  source 1..99: mol_type = other DNA
atgtcacccttcaaagggctactaacactgccgaaggatcgccccccgtccgcgatggcaacgtatgttcacgactcggtccgcactagcctgaggtaa

SEQ ID NO: 6211 - DNA, 177 bp, synthetic construct
  source 1..177: mol_type = other DNA
  misc_feature 1..177: note = Synthetic
attatccagatagagattctggccgttacgccaccagtcatcctcacgatgaaagtccggcatctcaatccccgccagatgataagcatcccggaacagtgtgtaacagtccgtcacaccgtgctcaaagcgccgcccggtgagatgcggcacacgactcggtccgcactagcctga

SEQ ID NO: 6212 - DNA, 159 bp, synthetic construct
  misc_feature 1..159: note = Synthetic
  source 1..159: mol_type = other DNA
ctggccgttacgccaccagtcatcctcacgatgaaagtccggcatctcaatccccgccagatgataagcatcccggaacagtgtgtaacagtccgtcacaccgtgctcaaagcgccgcccggtgagatgcggcacacgactcggtccgcactagcctga

SEQ ID NO: 6213 - DNA, 33 bp, synthetic construct
  source 1..33: mol_type = other DNA
  misc_feature 1..33: note = Synthetic
ataagacagggcttggaaaggattttgctataa

SEQ ID NO: 6214 - DNA, 81 bp, synthetic construct
  source 1..81: mol_type = other DNA
  misc_feature 1..81: note = Synthetic
atgggtggcaagtggtcaaaaagtagtgtgattggatggcctactgtaagggaaagaacgactcggtccgcactagcctga

SEQ ID NO: 6215 - DNA, 198 bp, synthetic construct
  source 1..198: mol_type = other DNA
  misc_feature 1..198: note = Synthetic
aagaccaacatcgcggaggccatagcccacactgtgcccttctacgggtgcgtaaactggaccaatgagaactttcccttcaacgactgtgtcgacaagatggtgatctggtgggaggaggggaagatgaccgccaaggtcgtggagtcggccaaagccattctcggaggaagcacgactcggtccgcactagcctga

SEQ ID NO: 6216 - DNA, 42 bp, synthetic construct
  source 1..42: mol_type = other DNA
  misc_feature 1..42: note = Synthetic
atgagaactttcccttcaacgactgtgtcgacaagatggtga

SEQ ID NO: 6217 - DNA, 99 bp, synthetic construct
  source 1..99: mol_type = other DNA
  misc_feature 1..99: note = Synthetic
atggtgatctggtgggaggaggggaagatgaccgccaaggtcgtggagtcggccaaagccattctcggaggaagcacgactcggtccgcactagcctga

SEQ ID NO: 6218 - DNA, 90 bp, synthetic construct
  source 1..90: mol_type = other DNA
  misc_feature 1..90: note = Synthetic
atgccggccaattgccattttttctggagtgacacagtagaaggttctggggtcttgttgccatcgatcccacttgagtttaatggctag

SEQ ID NO: 6219 - DNA, 156 bp, synthetic construct
  misc_feature 1..156: note = Synthetic
  source 1..156: mol_type = other DNA
atgctgtccgactgccatcttttctggggtgacgcaatagaaggtttgggggtcctgccgccagcgatcccacttgagttttatggcgaggtcataggcgatgttgacgagccgctggtctccagagagtttcatgaccagcatgaaggggattag

SEQ ID NO: 6220 - DNA, 222 bp, synthetic construct
  misc_feature 1..222: note = Synthetic
  source 1..222: mol_type = other DNA
ctgttttctaaatcgaaatccgaggagtgcaatacagaagccggaacgatggaggtctcctgcttaaagtacggggtgcaaggtttgaatgcggattgcagctatgtcaaatcgcaatgcataaaactttcggaatgcgagtgtttatatacttttgcttctgatgtatgtaaggaagattttcataattccgaggaaacgactcggtccgcactagcctga

SEQ ID NO: 6221 - DNA, 168 bp, synthetic construct
  source 1..168: mol_type = other DNA
  misc_feature 1..168: note = Synthetic
atggaaactcagccattgctgtcaacatcgccacgagtgccatcacatctcgtcctcagcgacgaggaaaaggagcagagcttaagcattccaccgcccagtcctgccaccacctctaccctagaagataaggaggtcgacgactcggtccgcactagcctgaggtaa

SEQ ID NO: 6222 - DNA, 81 bp, synthetic construct
  source 1..81: mol_type = other DNA
  misc_feature 1..81: note = Synthetic
attccaccgcccagtcctgccaccacctctaccctagaagataaggaggtcgacgactcggtccgcactagcctgaggtaa

SEQ ID NO: 6223 - DNA, 186 bp, synthetic construct
  source 1..186: mol_type = other DNA
  misc_feature 1..186: note = Synthetic
ttggccaatcgtgtctccatggcgctaaagggaccacaaaccctcgaggaaaatattgggtctgcggcccccactggtccctgcgggtacctctatgcctatctgacacacaacttccccataggggaagcctccctgctgggcaatggctacccggacgactcggtccgcactagcctgaggtaa

SEQ ID NO: 6224 - DNA, 186 bp, synthetic construct
  source 1..186: mol_type = other DNA
  misc_feature 1..186: note = Synthetic
ttggccaatcgtgtctccatggcgctaaagggaccacaaaccctcgaggaaaatattgggtctgcggcccccactggtccctgcgggtacctctatgcctatgtgacacacaacttccccataggggaagcctccctgctgggcaatggctacccggacgactcggtccgcactagcctgaggtaa

SEQ ID NO: 6225 - DNA, 159 bp, synthetic construct
  misc_feature 1..159: note = Synthetic
  source 1..159: mol_type = other DNA
aagggaccacaaaccctcgaggaaaatattgggtctgcggcccccactggtccctgcgggtacctctatgcctatctgacacacaacttccccataggggaagcctccctgctgggcaatggctacccggacgactcggtccgcactagcctgaggtaa

SEQ ID NO: 6226 - DNA, 174 bp, synthetic construct
  misc_feature 1..174: note = Synthetic
  source 1..174: mol_type = other DNA
atgcctgtgcaggtagttgactcaaggtggagtagcatccgccagtcagacaatatgaccgctgcagcctgtcagctgccatattgtttctttcgcaacacatctgcgaattatagtggtggcacacatgatgcgcaccatggtgattttcatttccgactcggtccgcactag

SEQ ID NO: 6227 - DNA, 186 bp, synthetic construct
  misc_feature 1..186: note = Synthetic
  source 1..186: mol_type = other DNA
acgcgtcggaggccatttatggggatcaaaaacttaaaggcgttgctgctcagccacggcgcgctgaccccgcacgagcctggcggcgacgagcgcttccccgccgtgtttgtggacggcttcagcgtcatgatgaccatggcgtactcgtgcgcggacgactcggtccgcactagcctgaggtaa

SEQ ID NO: 6228 - DNA, 189 bp, synthetic construct
  source 1..189: mol_type = other DNA
  misc_feature 1..189: note = Synthetic
gtgacgcgtcggaggccatttgccgggatcaaaaacttaaaggcgttgctgctcagccacggcgcgctgaccccgcacgagcctggcggcgacgagcgcttccccgccgtgtttgtggacggcttcagcgtcatgatgaccatggcgtactcgtgcgcggacgactcggtccgcactagcctgaggtaa

SEQ ID NO: 6229 - DNA, 189 bp, synthetic construct
  source 1..189: mol_type = other DNA
  misc_feature 1..189: note = Synthetic
ctggaagataccattcagccagctattgattccggcaagggtctgatgttcactcagccgaatcaggctgctggatacatggctaagctgatttgggaatctgtgagcgtgacggtggtagctgcggttgaagcaatgaactggcttaagtctgctgctaacgactcggtccgcactagcctgaggtaa

SEQ ID NO: 6230 - DNA, 192 bp, synthetic construct
  source 1..192: mol_type = other DNA
  misc_feature 1..192: note = Synthetic
gtggccgaagataccattcagccagctattgattccggcaagggtctgatgttcactcagccgaatcaggctgctggatacatggctaagctgatttgggaatctgtgagcgtgacggtggtagctgcggttgaagcaatgaactggcttaagtctgctgctaacgactcggtccgcactagcctgaggtaa

SEQ ID NO: 6231 - DNA, 117 bp, synthetic construct
  misc_feature 1..117: note = Synthetic
  source 1..117: mol_type = other DNA
atacattatacacagatgcgtattgtgttgagtataaggaaagtgaggaagatagacaacagtgcagcagtagtagttttcctgcgagtttacccgactcggtccgcactagcctga

SEQ ID NO: 6232 - DNA, 216 bp, synthetic construct
  source 1..216: mol_type = other DNA
  misc_feature 1..216: note = Synthetic
atgaatctacggctgttgtactggagacctgtcgtgcaatggcaggtgcgcaactgcgataacatctgctatatctgtcgccgcgggctgggaaagggctgcttgcgaccccagtgcgagatcgactgcgccttctgcctgcccgtgtgcgggcacggctaccacgagcactgcctgccgcctcggaccgactcggtccgcactagcctgaggtaa

SEQ ID NO: 6233 - DNA, 15 bp, synthetic construct
  misc_feature 1..15: note = Synthetic
  source 1..15: mol_type = other DNA
atgaggaccctttga

SEQ ID NO: 6234 - DNA, 183 bp, synthetic construct
  misc_feature 1..183: note = Synthetic
  source 1..183: mol_type = other DNA
acgtccaggtgtaccatggagacgacataccgccgcgaggcgctgacagtaagggttattttttgtacgagtggcgacagcgccgagacgatcgccgacgtccttacgggggccccaacgtcagcgtccttcttttctgtactccacgaccttttcgactcggtccgcactagcctgaggtaa

SEQ ID NO: 6235 - DNA, 183 bp, synthetic construct
  misc_feature 1..183: note = Synthetic
  source 1..183: mol_type = other DNA
acgtccaggtgtaccgccgagacgacataccgccgcgaggcgctgacagtaagggttattttttgtacgagtggcgacagcgccgagacgatcgccgacgtccttacgggggccccaacgtcagcgtccttcttttctgtactccacgaccttttcgactcggtccgcactagcctgaggtaa

SEQ ID NO: 6236 - DNA, 18 bp, synthetic construct
  misc_feature 1..18: note = Synthetic
  source 1..18: mol_type = other DNA
ctggccctgatatcttaa

SEQ ID NO: 6237 - DNA, 162 bp, synthetic construct
  source 1..162: mol_type = other DNA
  misc_feature 1..162: note = Synthetic
aggaccacccggagctgctcgtgttttaccagtgtggcaggagtggcgcaagaggcgagagaaaaacgccggaggaaaatccgcatcaacgaccttactgttccggtagccggaccccactggatttcgggatccgactcggtccgcactagcctgaggtaa

SEQ ID NO: 6238 - DNA, 87 bp, synthetic construct
  source 1..87: mol_type = other DNA
  misc_feature 1..87: note = Synthetic
acgagcaaacttcttcctctaattttaatgccgcaactcaacatacacaatatccagatgcaagattatcttcacccattgtcttag

SEQ ID NO: 6239 - DNA, 177 bp, synthetic construct
  source 1..177: mol_type = other DNA
  misc_feature 1..177: note = Synthetic
attctcagtcccattgcagccttgcatatacccacggcttgctcttctgttgggttctgcttaaggatgtctaccatcctaattccaccaatctgtgtgctgtggcacatctccaataaagatgctagtgggtctgctgatactgcagctcttccgactcggtccgcactagcctga

SEQ ID NO: 6240 - DNA, 57 bp, synthetic construct
  misc_feature 1..57: note = Synthetic
  source 1..57: mol_type = other DNA
ataaagatgctagtgggtctgctgatactgcagctcttccgactcggtccgcactag

SEQ ID NO: 6241 - DNA, 168 bp, synthetic construct
  misc_feature 1..168: note = Synthetic
  source 1..168: mol_type = other DNA
atggcttctcctctcggggctatatgtggctggggagcgcgccccgaggaacaatatgagatgatccgcgcggccgttccgccctcggaggcggagccgcggctgcaggaggccctggcggtcgttaacgcgctacttcccgactcggtccgcactagcctgaggtaa

SEQ ID NO: 6242 - DNA, 168 bp, synthetic construct
  misc_feature 1..168: note = Synthetic
  source 1..168: mol_type = other DNA
atggcttcttttctcggggctatatgtggctggggagcgcgccccgaggaacaatatgagatgatccgcgcggccgttccgccctcggaggcggagccgcggctgcaggaggccctggcggtcgttaacgcgctacttcccgactcggtccgcactagcctgaggtaa

SEQ ID NO: 6243 - DNA, 168 bp, synthetic construct
  source 1..168: mol_type = other DNA
  misc_feature 1..168: note = Synthetic
atggcttttcttctcggggctatatgtggctggggagcgcgccccgaggaacaatatgagatgatccgcgcggccgttccgccctcggaggcggagccgcggctgcaggaggccctggcggtcgttaacgcgctacttcccgactcggtccgcactagcctgaggtaa

SEQ ID NO: 6244 - DNA, 168 bp, synthetic construct
  source 1..168: mol_type = other DNA
  misc_feature 1..168: note = Synthetic
attgcttctcttctcggggctatatgtggctggggagcgcgccccgaggaacaatatgagatgatccgcgcggccgttccgccctcggaggcggagccgcggctgcaggaggccctggcggtcgttaacgcgctacttcccgactcggtccgcactagcctgaggtaa

SEQ ID NO: 6245 - DNA, 168 bp, synthetic construct
  misc_feature 1..168: note = Synthetic
  source 1..168: mol_type = other DNA
ctggcttctcttctcggggctatatgtggctggggagcgcgccccgaggaacaatatgagatgatccgcgcggccgttccgccctcggaggcggagccgcggctgcaggaggccctggcggtcgttaacgcgctacttcccgactcggtccgcactagcctgaggtaa

SEQ ID NO: 6246 - DNA, 207 bp, synthetic construct
  misc_feature 1..207: note = Synthetic
  source 1..207: mol_type = other DNA
aagccacgcccattagtgaaacgcttcatggtgagcgtgttatcccggtgctttttgccataccacggggccagcgccagcagcgacggaatatcacgaatagtcggctcaacgtgggttttcgccaagttctcggcatcaccatccgtcggcaaccagataagggtgttgcgctgcttcgactcggtccgcactagcctgaggtaa

SEQ ID NO: 6247 - DNA, 207 bp, synthetic construct
  source 1..207: mol_type = other DNA
  misc_feature 1..207: note = Synthetic
aagccacgcccattagtgaaacgcttcatggtgagcgtgttatcccggtgctttttgccataccacggggccagcgccagcagcgacggaatgccacgaatagtcggctcaacgtgggttttcataaagttctcggcatcaccatccgtcggcaaccagataagggtgttgcgctgcttcgactcggtccgcactagcctgaggtaa

SEQ ID NO: 6248 - DNA, 45 bp, synthetic construct
  misc_feature 1..45: note = Synthetic
  source 1..45: mol_type = other DNA
ataaatagaaaaaacatcagcaccattaatagcagaagcatttag

SEQ ID NO: 6249 - DNA, 30 bp, synthetic construct
  source 1..30: mol_type = other DNA
  misc_feature 1..30: note = Synthetic
atcagcaccattaatagcagaagcatttag

SEQ ID NO: 6250 - DNA, 30 bp, synthetic construct
  misc_feature 1..30: note = Synthetic
  source 1..30: mol_type = other DNA
atttacacgactcggtccgcactagcctga

SEQ ID NO: 6251 - DNA, 186 bp, synthetic construct
  source 1..186: mol_type = other DNA
  misc_feature 1..186: note = Synthetic
acggattcccaagaggcagaccgagcaattatctcggatttaaaacgccagtggtccggcctctcactccattgcgcctgggtttcgggactgatgatctttgttggtgcactggtcatctgctttctgcggtcgcaacgaatcggggaacaggacgctgaacagctgcgactcggtccgcactag

SEQ ID NO: 6252 - DNA, 69 bp, synthetic construct
  misc_feature 1..69: note = Synthetic
  source 1..69: mol_type = other DNA
ataaggcattcctacgagcagatggttggagccactattcctttgttacaacgactcggtccgcactag

SEQ ID NO: 6253 - DNA, 39 bp, synthetic construct
  misc_feature 1..39: note = Synthetic
  source 1..39: mol_type = other DNA
atgattatcgtgattaaagaaaacttagggctcaggtag

SEQ ID NO: 6254 - DNA, 27 bp, synthetic construct
  source 1..27: mol_type = other DNA
  misc_feature 1..27: note = Synthetic
aggacgactcggtccgcactagcctga

SEQ ID NO: 6255 - DNA, 177 bp, synthetic construct
  misc_feature 1..177: note = Synthetic
  source 1..177: mol_type = other DNA
attctcagtcccattgcagccttgcatatacccacggcttgctcttctgttgggttctgcttaaggatgtctaccatcctagccccaccaatctgtgtgctgtggcacatctccaataaagatgctagtgggtctgctgatactgcagctcttccgactcggtccgcactagcctga

SEQ ID NO: 6256 - DNA, 207 bp, synthetic construct
  source 1..207: mol_type = other DNA
  misc_feature 1..207: note = Synthetic
gtgaatccaccaaaactgaagggccagctaattctcagtcccattgcagccttgcatatacccacggcttgctcttctgttgggttctgcttaaggatgtctaccatcctaattccaccaatctgtgtgctgtggcacatctccaataaagatgctagtgggtctgctgatactgcagctcttccgactcggtccgcactagcctga

SEQ ID NO: 6257 - DNA, 207 bp, synthetic construct
  source 1..207: mol_type = other DNA
  misc_feature 1..207: note = Synthetic
ctgaatccaccaaaactgaaggatgagctaattctcagtcccattgcagccttgcatatacccacggcttgctcttctgttgggttctgcttaaggatgtctaccatcctaattccaccaatctgtgtgctgtggcacatctccaataaagatgctagtgggtctgctgatactgcagctcttccgactcggtccgcactagcctga

SEQ ID NO: 6258 - DNA, 207 bp, synthetic construct
  source 1..207: mol_type = other DNA
  misc_feature 1..207: note = Synthetic
aagccacgcccattagtgaaacgcttcatggtgagcgtgttatcccggtgctttttgccataccacggggccagcgccagcagcgacggaatatcacgaatagtcggctcaacgtgggttttcataaagttctcggcatcaccatccgtcggcaaccagataagggtgttgcgctgcttcgactcggtccgcactagcctgaggtaa

SEQ ID NO: 6259 - DNA, 168 bp, synthetic construct
  source 1..168: mol_type = other DNA
  misc_feature 1..168: note = Synthetic
atgggatttctcctatctatctgcaaacgtccctcacagcccgtagacgtggacggggaaccgctcgacgtagtcgtggactatgaccccattcgcgtttcagaaaagggcatgttgcttgagcaatcgcaatccccatacgactcggtccgcactagcctgaggtaa

SEQ ID NO: 6260 - DNA, 81 bp, synthetic construct
  source 1..81: mol_type = other DNA
  misc_feature 1..81: note = Synthetic
atgaccccattcgcgtttcagaaaagggcatgttgcttgagcaatcgcaatccccatacgactcggtccgcactagcctga

SEQ ID NO: 6261 - DNA, 168 bp, synthetic construct
  misc_feature 1..168: note = Synthetic
  source 1..168: mol_type = other DNA
atgaacacaactaactgttttatcgctttggtgtacgctatcagagagatcagaacgcttttcctttcacgagctacaggaaagatggaattcacgctgtacaacggtgaaaagaagaccttttactccaggcccaacaacgactcggtccgcactagcctgaggtaa

SEQ ID NO: 6262 - DNA, 138 bp, synthetic construct
  misc_feature 1..138: note = Synthetic
  source 1..138: mol_type = other DNA
gtgtacgctatcagagagatcagaacgcttttcctttcacgagctacaggaaagatggaattcacgctgtacaacggtgaaaagaagaccttttactccaggcccaacaacgactcggtccgcactagcctgaggtaa

SEQ ID NO: 6263 - DNA, 174 bp, synthetic construct
  source 1..174: mol_type = other DNA
  misc_feature 1..174: note = Synthetic
ataaaagccgttcttccaatcctgccaccgccccctctgaatgatagacaaggcagcattaactggatggggatggcctacagagtcctggctgatgtgatgaggggaattcgcatggacgggttttttatttcatcagatgcagacgactcggtccgcactagcctgaggtaa

SEQ ID NO: 6264 - DNA, 60 bp, synthetic construct
  source 1..60: mol_type = other DNA
  misc_feature 1..60: note = Synthetic
atgatagacaaggcagcattaactggatggggatggcctacagagtcctggctgatgtga

SEQ ID NO: 6265 - DNA, 129 bp, synthetic construct
  source 1..129: mol_type = other DNA
  misc_feature 1..129: note = Synthetic
ttggaaagaaacaaaaagttgatatatttggagataaagatgatgaatctatgttacagatcgactgtgagacagattctcttatttcagaatcggttagtcgactcggtccgcactagcctgaggtaa

SEQ ID NO: 6266 - DNA, 177 bp, synthetic construct
  source 1..177: mol_type = other DNA
  misc_feature 1..177: note = Synthetic
aggacgacaatggaaacactggcgaaccgtttagatgcgtgccaggagacgttgctagaactgtatgaaaaggatagcaacaaacttgaggatcagattaagcattgggcgcaggtccggctagaaaatgtcatgctgtttaaggcccgcgactcggtccgcactagcctgaggtaa

SEQ ID NO: 6267 - DNA, 60 bp, synthetic construct
  source 1..60: mol_type = other DNA
  misc_feature 1..60: note = Synthetic
atgaaaaggatagcaacaaacttgaggatcagattaagcattgggcgcaggtccggctag

SEQ ID NO: 6268 - DNA, 45 bp, synthetic construct
  misc_feature 1..45: note = Synthetic
  source 1..45: mol_type = other DNA
atgtcatgctgtttaaggcccgcgactcggtccgcactagcctga

SEQ ID NO: 6269 - DNA, 168 bp, synthetic construct
  source 1..168: mol_type = other DNA
  misc_feature 1..168: note = Synthetic
atgggtcagattgtgacaatgtttgaggctctgcctcacatcatcgatgaggtgatcaacattgtcattattgtgcttatcgtgatcacgggtatcaaggctgtctacaattttgccacctgtgggatattcgcattgatcgactcggtccgcactagcctgaggtaa

SEQ ID NO: 6270 - DNA, 60 bp, synthetic construct
  misc_feature 1..60: note = Synthetic
  source 1..60: mol_type = other DNA
atcaactgggtgtcaggccctatcctacagaagggccggtcagattgtgacaatgtttga

SEQ ID NO: 6271 - DNA, 168 bp, synthetic construct
  source 1..168: mol_type = other DNA
  misc_feature 1..168: note = Synthetic
atggagtcgtccaaacaggcgccccgcgcgggcgcgcgcgtgttcgagtcgttgttgaagttcgtcgtccgcggcgccgcctgcggctgtctctcgagcaccgtcgacatagaggccaaggcgcggctgctgcccggcagcgactcggtccgcactagcctgaggtaa

SEQ ID NO: 6272 - DNA, 129 bp, synthetic construct
  source 1..129: mol_type = other DNA
  misc_feature 1..129: note = Synthetic
gtgttcgagtcgttgttgaagttcgtcgtccgcggcgccgcctgcggctgtctctcgagcaccgtcgacatagaggccaaggcgcggctgctgcccggcagcgactcggtccgcactagcctgaggtaa

SEQ ID NO: 6273 - DNA, 81 bp, synthetic construct
  source 1..81: mol_type = other DNA
  misc_feature 1..81: note = Synthetic
ctgaccctcctgaggcacatccgccgacgtctgggcctgggccgtgcttccgtaaaaccgactcggtccgcactagcctga

SEQ ID NO: 6274 - DNA, 222 bp, synthetic construct
  misc_feature 1..222: note = Synthetic
  source 1..222: mol_type = other DNA
ctgatttcctccgcggctggccattgtgttctcctaggcagagaaacaacagacatggaaactcagccatcactgccaacatcgctgcaagcaccatcacacctcgcccccagcagcgacgaggaggagagcttaaccaccccaccacccagtcccgctaccaccacctctaccctcgatgatgaggaggaggtcgactcggtccgcactagcctgaggtaa

SEQ ID NO: 6275 - DNA, 36 bp, synthetic construct
  source 1..36: mol_type = other DNA
  misc_feature 1..36: note = Synthetic
atgaggaggaggtcgactcggtccgcactagcctga

SEQ ID NO: 6276 - DNA, 150 bp, synthetic construct
  misc_feature 1..150: note = Synthetic
  source 1..150: mol_type = other DNA
ctgccaacatcgctgcaagcaccatcacacctcgcccccagcagcgacgaggaggagagcttaaccaccccaccacccagtcccgctaccaccacctctaccctcgatgatgaggaggaggtcgactcggtccgcactagcctgaggtaa

SEQ ID NO: 6277 - DNA, 168 bp, synthetic construct
  source 1..168: mol_type = other DNA
  misc_feature 1..168: note = Synthetic
atggcaagacgagctcgcagaccgagaggccgattttactccttcagaagaggacggtggcaccacctcaagcgacttcgacgaagatataaatttcgacatcggaggagacagcggtatcgtagacgagcttttaggaacgactcggtccgcactagcctgaggtaa

SEQ ID NO: 6278 - DNA, 45 bp, synthetic construct
  misc_feature 1..45: note = Synthetic
  source 1..45: mol_type = other DNA
atgctgccattattgatagcattattaaagatggaaaatttataa

SEQ ID NO: 6279 - DNA, 30 bp, synthetic construct
  source 1..30: mol_type = other DNA
  misc_feature 1..30: note = Synthetic
atgacagcaatgcgactcggtccgcactag

SEQ ID NO: 6280 - DNA, 45 bp, synthetic construct
  misc_feature 1..45: note = Synthetic
  source 1..45: mol_type = other DNA
atgctgccattattgatagcattattaaagatgggaaatttataa

SEQ ID NO: 6281 - DNA, 168 bp, synthetic construct
  source 1..168: mol_type = other DNA
  misc_feature 1..168: note = Synthetic
atggttcttccaatcctgccaccgccccctctgaatgatagacaaggcagcattaactggatggggatggcctacagagtcctggctgatgtgatgaggggaattcgcatggacgggttttttatttcatcagatgcagacgactcggtccgcactagcctgaggtaa

SEQ ID NO: 6282 - DNA, 75 bp, synthetic construct
  source 1..75: mol_type = other DNA
  misc_feature 1..75: note = Synthetic
atgtttctaccggaatctaggagatccagttacctcaggcttattccagttaaaaacttatctccgaatgattga

SEQ ID NO: 6283 - DNA, 84 bp, synthetic construct
  misc_feature 1..84: note = Synthetic
  source 1..84: mol_type = other DNA
atggatgatttattcttacctttaattgcgaagaaccctgggaactgcactgccatcgactcggtccgcactagcctgaggtaa

SEQ ID NO: 6284 - DNA, 36 bp, synthetic construct
  misc_feature 1..36: note = Synthetic
  source 1..36: mol_type = other DNA
atacactacataccagccacacagggtagcgtttag

SEQ ID NO: 6285 - DNA, 84 bp, synthetic construct
  misc_feature 1..84: note = Synthetic
  source 1..84: mol_type = other DNA
atgacgacgcatatccgtcgttcggcagcctacccgcctcgcacgctcagtacggctttcgactgctacgcagcatatttttga

SEQ ID NO: 6286 - DNA, 81 bp, synthetic construct
  source 1..81: mol_type = other DNA
  misc_feature 1..81: note = Synthetic
gtggacaacattaatacagacgataacttgatttcgaaattacccatggagatacaacgcgaacgactcggtccgcactag

SEQ ID NO: 6287 - DNA, 30 bp, synthetic construct
  misc_feature 1..30: note = Synthetic
  source 1..30: mol_type = other DNA
ctggcacgatctcgactgccgctgcggtaa

SEQ ID NO: 6288 - DNA, 183 bp, synthetic construct
  source 1..183: mol_type = other DNA
  misc_feature 1..183: note = Synthetic
ctggcaggaccacctatggctcctactcgccgatggagacgccgctttggccgccgccgtagacgctatagaaagagacgctatggctggagacgacgctactaccgctacaggccgcgtgactatcggcgacgatggctggtaaggagaaggcgcgactcggtccgcactagcctgaggtaa

SEQ ID NO: 6289 - DNA, 195 bp, synthetic construct
  source 1..195: mol_type = other DNA
  misc_feature 1..195: note = Synthetic
ttgaatagagagcagatctctggaaaaatgaaccaacgaaaaaaggtggttagaccacctttcaatatgctgaaacgcgagagaaaccgcgtatcaacccctcaagggttggtgaagagattctcaaccggacttttttctgggaaaggacccttacggatggtgctcgactcggtccgcactagcctgaggtaa

SEQ ID NO: 6290 - DNA, 150 bp, synthetic construct
  misc_feature 1..150: note = Synthetic
  source 1..150: mol_type = other DNA
gtggttagaccacctttcaatatgctgaaacgcgagagaaaccgcgtatcaacccctcaagggttggtgaagagattctcaaccggacttttttctgggaaaggacccttacggatggtgctcgactcggtccgcactagcctgaggtaa

SEQ ID NO: 6291 - DNA, 48 bp, synthetic construct
  misc_feature 1..48: note = Synthetic
  source 1..48: mol_type = other DNA
atgtcacaaaacagaaagactctgcctgctcgactcggtccgcactag

SEQ ID NO: 6292 - DNA, 213 bp, synthetic construct
  misc_feature 1..213: note = Synthetic
  source 1..213: mol_type = other DNA
aagatgaggaggactatgaggacgagccctgatcagccaggtggtgtttttgtagatgctgcgttcgacggcggtggcggacgggtcgcagcaggtgaatcccgctatgttggcggccctgcaaagccaaccttcgggcgtgacaccctcagacgactgggcggcggccatggatcgcatcctggccctaaccaccgactcggtccgcactag

SEQ ID NO: 6293 - DNA, 213 bp, synthetic construct
  misc_feature 1..213: note = Synthetic
  source 1..213: mol_type = other DNA
aagatgaggaggactatgaggacgagccctgatcagccaggtggtgtttttgtaggccctgcgttcgacggcggtggcggacgggtcgcagcaggtgaatcccgctatgttggcggccctgcaaagccaaccttcgggcgtgacaccctcagacgactgggcggcggccatggatcgcatcctggccctaaccaccgactcggtccgcactag

SEQ ID NO: 6294 - DNA, 174 bp, synthetic construct
  misc_feature 1..174: note = Synthetic
  source 1..174: mol_type = other DNA
gtgctgccgctgctgtgtaccgcaaggacaaggctcgcaagtctcgccgtatcagccttgagttcatgcttgagcaagccaataagtgccctaaccataaggccatctggttcccttacaacatggactggcgcggtcgtgtttacgctgtgtcaacgactcggtccgcactag

SEQ ID NO: 6295 - DNA, 216 bp, synthetic construct
  source 1..216: mol_type = other DNA
  misc_feature 1..216: note = Synthetic
atcgacatgaatcctgaggctctcaccgcgtggaaacgtgctgccgctgctgtgtaccgcaaggacaaggctcgcaagtctcgccgtatcagccttgagttcatgcttgagcaagccaataagtttgctaaccataaggccatctggttcccttacaacatggactggcgcggtcgtgtttacgctgtgtcaacgactcggtccgcactagcctga

SEQ ID NO: 6296 - DNA, 174 bp, synthetic construct
  misc_feature 1..174: note = Synthetic
  source 1..174: mol_type = other DNA
gtgctgccgctgctgtgtaccgcaaggacaaggctcgcaagtctcgccgtatcagccttgagttcatgcttgagcaagccaataagtttgctaaccataaggccatctggttcccttacaacatggactggcgcggtcgtgtttacgctgtgtcaacgactcggtccgcactag

SEQ ID NO: 6297 - DNA, 33 bp, synthetic construct
  source 1..33: mol_type = other DNA
  misc_feature 1..33: note = Synthetic
atgaacatcgggaatatagaatatacttcataa

SEQ ID NO: 6298 - DNA, 33 bp, synthetic construct
  misc_feature 1..33: note = Synthetic
  source 1..33: mol_type = other DNA
gtgcacaagttgatgcgcgactattttcagtaa

SEQ ID NO: 6299 - DNA, 72 bp, synthetic construct
  source 1..72: mol_type = other DNA
  misc_feature 1..72: note = Synthetic
atggtaacttcgaaaccgttatttatagcagatatagggataggcgactcggtccgcactagcctgaggtaa

SEQ ID NO: 6300 - DNA, 168 bp, synthetic construct
  source 1..168: mol_type = other DNA
  misc_feature 1..168: note = Synthetic
atgagagccaatcgggaagaactggatctcctgccaccagttggaggaatggctgttgatgtgatggaagtagaactccctgcgacgcgccgagcattcatgcttgtgcttgtacagacggccgcagtactcgcagcgatcgactcggtccgcactagcctgaggtaa

SEQ ID NO: 6301 - DNA, 171 bp, synthetic construct
  misc_feature 1..171: note = Synthetic
  source 1..171: mol_type = other DNA
agggccagagccaatcgggaagaactggatctcctgccaccagttggaggaatggctgttgatgtgatggaagtagaactccctgcgacgcgccgagcattcatgcttgtgcttgtacagacggccgcagtactcgcagcgatcgactcggtccgcactagcctgaggtaa

SEQ ID NO: 6302 - DNA, 147 bp, synthetic construct
  misc_feature 1..147: note = Synthetic
  source 1..147: mol_type = other DNA
ctggatttcctgccaccagttggacgagtggctgttgatgtgatgaaagtagaaatcccgccggcgaaccgagcactcgtgctgatgcttgtaaaagcgtccgcagtactcgcagcgctcgactcggtccgcactagcctgaggtaa

SEQ ID NO: 6303 - DNA, 33 bp, synthetic construct
  misc_feature 1..33: note = Synthetic
  source 1..33: mol_type = other DNA
atgggtacggagcactggttattaatcctgtag

SEQ ID NO: 6304 - DNA, 168 bp, synthetic construct
  source 1..168: mol_type = other DNA
  misc_feature 1..168: note = Synthetic
atgggtctgtttggcatgatgaagtttgcccagactcaccatctggtgaagcgccggggcctccgggccccggagggctactttacccccatcgccgtggacctgtggaatgtcatgtataccctggtggttaaatatcacgactcggtccgcactagcctgaggtaa

SEQ ID NO: 6305 - DNA, 90 bp, synthetic construct
  source 1..90: mol_type = other DNA
  misc_feature 1..90: note = Synthetic
agggctactttacccccatcgccgtggacctgtggaatgtcatgtataccctggtggttaaatatcacgactcggtccgcactagcctga

SEQ ID NO: 6306 - DNA, 27 bp, synthetic construct
  misc_feature 1..27: note = Synthetic
  source 1..27: mol_type = other DNA
gtgccggagccggtctgtttggcatga

SEQ ID NO: 6307 - DNA, 147 bp, synthetic construct
  misc_feature 1..147: note = Synthetic
  source 1..147: mol_type = other DNA
aagtttgcccagactcaccatctggtgaagcgccggggcctccgggccccggagggctactttacccccatcgccgtggacctgtggaatgtcatgtataccctggtggttaaatatcacgactcggtccgcactagcctgaggtaa

SEQ ID NO: 6308 - DNA, 174 bp, synthetic construct
  misc_feature 1..174: note = Synthetic
  source 1..174: mol_type = other DNA
gtgctgccgctgctgtgtaccgcaaggacaaggctcgcaagtctcgccgtatcagccttgagttcatgcttgagcaagccaataagtttgctaaccataaggccatctggttcccttacaacatggagccgcgcggtcgtgtttacgctgtgtcaacgactcggtccgcactag

SEQ ID NO: 6309 - DNA, 78 bp, synthetic construct
  misc_feature 1..78: note = Synthetic
  source 1..78: mol_type = other DNA
atgaatacaagaccaggtgtcgagcctgcgagtgcggagggaagcatgccaggttccagcccgtgtgtgtggatgtga

SEQ ID NO: 6310 - DNA, 36 bp, synthetic construct
  misc_feature 1..36: note = Synthetic
  source 1..36: mol_type = other DNA
acggagttcggctccagtggggaagaatctgactag

SEQ ID NO: 6311 - DNA, 81 bp, synthetic construct
  misc_feature 1..81: note = Synthetic
  source 1..81: mol_type = other DNA
atgatgaatccaagaccaggtgccgagcctgcgagtgcggagggaagcatgccaggttccagcccgtgtgtgtggaggtga

SEQ ID NO: 6312 - DNA, 168 bp, synthetic construct
  source 1..168: mol_type = other DNA
  misc_feature 1..168: note = Synthetic
atgacaacgcgacacacgcagacgagggacggacgcatcgcgatccggcgcgacggggcgcgattggcccacgcgcgagcccgtgcccgcttcgagtggctgctcctggctcgcggcaggccgtccaaactgtacggctacgactcggtccgcactagcctgaggtaa

SEQ ID NO: 6313 - DNA, 162 bp, synthetic construct
  source 1..162: mol_type = other DNA
  misc_feature 1..162: note = Synthetic
acgcgacacacgcagacgagggacggacgcatcgcgatccggcgcgacggggcgcgattggcccacgcgcgagcccgtgcccgcttcgagtggctgctcctggctcgcggcaggccgtccaaactgtacggctacgactcggtccgcactagcctgaggtaa

SEQ ID NO: 6314 - DNA, 39 bp, synthetic construct
  misc_feature 1..39: note = Synthetic
  source 1..39: mol_type = other DNA
ttggcctcctcgtcgtccacgtgcttggtaaggctgtag

SEQ ID NO: 6315 - DNA, 12 bp, synthetic construct
  source 1..12: mol_type = other DNA
  misc_feature 1..12: note = Synthetic
atgcagccgtag

SEQ ID NO: 6316 - DNA, 21 bp, synthetic construct
  misc_feature 1..21: note = Synthetic
  source 1..21: mol_type = other DNA
atgctccgctccttctcgtag

SEQ ID NO: 6317 - DNA, 93 bp, synthetic construct
  source 1..93: mol_type = other DNA
  misc_feature 1..93: note = Synthetic
atgtcattattgtcatccttgtcatcctttggtgtattcttattctctatatattttgatagttgttcagccgtagaaccagctgctccatga

SEQ ID NO: 6318 - DNA, 18 bp, synthetic construct
  misc_feature 1..18: note = Synthetic
  source 1..18: mol_type = other DNA
atgattcagaatagataa

SEQ ID NO: 6319 - DNA, 96 bp, synthetic construct
  misc_feature 1..96: note = Synthetic
  source 1..96: mol_type = other DNA
atggaaactggagaaatcaaaacattttcatccgtgtgttttaagattagttctttaaagatatccatcgactcggtccgcactagcctgaggtaa

SEQ ID NO: 6320 - DNA, 159 bp, synthetic construct
  misc_feature 1..159: note = Synthetic
  source 1..159: mol_type = other DNA
atggctgaagtctctgaatttgatttcaaaataaagaaagataagaagaaacaagaaaaaacgaaatcgaagaaaatggttgtcaaagataatgaaacagtagtaacacatgaagaaaagtctgaacgtggttcagtctatcgactcggtccgcactag

SEQ ID NO: 6321 - DNA, 42 bp, synthetic construct
  misc_feature 1..42: note = Synthetic
  source 1..42: mol_type = other DNA
atgcatataattctttcattattatataagggtgcaatttag

SEQ ID NO: 6322 - DNA, 93 bp, synthetic construct
  misc_feature 1..93: note = Synthetic
  source 1..93: mol_type = other DNA
gtgcaatttagaagaaaacagaagaaaatggaagaagaaacgatacagaatatgactaaaatgctaatggcgacacgactcggtccgcactag

SEQ ID NO: 6323 - DNA, 225 bp, synthetic construct
  source 1..225: mol_type = other DNA
  misc_feature 1..225: note = Synthetic
atgcttcacatgggacaaaaaactctggtgccgtcacttctgtgtgcttgcggactcagaatctggtggacatatcactcactctgggatggtgggcatgggagtcagctgcacagtcactcgggaagatggaaccaatcgcagatagggctgccagtgaaccgatcacatgatgtcacccagacatcaggcatacccgactcggtccgcactagcctgaggtaa

SEQ ID NO: 6324 - DNA, 18 bp, synthetic construct
  misc_feature 1..18: note = Synthetic
  source 1..18: mol_type = other DNA
ctgtgtcgaagccagtaa

SEQ ID NO: 6325 - DNA, 36 bp, synthetic construct
  source 1..36: mol_type = other DNA
  misc_feature 1..36: note = Synthetic
ctgttcgtctccttcaggtattggcggtttacttga

SEQ ID NO: 6326 - DNA, 165 bp, synthetic construct
  misc_feature 1..165: note = Synthetic
  source 1..165: mol_type = other DNA
atgacgcagtcggtttcattagctgatttcattgtcaaaactgatgatggttatatgccaagtgacagagaatgtaaagtgcttgatagatttctgtccagagaacaaaaagcaattcgtgaagaatataaatccagaacggcgactcggtccgcactagcctga

SEQ ID NO: 6327 - DNA, 114 bp, synthetic construct
  misc_feature 1..114: note = Synthetic
  source 1..114: mol_type = other DNA
atggttatatgccaagtgacagagaatgtaaagtgcttgatagatttctgtccagagaacaaaaagcaattcgtgaagaatataaatccagaacggcgactcggtccgcactag

SEQ ID NO: 6328 - DNA, 168 bp, synthetic construct
  misc_feature 1..168: note = Synthetic
  source 1..168: mol_type = other DNA
atgtggaatgtaatgataagtttttctatgggccttgttttagggaatgtaattccgggagaaagctgtttccatcttatgataaagaaaacgctgtttgaacaagtagtgctaatattcctttttagcggaggtttgctcgactcggtccgcactagcctgaggtaa

SEQ ID NO: 6329 - DNA, 141 bp, synthetic construct
  misc_feature 1..141: note = Synthetic
  source 1..141: mol_type = other DNA
atgggccttgttttagggaatgtaattccgggagaaagctgtttccatcttatgataaagaaaacgctgtttgaacaagtagtgctaatattcctttttagcggaggtttgctcgactcggtccgcactagcctgaggtaa

SEQ ID NO: 6330 - DNA, 141 bp, synthetic construct
  misc_feature 1..141: note = Synthetic
  source 1..141: mol_type = other DNA
attgcggatggctgcatctttgtccatccttgtcacaaaggcgattttcttgttgttttttcttgttgtgttttttctgtcatggagcaaaaggtgtgggggaaagatgggcccgactcggtccgcactagcctgaggtaa

SEQ ID NO: 6331 - DNA, 78 bp, synthetic construct
  source 1..78: mol_type = other DNA
  misc_feature 1..78: note = Synthetic
atgaggatgagggcgagtacctggaagactgatggcgcgaccgtatttttgctagatgcagcaacagccacctcctga

SEQ ID NO: 6332 - DNA, 168 bp, synthetic construct
  source 1..168: mol_type = other DNA
  misc_feature 1..168: note = Synthetic
atgcagcaacagccacctcctgatcccgcaatgcgggcggcgctgcagagccagccgtccggcattaactcctcggacgattggacccaggccatgcaacgcatcatggcgctgacgacccgcaaccccgaagcctttagcgactcggtccgcactagcctgaggtaa

SEQ ID NO: 6333 - DNA, 78 bp, synthetic construct
  source 1..78: mol_type = other DNA
  misc_feature 1..78: note = Synthetic
atgaggatgagggcgagtacctggaagactgatggcgcgaccgtatttttgctaggcccagcaacagccacctcctga

SEQ ID NO: 6334 - DNA, 126 bp, synthetic construct
  misc_feature 1..126: note = Synthetic
  source 1..126: mol_type = other DNA
ctgcagagccagccgtccggcattaactcctcggacgattggacccaggccatgcaacgcatcatggcgctgacgacccgcaaccccgaagcctttagcgactcggtccgcactagcctgaggtaa

SEQ ID NO: 6335 - DNA, 183 bp, synthetic construct
  misc_feature 1..183: note = Synthetic
  source 1..183: mol_type = other DNA
atggcggaacttgtttgtgatgcactggctaccttaacccgcaacacatatggtgacaacgatgaatcagctaaattttgcagaatgtttcgaactatgataagagattctggtctatacggcaatattgaaaactggagagccgcattctacagcgactcggtccgcactagcctgaggtaa

SEQ ID NO: 6336 - DNA, 99 bp, synthetic construct
  source 1..99: mol_type = other DNA
  misc_feature 1..99: note = Synthetic
atgtttcgaactatgataagagattctggtctatacggcaatattgaaaactggagagccgcattctacagcgactcggtccgcactagcctgaggtaa

SEQ ID NO: 6337 - DNA, 174 bp, synthetic construct
  misc_feature 1..174: note = Synthetic
  source 1..174: mol_type = other DNA
atggctgaacttcttaaagtgtgttttgatgagatgatgaaaagtggaaattgtagttttgaacatctaatggagaagatgaatgacgctggaattgatttggataaatggaagcaagcttttgatggtgctagactaccacaaagaatgacgactcggtccgcactagcctga

SEQ ID NO: 6338 - DNA, 105 bp, synthetic construct
  source 1..105: mol_type = other DNA
  misc_feature 1..105: note = Synthetic
atggagaagatgaatgacgctggaattgatttggataaatggaagcaagcttttgatggtgctagactaccacaaagaatgacgactcggtccgcactagcctga

SEQ ID NO: 6339 - DNA, 192 bp, synthetic construct
  source 1..192: mol_type = other DNA
  misc_feature 1..192: note = Synthetic
attacgggcaaatccccccggttaactttgattctggcctgcggatttttgaccgtggcccttttcagcctggccctttcctttaccagtttccggcgtacctgcctctcacgggcaacctgtgacgccgactgcgatatcgcggatgaagcaacgcggttaatggccattgcgcgactcggtccgcactag

SEQ ID NO: 6340 - DNA, 192 bp, synthetic construct
  misc_feature 1..192: note = Synthetic
  source 1..192: mol_type = other DNA
attacgggcaaatccccccggttaactttgattctggcctgcggatttttgaccgtggcccttttcagcctggccctttcctttaccagtttccggcgtacctttgtctcacgggcaacctgtgacgccgactgcgatatcgcggatgaagcaacgcggttaatggccattgcgcgactcggtccgcactag

SEQ ID NO: 6341 - DNA, 180 bp, synthetic construct
  source 1..180: mol_type = other DNA
  misc_feature 1..180: note = Synthetic
attcggaaagccatgtcgacgcgacacacacagaggacgggcggacgcatctcggtccggcgcaacgaggcgagactggcccacgcgcgagcccgtgcccgcttcgactggctgctcctggcccgcggcaggccgtccaaactgtacggctacgactcggtccgcactagcctgaggtaa

SEQ ID NO: 6342 - DNA, 189 bp, synthetic construct
  misc_feature 1..189: note = Synthetic
  source 1..189: mol_type = other DNA
atagaaatctttcagacaaagatgactcaagggaaaatgactcccgaagagctaaagaaattagaacatgagtacaatcaaactgagaaggcattgacagagtcatctcagaaactgattcaagagatagatcaagctggtcaaaaccctgactccatccacgactcggtccgcactagcctgaggtaa

SEQ ID NO: 6343 - DNA, 171 bp, synthetic construct
  misc_feature 1..171: note = Synthetic
  source 1..171: mol_type = other DNA
aaggccactcaagggaaaatgactcccgaagagctaaagaaattagaacatgagtacaatcaaactgagaaggcattgacagagtcatctcagaaactgattcaagagatagatcaagctggtcaaaaccctgactccatccacgactcggtccgcactagcctgaggtaa

SEQ ID NO: 6344 - DNA, 24 bp, synthetic construct
  misc_feature 1..24: note = Synthetic
  source 1..24: mol_type = other DNA
atgggtggcaggagatggcactga

SEQ ID NO: 6345 - DNA, 72 bp, synthetic construct
  misc_feature 1..72: note = Synthetic
  source 1..72: mol_type = other DNA
atgaagcggtgcgataccccaaaggagttgataaggcctatggcaacctggacagtctttaacatttactaa

SEQ ID NO: 6346 - DNA, 39 bp, synthetic construct
  source 1..39: mol_type = other DNA
  misc_feature 1..39: note = Synthetic
atgctgcttttcgactcggtccgcactagcctgaggtaa

SEQ ID NO: 6347 - DNA, 204 bp, synthetic construct
  source 1..204: mol_type = other DNA
  misc_feature 1..204: note = Synthetic
aggaaaacgcccttcgcagcattgcccgtcaggctaattctgaaatcaaaaaaagccagacagcagtttccggataaaaacgtcgatgacatttgccgtagcgtactgaagaagcaccgcgaaacggtaacgctgatgggattcacaccgactcatttaagcctggcaatcggcatcgactcggtccgcactagcctgaggtaa

SEQ ID NO: 6348 - DNA, 24 bp, synthetic construct
  source 1..24: mol_type = other DNA
  misc_feature 1..24: note = Synthetic
atgacatttgccgtagcgtactga

SEQ ID NO: 6349 - DNA, 204 bp, synthetic construct
  misc_feature 1..204: note = Synthetic
  source 1..204: mol_type = other DNA
aggaaaacgcccttcgcagcattgcccgtcaggctaattctgaaatcaaaaaaagccagacagcagtttccggataaaaacgtcggccacatttgccgtagcgtactgaagaagcaccgcgaaacggtaacgctgatgggattcacaccgactcatttaagcctggcaatcggcatcgactcggtccgcactagcctgaggtaa

SEQ ID NO: 6350 - DNA, 21 bp, synthetic construct
  misc_feature 1..21: note = Synthetic
  source 1..21: mol_type = other DNA
atgccagaagtaagcctataa

SEQ ID NO: 6351 - DNA, 102 bp, synthetic construct
  misc_feature 1..102: note = Synthetic
  source 1..102: mol_type = other DNA
atgttttattgccttgtaatttttgtaattattttttgtctaatgctgagaagctgctttttgatcattttgatttgcacgactcggtccgcactagcctga

SEQ ID NO: 6352 - DNA, 177 bp, synthetic construct
  misc_feature 1..177: note = Synthetic
  source 1..177: mol_type = other DNA
atagaaaggatgactacgaccacgcatagcaccgccgctatcatgagcctgctggacgaggccgagtggcgacagacgcagatggacgtggggggactgatccaggcgtcggcgttgggcaaggtggcgcttcgctacgcggtgaggaacgactcggtccgcactagcctgaggtaa

SEQ ID NO: 6353 - DNA, 177 bp, synthetic construct
  misc_feature 1..177: note = Synthetic
  source 1..177: mol_type = other DNA
atagaaagggccactacgaccacgcatagcaccgccgctatcatgagcctgctggacgaggccgagtggcgacagacgcagatggacgtggggggactgatccaggcgtcggcgttgggcaaggtggcgcttcgctacgcggtgaggaacgactcggtccgcactagcctgaggtaa

SEQ ID NO: 6354 - DNA, 123 bp, synthetic construct
  source 1..123: mol_type = other DNA
  misc_feature 1..123: note = Synthetic
atgtgtattcctactagtttactgcgtaattgtatcattgatatgtatgatttatcaggattcagagagacactaaagcgtaacacttcagcgatattgccgacattaaatcatctgaattaa

SEQ ID NO: 6355 - DNA, 84 bp, synthetic construct
  source 1..84: mol_type = other DNA
  misc_feature 1..84: note = Synthetic
acggtggtttttattgaatttccagtgtatcgagccaccgtgatgcaggtacggtggttttatgtgaagtgccgctatctatag

SEQ ID NO: 6356 - DNA, 177 bp, synthetic construct
  source 1..177: mol_type = other DNA
  misc_feature 1..177: note = Synthetic
atgtatggcgatgtggccatcgtcgtgtattccggacagtacgtggaaaacggcgtcaaaaagaacttcctgccggacaacacgatggtgctggggaacactcaggcacgcggtctgcgcacctatggctgcattcaggatgcggacgcacagccgactcggtccgcactagcctga

SEQ ID NO: 6357 - DNA, 162 bp, synthetic construct
  misc_feature 1..162: note = Synthetic
  source 1..162: mol_type = other DNA
atgtggccatcgtcgtgtattccggacagtacgtggaaaacggcgtcaaaaagaacttcctgccggacaacacgatggtgctggggaacactcaggcacgcggtctgcgcacctatggctgcattcaggatgcggacgcacagccgactcggtccgcactag

SEQ ID NO: 6358 - DNA, 192 bp, synthetic construct
  misc_feature 1..192: note = Synthetic
  source 1..192: mol_type = other DNA
gtgtcctataaggggatgtatggcgatgtggccatcgtcgtgtattccggacagtacgtggaaaacggcgtcaaaaagaacttcctgccggacaacacgatggtgctggggaacactcaggcacgcggtctgcgcacctatggctgcattcaggatgcggacgcacagccgactcggtccgcactagcctga

SEQ ID NO: 6359 - DNA, 21 bp, synthetic construct
  source 1..21: mol_type = other DNA
  misc_feature 1..21: note = Synthetic
atgcaagatataaagaaataa

SEQ ID NO: 6360 - DNA, 168 bp, synthetic construct
  source 1..168: mol_type = other DNA
  misc_feature 1..168: note = Synthetic
atggacaccgagtcccacagcggcacaacatctgacattctgtaccctgaatgtcacctcaattctcctatagttaaaggaaagatagcacaactgcatacaataatgagtttgcctcagccctacgatatggatgatgacgactcggtccgcactagcctgaggtaa

SEQ ID NO: 6361 - DNA, 84 bp, synthetic construct
  misc_feature 1..84: note = Synthetic
  source 1..84: mol_type = other DNA
atagcacaactgcatacaataatgagtttgcctcagccctacgatatggatgatgacgactcggtccgcactagcctgaggtaa

SEQ ID NO: 6362 - DNA, 27 bp, synthetic construct
  source 1..27: mol_type = other DNA
  misc_feature 1..27: note = Synthetic
atgcaaagtaggaggagtcatttctga

SEQ ID NO: 6363 - DNA, 141 bp, synthetic construct
  misc_feature 1..141: note = Synthetic
  source 1..141: mol_type = other DNA
atcgcagagatgctcgttgcgctggaactcatgctgatcctgcgcgagcggcgcctgacgctcggcgcactggcaacgatgctcgcttgctcgatgccgaacttgcttccgcaggcgctgcgggaacgcgccggcttctag

SEQ ID NO: 6364 - DNA, 45 bp, synthetic construct
  misc_feature 1..45: note = Synthetic
  source 1..45: mol_type = other DNA
aggcagaagctcattttttactccttcaatatacgcaaaggatga

SEQ ID NO: 6365 - DNA, 171 bp, synthetic construct
  source 1..171: mol_type = other DNA
  misc_feature 1..171: note = Synthetic
aggatgaacgtgacgcgcctcgagcaggtcatcgggctgcagcccttccacgacatggaccgcgtcaagatcaaccgcaaggaaaactgcatcctggggaaccgctgcttcgtaaagctggccgaggtcttccacatgccgcgcgactcggtccgcactagcctgaggtaa

SEQ ID NO: 6366 - DNA, 39 bp, synthetic construct
  source 1..39: mol_type = other DNA
  misc_feature 1..39: note = Synthetic
attttttactccttcaatatacgcaaagggccaacgtga

SEQ ID NO: 6367 - DNA, 141 bp, synthetic construct
  source 1..141: mol_type = other DNA
  misc_feature 1..141: note = Synthetic
atcgggctgcagcccttccacgacatggaccgcgtcaagatcaaccgcaaggaaaactgcatcctggggaaccgctgcttcgtaaagctggccgaggtcttccacatgccgcgcgactcggtccgcactagcctgaggtaa

SEQ ID NO: 6368 - DNA, 42 bp, synthetic construct
  misc_feature 1..42: note = Synthetic
  source 1..42: mol_type = other DNA
gtggaaattgaaagcgaacccagactgttaaagctgcggtag

SEQ ID NO: 6369 - DNA, 168 bp, synthetic construct
  source 1..168: mol_type = other DNA
  misc_feature 1..168: note = Synthetic
atggtgttcccgatcgtgtgctcgacgtgcggccgcgacctgtcgcacgagcggtttctgctcatcgtgcgacagcggccgctaaaggttgttttgcggacggtgcgcaacgtctgctgccgtataaagttgtctacacaaatagagccgcgactcggtccgcactag

SEQ ID NO: 6370 - DNA, 132 bp, synthetic construct
  source 1..132: mol_type = other DNA
  misc_feature 1..132: note = Synthetic
atcatgatgagtggggggaggctcaaaaagtctcacatcaagaggtacatctcagtcagttcaaaccatcaggccagacctaattcatttgcggaatttctcaataagacttatgccagtgatacaagataa

SEQ ID NO: 6371 - DNA, 75 bp, synthetic construct
  source 1..75: mol_type = other DNA
  misc_feature 1..75: note = Synthetic
atgccagtgatacaagataaacccattcattcgtcaagatttaagaatattccgactcggtccgcactagcctga

SEQ ID NO: 6372 - DNA, 150 bp, synthetic construct
  source 1..150: mol_type = other DNA
  misc_feature 1..150: note = Synthetic
acgagccgctgctcctgctctgttgcgttggcgccagcctggcggccaaccgcctgctctcgcgcgccagcaagctcgatgccgttttctccgtgcacgccgtctttttcctgtggtttttgttccacgactcggtccgcactagcctga

SEQ ID NO: 6373 - DNA, 108 bp, synthetic construct
  misc_feature 1..108: note = Synthetic
  source 1..108: mol_type = other DNA
atgccagcccaacaaaatccgccggggtgccagtcccattcccgaaggcgtagcccgttaacttggctggcttggatggggagtacgactcggtccgcactagcctga

SEQ ID NO: 6374 - DNA, 171 bp, synthetic construct
  source 1..171: mol_type = other DNA
  misc_feature 1..171: note = Synthetic
attgcccctcttccgtctctccctccacctccagtgagtcgggatcaaggcctttgtatttcttggttggagttggctttaacctgctgtttgaacgtttatggggacataataaggtataatgtcagcatatctccacgggccgactcggtccgcactagcctgaggtaa

SEQ ID NO: 6375 - DNA, 42 bp, synthetic construct
  source 1..42: mol_type = other DNA
  misc_feature 1..42: note = Synthetic
atactctgctccccattcacgactcggtccgcactagcctga

SEQ ID NO: 6376 - DNA, 207 bp, synthetic construct
  misc_feature 1..207: note = Synthetic
  source 1..207: mol_type = other DNA
atgtgcccggcccgcgcccgcccacccgtcgtcaaaggcacgaccgtcagcggggtctggtgtgggaggacgatgactcggcagacgacagcagcgtcctggatttgggagggagtggcaacccgtttgcgcaccttcgccccaggctggggagaatgttttaaaaaaaaaaaaaaaaagcatgatgcacgactcggtccgcactag

SEQ ID NO: 6377 - DNA, 141 bp, synthetic construct
  source 1..141: mol_type = other DNA
  misc_feature 1..141: note = Synthetic
atgtggggggaagtcacgaggtacggggcggcccgtgcgggttgcttaaatgcgtggtggcgaccacgggctgtcattcctcgggaacggacggggttcccgctgcccacttccccccataaggtccgtccggtcctctaa

SEQ ID NO: 6378 - DNA, 27 bp, synthetic construct
  misc_feature 1..27: note = Synthetic
  source 1..27: mol_type = other DNA
ctggcgactcggtccgcactagcctga

SEQ ID NO: 6379 - DNA, 66 bp, synthetic construct
  source 1..66: mol_type = other DNA
  misc_feature 1..66: note = Synthetic
atgctcccgagcgacatgtcaatcctgtggagtttagtctcggttgcggttttgacagatctttga

SEQ ID NO: 6380 - DNA, 66 bp, synthetic construct
  source 1..66: mol_type = other DNA
  misc_feature 1..66: note = Synthetic
ataatgtctgtcgttccaccatcatacccttggtccagcttcaccgaggaattggtattccgataa

SEQ ID NO: 6381 - DNA, 150 bp, synthetic construct
  misc_feature 1..150: note = Synthetic
  source 1..150: mol_type = other DNA
gtgaagtccttcttgtggacacagagcctgaggagagaactctcagggtactgctccaacataaagatccaagtcatcaaggatgctcaagcacttcttcatgggctggacttctctgaagtcgactcggtccgcactagcctgaggtaa

SEQ ID NO: 6382 - DNA, 63 bp, synthetic construct
  misc_feature 1..63: note = Synthetic
  source 1..63: mol_type = other DNA
atgctcaagcacttcttcatgggctggacttctctgaagtcgactcggtccgcactagcctga

SEQ ID NO: 6383 - DNA, 168 bp, synthetic construct
  source 1..168: mol_type = other DNA
  misc_feature 1..168: note = Synthetic
atgtctgcccccggatgctctgaaagacaggataagaagcgaggcactattggggagagagaatttggagaattgctgagctgggaccccactgaccttccccggacggtggcccgcgtctacgtggcggtgggaggtctcgactcggtccgcactagcctgaggtaa

SEQ ID NO: 6384 - DNA, 168 bp, synthetic construct
  source 1..168: mol_type = other DNA
  misc_feature 1..168: note = Synthetic
atgtctgcccccggatgctctgaaagacaggataagaagcgagtcactattggggagacagaatttggacaattgctgagctgggaccccactgaccttccccggacggtggcccgcgtctacgtggcggtgggaggcctcgactcggtccgcactagcctgaggtaa

SEQ ID NO: 6385 - DNA, 168 bp, synthetic construct
  misc_feature 1..168: note = Synthetic
  source 1..168: mol_type = other DNA
atgtctgcccccggatgctctgaaagacaggataagaagcgagtcactattggggagagagaatttggagaattgctgagctgggaccccactgaccttccccggacggtggcccgcgtctacgtggcggtgggaggtctcgactcggtccgcactagcctgaggtaa

SEQ ID NO: 6386 - DNA, 24 bp, synthetic construct
  misc_feature 1..24: note = Synthetic
  source 1..24: mol_type = other DNA
aagaagataacagtcaatcaataa

SEQ ID NO: 6387 - DNA, 99 bp, synthetic construct
  source 1..99: mol_type = other DNA
  misc_feature 1..99: note = Synthetic
atagaccagttaaaacgaaagaccgatactgttataaagcggaacttaacaggtcaaagtattaccatgacgtacacgactcggtccgcactagcctga

SEQ ID NO: 6388 - DNA, 102 bp, synthetic construct
  misc_feature 1..102: note = Synthetic
  source 1..102: mol_type = other DNA
atgagcaaaaaaccatcagagagatttcggccatcattggactttgtgcatatgctgctacttactggggaggtgaagaccatcccactagtaacagtctga

SEQ ID NO: 6389 - DNA, 150 bp, synthetic construct
  source 1..150: mol_type = other DNA
  misc_feature 1..150: note = Synthetic
atttcggccatcattggactttgtgcatatgctgctacttactggggaggtgaagaccatcccactagtaacagtctgaacgcattgtttgtgatgcttgggatgctcaattacatggattataccatcatattctggcgtatgaattga

SEQ ID NO: 6390 - DNA, 105 bp, synthetic construct
  misc_feature 1..105: note = Synthetic
  source 1..105: mol_type = other DNA
atggatgacccggagagagaagtgttagagtggaggtttgacagccgcctagcatttcatcacgtggcccgagagctgcatccggagtacttcaagaactgctga

SEQ ID NO: 6391 - DNA, 42 bp, synthetic construct
  source 1..42: mol_type = other DNA
  misc_feature 1..42: note = Synthetic
atgaggacattttcccaatctccctcagacgcccgttcctga

SEQ ID NO: 6392 - DNA, 105 bp, synthetic construct
  misc_feature 1..105: note = Synthetic
  source 1..105: mol_type = other DNA
atggtacttcttctatgttgtcatccggggccgggagacccggcctgtccttgtccattttgtctgcaacgaaagtgtgactcaccacgactcggtccgcactag

SEQ ID NO: 6393 - DNA, 93 bp, synthetic construct
  misc_feature 1..93: note = Synthetic
  source 1..93: mol_type = other DNA
atggtgaaaacacggttgattttgcggttgaaatttgggccaagccttccgaaaagggcaacactggttatgaatatggtgtcaagccgctga

SEQ ID NO: 6394 - DNA, 51 bp, synthetic construct
  misc_feature 1..51: note = Synthetic
  source 1..51: mol_type = other DNA
atgtatatgctctcttttctgacgttagtctccgacggcaggcttcaatga

SEQ ID NO: 6395 - DNA, 147 bp, synthetic construct
  source 1..147: mol_type = other DNA
  misc_feature 1..147: note = Synthetic
atgacccaggctgagaaattcccggaccctttttgctcaagagcgatgttaatttgttcaatcatttggttaggaaagcggatgttgcgggttgttgttctgcgggttctgttcttcggccacacgactcggtccgcactagcctga

SEQ ID NO: 6396 - DNA, 168 bp, synthetic construct
  source 1..168: mol_type = other DNA
  misc_feature 1..168: note = Synthetic
atgagagccgatcgggaagaactggatttcctgccaccagttggaggattggctgttgatgtgatggaagtagaagtttctgcggcgcgccgagcattcgtgtttgtgcttgtacagacggccgcagtagtcgcagcgttcgactcggtccgcactagcctgaggtaa

SEQ ID NO: 6397 - DNA, 171 bp, synthetic construct
  source 1..171: mol_type = other DNA
  misc_feature 1..171: note = Synthetic
agggccagagccgatcgggaagaactggatttcctgccaccagttggaggattggctgttgatgtgatggaagtagaagtttctgcggcgcgccgagcattcgtgtttgtgcttgtacagacggccgcagtagtcgcagcgttcgactcggtccgcactagcctgaggtaa

SEQ ID NO: 6398 - DNA, 48 bp, synthetic construct
  misc_feature 1..48: note = Synthetic
  source 1..48: mol_type = other DNA
atggagttgactcaaaaacggagaagcaaactatatttgatcaactga

SEQ ID NO: 6399 - DNA, 63 bp, synthetic construct
  misc_feature 1..63: note = Synthetic
  source 1..63: mol_type = other DNA
atggccaaattccggatgaagtacttccagatttactacaactggctgaaattaatggactaa

SEQ ID NO: 6400 - DNA, 147 bp, synthetic construct
  misc_feature 1..147: note = Synthetic
  source 1..147: mol_type = other DNA
atgacccaggctgagaaattcccggaccctttttgctcaagagcgatgttaatttgttcaatcatttggttaggaaagcggatgttgcgggttgttgttctgcgggttctgttcttcgttgacacgactcggtccgcactagcctga

SEQ ID NO: 6401 - DNA, 96 bp, synthetic construct
  source 1..96: mol_type = other DNA
  misc_feature 1..96: note = Synthetic
atttgttcaatcatttggttaggaaagcggatgttgcgggttgttgttctgcgggttctgttcttcgttgacacgactcggtccgcactagcctga

SEQ ID NO: 6402 - DNA, 51 bp, synthetic construct
  misc_feature 1..51: note = Synthetic
  source 1..51: mol_type = other DNA
atgtatatgctctcttttctggccttagtctccgacggcaggcttcaatga

SEQ ID NO: 6403 - DNA, 216 bp, synthetic construct
  source 1..216: mol_type = other DNA
  misc_feature 1..216: note = Synthetic
aggaaaggtaccatcactgcaaagggctccgaaatcagggtactagacatggccgcatttacagatgaagaaatagacaacatcctttcatctagcgggatcgtgatagacgaaataattactgcagaaggaccaccaagtgggacagtggggaaaagctccattcctcataatgccacaagaaacaacgactcggtccgcactagcctgaggtaa

SEQ ID NO: 6404 - DNA, 39 bp, synthetic construct
  misc_feature 1..39: note = Synthetic
  source 1..39: mol_type = other DNA
atgccacaagaaacaacgactcggtccgcactagcctga

SEQ ID NO: 6405 - DNA, 201 bp, synthetic construct
  misc_feature 1..201: note = Synthetic
  source 1..201: mol_type = other DNA
ttggccataatcaagtacacataccaaaacaaagtggtaaaggtccttagaccagctgaaaaagggaaaacagttatggacattatttcgagacaagaccaaagggggagcggacaagttgtcacttacgctcttaacacatttaccaacctagtggtgcaactcattcggaatatggaggctcgactcggtccgcactag

SEQ ID NO: 6406 - DNA, 201 bp, synthetic construct
  source 1..201: mol_type = other DNA
  misc_feature 1..201: note = Synthetic
ttggccataatcaagtacacataccaaaacaaagtggtaaaggtccttagaccagctgaaaaagggaaaacagttatggacattatttcgagacaagaccaaagggggagcggacaagttgtcacttacgctcttaacacatttaccaacctagtggtgcaactcattcggaatgccgaggctcgactcggtccgcactag

SEQ ID NO: 6407 - DNA, 222 bp, synthetic construct
  misc_feature 1..222: note = Synthetic
  source 1..222: mol_type = other DNA
ttggactacgaccgaccacacgacatgcaggcttctgagccgcgaatccccaccatggcgttgggggctgggcatgcccacgcatgcagggatgacggagatgatagcgtgattgacgccccgcccccatacgagagtgtggccggcgcgagcgcgggccagtttgtcgttattgatatcgacacccccacggacgactcggtccgcactagcctgaggtaa

SEQ ID NO: 6408 - DNA, 204 bp, synthetic construct
  misc_feature 1..204: note = Synthetic
  source 1..204: mol_type = other DNA
atgtcactaatagggacgctcgagaagtacctctcagcacttgaagaaataaaaacaaaaggaggactacaaaaaatacatgatgatttgctacatgaattagacatgtttattgatgatatagacattaaagaagagaaagaaaccaaaattttgttcgaaaaaataagcagactattaaaaaagcgactcggtccgcactag

SEQ ID NO: 6409 - DNA, 180 bp, synthetic construct
  source 1..180: mol_type = other DNA
  misc_feature 1..180: note = Synthetic
aagtacctctcagcacttgaagaaataaaaacaaaaggaggactacaaaaaatacatgatgatttgctacatgaattagacatgtttattgatgatatagacattaaagaagagaaagaaaccaaaattttgttcgaaaaaataagcagactattaaaaaagcgactcggtccgcactag

SEQ ID NO: 6410 - DNA, 168 bp, synthetic construct
  misc_feature 1..168: note = Synthetic
  source 1..168: mol_type = other DNA
atgtccattcttatctcgcccagtaataacaccggttggggtctgcgcgctccaagcaagatgtacggaggcgcacgcaaacgttctacccaacatcctgtccgtgttcgcggacattttcgcgctccatggggcgccctcgactcggtccgcactagcctgaggtaa

SEQ ID NO: 6411 - DNA, 156 bp, synthetic construct
  misc_feature 1..156: note = Synthetic
  source 1..156: mol_type = other DNA
atctcgcccagtaataacaccggttggggtctgcgcgctccaagcaagatgtacggaggcgcacgcaaacgttctacccaacatcctgtccgtgttcgcggacattttcgcgctccatggggcgccctcgactcggtccgcactagcctgaggtaa

SEQ ID NO: 6412 - DNA, 216 bp, synthetic construct
  misc_feature 1..216: note = Synthetic
  source 1..216: mol_type = other DNA
aagcgctgcaagatggaagtgattgaaaagctcgagacaattagagaaacgttaaatgacacaaaagataaaaaagatttccaaaaaattcatgatgaactagttcaatatcttgacggtatagatccactgactatcgatgatgataaatggaatgaaatccttaaactttttaaaattatcatagtaaagtcgactcggtccgcactagcctga

SEQ ID NO: 6413 - DNA, 198 bp, synthetic construct
  misc_feature 1..198: note = Synthetic
  source 1..198: mol_type = other DNA
gtgattgaaaagctcgagacaattagagaaacgttaaatgacacaaaagataaaaaagatttccaaaaaattcatgatgaactagttcaatatcttgacggtatagatccactgactatcgatgatgataaatggaatgaaatccttaaactttttaaaattatcatagtaaagtcgactcggtccgcactagcctga

SEQ ID NO: 6414 - DNA, 84 bp, synthetic construct
  source 1..84: mol_type = other DNA
  misc_feature 1..84: note = Synthetic
atgaagacatttttaaattatcaaatttacaacaacgtgaaatatacgcaattacaaatgagaggactaaatcgattctgctga

SEQ ID NO: 6415 - DNA, 51 bp, synthetic construct
  source 1..51: mol_type = other DNA
  misc_feature 1..51: note = Synthetic
atgagccaaaagataaagttgctcgactcggtccgcactagcctgaggtaa

SEQ ID NO: 6416 - DNA, 189 bp, synthetic construct
  source 1..189: mol_type = other DNA
  misc_feature 1..189: note = Synthetic
ataaaactgaaaatcaaaatgtccaacatggatattgacagtataaataccggaacaatcgataaaacaccagaagaactgactcccggaaccagtggggcaaccagaccaatcatcaagccagcaacccttgctccgccaagcaacaaacgaacccgaaacgactcggtccgcactagcctgaggtaa

SEQ ID NO: 6417 - DNA, 183 bp, synthetic construct
  source 1..183: mol_type = other DNA
  misc_feature 1..183: note = Synthetic
ctgaaaatcaaagcctccaacatggatattgacagtataaataccggaacaatcgataaaacaccagaagaactgactcccggaaccagtggggcaaccagaccaatcatcaagccagcaacccttgctccgccaagcaacaaacgaacccgaaacgactcggtccgcactagcctgaggtaa

SEQ ID NO: 6418 - DNA, 51 bp, synthetic construct
  source 1..51: mol_type = other DNA
  misc_feature 1..51: note = Synthetic
aagcagaagcaccccaagaaagtgaagcaggcctttaaccccctcatttaa

SEQ ID NO: 6419 - DNA, 168 bp, synthetic construct
  misc_feature 1..168: note = Synthetic
  source 1..168: mol_type = other DNA
atgttctcgtgcaagcagcacctgtccctgggggcctgtgtcttctgtctcggcctcctggccagcacccccttcatttggtgctttgtctttgccaacctgctctctctggagatcttctcaccgtggcagacacacgtcgactcggtccgcactagcctgaggtaa

SEQ ID NO: 6420 - DNA, 156 bp, synthetic construct
  source 1..156: mol_type = other DNA
  misc_feature 1..156: note = Synthetic
aagcagcacctgtccctgggggcctgtgtcttctgtctcggcctcctggccagcacccccttcatttggtgctttgtctttgccaacctgctctctctggagatcttctcaccgtggcagacacacgtcgactcggtccgcactagcctgaggtaa

SEQ ID NO: 6421 - DNA, 117 bp, synthetic construct
  source 1..117: mol_type = other DNA
  misc_feature 1..117: note = Synthetic
atgaaaaaaagtacaccctcggtgtttcagcgtaccgcaaacggccttcgtcagcgtctgagaggatataaacctctgactcaatcgctagacatcagtccggaaacgggggagtga

SEQ ID NO: 6422 - DNA, 117 bp, synthetic construct
  source 1..117: mol_type = other DNA
  misc_feature 1..117: note = Synthetic
ctgaaaaaaagtacaccctcggtgtttcagcgtaccgcaaacggccttcgtcagcgtctgagaggatataaacctctgactcaatcgctagacatcagtccggaaacgggggagtga

SEQ ID NO: 6423 - DNA, 204 bp, synthetic construct
  misc_feature 1..204: note = Synthetic
  source 1..204: mol_type = other DNA
ataacagccgaaataaacccatatctactcatgttaaacaatgatataacgtcaatgatatcattgacatacccatatactggggcacctcctatgtcacatggaacatcgaccaaatactcaatggagactgtgtcaagaacttactcctacagtagaactaaaaaagaggtaccttcggcgactcggtccgcactagcctga

SEQ ID NO: 6424 - DNA, 189 bp, synthetic construct
  source 1..189: mol_type = other DNA
  misc_feature 1..189: note = Synthetic
acgctcgcaaaagagtatgcaaatctcacaaaggataagaaatcatgcaaattgctgtcgcaagggaccgtgtcaagctacaccacttttaagaaatggacaacatcgagaaaagagaaaaacccatcccttcgaatgagatgggcaatgggaagcaagttcccaattatgcgactcggtccgcactag

SEQ ID NO: 6425 - DNA, 129 bp, synthetic construct
  source 1..129: mol_type = other DNA
  misc_feature 1..129: note = Synthetic
atgccgactcaacaaaagcccaaacgcctgaagagcagagagcaaagaatgccaaaaccatccttgagaacatacagatatatgaaaggatgtgtgatctctttggggtgtcagaagatgacaaactga

SEQ ID NO: 6426 - DNA, 225 bp, synthetic construct
  misc_feature 1..225: note = Synthetic
  source 1..225: mol_type = other DNA
ttggatccgaggaaaggtaccatcactgcaaagggctccgaaatcagggtactagacgccgccgcatttacagatgaagaaatagacaacatcctttcatctagcgggatcgtgatagacgaaataattactgcagaaggaccaccaagtgggacagtggggaaaagctccattcctcataatgccacaagaaacaacgactcggtccgcactagcctgaggtaa

SEQ ID NO: 6427 - DNA, 24 bp, synthetic construct
  misc_feature 1..24: note = Synthetic
  source 1..24: mol_type = other DNA
ctgcgaagggcgttttcctgctga

SEQ ID NO: 6428 - DNA, 69 bp, synthetic construct
  misc_feature 1..69: note = Synthetic
  source 1..69: mol_type = other DNA
atgaagcccgctgccagaaaaatgcattccgtggttgtcatacctggtctccgactcggtccgcactag

SEQ ID NO: 6429 - DNA, 27 bp, synthetic construct
  source 1..27: mol_type = other DNA
  misc_feature 1..27: note = Synthetic
atgctgcgagccgcgttttcctgctga

SEQ ID NO: 6430 - DNA, 168 bp, synthetic construct
  source 1..168: mol_type = other DNA
  misc_feature 1..168: note = Synthetic
atggctcaatccaaggaagtgccaagcttcagatggacccagtctcttagaaagggattgagtcaattcacccaaacagtcaagtcagatattttaaaggacgctaagctgattgccgacagcattgacttcaaccaggtcgactcggtccgcactagcctgaggtaa

SEQ ID NO: 6431 - DNA, 111 bp, synthetic construct
  misc_feature 1..111: note = Synthetic
  source 1..111: mol_type = other DNA
ttgagtcaattcacccaaacagtcaagtcagatattttaaaggacgctaagctgattgccgacagcattgacttcaaccaggtcgactcggtccgcactagcctgaggtaa

SEQ ID NO: 6432 - DNA, 195 bp, synthetic construct
  source 1..195: mol_type = other DNA
  misc_feature 1..195: note = Synthetic
ataccgccaggaaggcgagctccagcgatgtcatttagggagctgattttgtaccacctggtgcgatacctggccacagagaacgacgccttcctggtccagtttgtctcgctgtgccgttccttctccgtggacgtgccagcgctactagcgcgcttttccacgcccgactcggtccgcactagcctgaggtaa

SEQ ID NO: 6433 - DNA, 69 bp, synthetic construct
  source 1..69: mol_type = other DNA
  misc_feature 1..69: note = Synthetic
acgacgccttcctggtccagtttgtctcgctgtgccgttccttctccgtggacgtgccagcgctactag

SEQ ID NO: 6434 - DNA, 168 bp, synthetic construct
  misc_feature 1..168: note = Synthetic
  source 1..168: mol_type = other DNA
atggagagtcgggcccacaaagcatggatgacgcacaccgcatcaggtttcgaaacagattaccataagattttaacagcaggattgtcagtccaacaaggcattgtgagacaacgggtcattcaagtccaccaggttaccgactcggtccgcactagcctgaggtaa

SEQ ID NO: 6435 - DNA, 39 bp, synthetic construct
  misc_feature 1..39: note = Synthetic
  source 1..39: mol_type = other DNA
atgagctattccgactcggtccgcactagcctgaggtaa

SEQ ID NO: 6436 - DNA, 51 bp, synthetic construct
  misc_feature 1..51: note = Synthetic
  source 1..51: mol_type = other DNA
atcacgtattcgccgccaaagaactccatgagcgcgctcaccagctcgtaa

SEQ ID NO: 6437 - DNA, 126 bp, synthetic construct
  misc_feature 1..126: note = Synthetic
  source 1..126: mol_type = other DNA
atgccaagcacgtcgaccacgttcttcttggtgaaaagtgaaagaatattgaccctcaaaatagggtacttgtcctccaagtgggacaggatcgtgttcgactcggtccgcactagcctgaggtaa

SEQ ID NO: 6438 - DNA, 210 bp, synthetic construct
  misc_feature 1..210: note = Synthetic
  source 1..210: mol_type = other DNA
atggactcctttcaatttttcagttggttactgaaggatattgaaaggaatctactgtacaccagtttggtatatacaagtccaagaattgcaatagttcgatatgaagaaagtgaaaaatcaagattatggaaatcgaaagaaactaacgttttatctccagaggaaattctgagcaagatcaaagataagcgactcggtccgcactag

SEQ ID NO: 6439 - DNA, 72 bp, synthetic construct
  misc_feature 1..72: note = Synthetic
  source 1..72: mol_type = other DNA
atgaagaaagtgaaaaatcaagattatggaaatcgaaagaaactaacgttttatctccagaggaaattctga

SEQ ID NO: 6440 - DNA, 186 bp, synthetic construct
  misc_feature 1..186: note = Synthetic
  source 1..186: mol_type = other DNA
atggcagcgacccttgccgcaagtgttgaagcaaacgccgcgcaacaaatcgcggaacattcggaacaggtacaaactcaagaggaaaaaatatcatggctggaaaatcaagtaatgatgatggcgtcaaatttgcaggcgatgcaggaagcactaacagtatcgactcggtccgcactagcctga

SEQ ID NO: 6441 - DNA, 186 bp, synthetic construct
  source 1..186: mol_type = other DNA
  misc_feature 1..186: note = Synthetic
atggcagcgacccttgccgcaagtgttgaagcaaacgccgcgcaacaaatcgcggaacattcggaacaggtacaaactcaagaggaaaaagcctcatggctggaaaatcaagtaatgatgatggcgtcaaatttgcaggcgatgcaggaagcactaacagtatcgactcggtccgcactagcctga

SEQ ID NO: 6442 - DNA, 207 bp, synthetic construct
  misc_feature 1..207: note = Synthetic
  source 1..207: mol_type = other DNA
atttttgacgcaatggcacaagaacaactacttgctgaacttgagggatacctcagaggagttaacccaatgaccaggcaaacgattatgaagtctgcaagaggtgggatggatagtgctaaggaggcagcaaaagcagcgaagaagggagaaatgcaactaacaagtggagagagcatagtggcgactcggtccgcactagcctga

SEQ ID NO: 6443 - DNA, 138 bp, synthetic construct
  source 1..138: mol_type = other DNA
  misc_feature 1..138: note = Synthetic
atgaccaggcaaacgattatgaagtctgcaagaggtgggatggatagtgctaaggaggcagcaaaagcagcgaagaagggagaaatgcaactaacaagtggagagagcatagtggcgactcggtccgcactagcctga

SEQ ID NO: 6444 - DNA, 204 bp, synthetic construct
  source 1..204: mol_type = other DNA
  misc_feature 1..204: note = Synthetic
atgtcactactattaacgctcgcaaaagagtatgcaaatctcacaaaggataagaaatcatgcaaattgctgtcgcaagggaccgtgtcaagctacaccacttttaagaaatggacaacatcgagaaaagagaaaaacccatcccttcgaatgagatgggcaatgggaagcaagttcccaattatgcgactcggtccgcactag

SEQ ID NO: 6445 - DNA, 198 bp, synthetic construct
  misc_feature 1..198: note = Synthetic
  source 1..198: mol_type = other DNA
atggaaataaacccatatctactcatgttaaacaatgatataacgtcaatgatatcattgacatacccatatactggggcacctcctatgtcacatggaacatcgaccaaatactcaatggagactgtgtcaagaacttactcctacagtagaactaaaaaagaggtaccttcggcgactcggtccgcactagcctga

SEQ ID NO: 6446 - DNA, 153 bp, synthetic construct
  source 1..153: mol_type = other DNA
  misc_feature 1..153: note = Synthetic
ataatgatatctgcgtgttggagtgatgatatccgacctactccgattgggccccaatcgcttgaggggacacgcgctacgtttatggctcagacttgcgtcgggaacgataagaccagtagggccgactcggtccgcactagcctgaggtaa

SEQ ID NO: 6447 - DNA, 30 bp, synthetic construct
  source 1..30: mol_type = other DNA
  misc_feature 1..30: note = Synthetic
atgaagcaaagaatgataaaaagaagataa

SEQ ID NO: 6448 - DNA, 24 bp, synthetic construct
  misc_feature 1..24: note = Synthetic
  source 1..24: mol_type = other DNA
atggagaccatgaaagaacaatga

SEQ ID NO: 6449 - DNA, 48 bp, synthetic construct
  misc_feature 1..48: note = Synthetic
  source 1..48: mol_type = other DNA
atgaatatacccttgaggatgagacaaccccgactcggtccgcactag

SEQ ID NO: 6450 - DNA, 225 bp, synthetic construct
  misc_feature 1..225: note = Synthetic
  source 1..225: mol_type = other DNA
atagcgaccgagacactgcccaataaacacacccagatcacccacataatctctagcatgaagatcttatttgctaccctgctagtagtgaccacccctcacttagtcactggccagatccactggggcaatctttcgaaaattggagtcgtagggacgggtagtgctagttacaaggtgatgacccaatcgagtcacgactcggtccgcactagcctgaggtaa

SEQ ID NO: 6451 - DNA, 225 bp, synthetic construct
  source 1..225: mol_type = other DNA
  misc_feature 1..225: note = Synthetic
atagcgaccgagacactgcccaataaacacacccagatcacccacataatctctagcgccaagatcttatttgctaccctgctagtagtgaccacccctcacttagtcactggccagatccactggggcaatctttcgaaaattggagtcgtagggacgggtagtgctagttacaaggtgatgacccaatcgagtcacgactcggtccgcactagcctgaggtaa

SEQ ID NO: 6452 - DNA, 198 bp, synthetic construct
  misc_feature 1..198: note = Synthetic
  source 1..198: mol_type = other DNA
acgaggaagtgcgtcggtccctggtctacgatgcaacgcgacagacggtatcgctgcagactggctccttacaatcgtcaccagctaccaccttgtgaggaccgcggcagtgctgttgtagaggagaactctcggtacttagaatgtgaaaatatgaacatgcacaatggcgactcggtccgcactagcctgaggtaa

SEQ ID NO: 6453 - DNA, 198 bp, synthetic construct
  source 1..198: mol_type = other DNA
  misc_feature 1..198: note = Synthetic
acgaggaagtgcgtcggtccctggtctacgatgcaacgcgacagacggtatcgctgcagactggctccttacaatcgtcaccagctaccaccttgtgaggaccgcggcagtgctgttgtagaggagaactctcggtacttagaatgtgaaaatatgaacatgcacaatgtcgactcggtccgcactagcctgaggtaa

SEQ ID NO: 6454 - DNA, 198 bp, synthetic construct
  source 1..198: mol_type = other DNA
  misc_feature 1..198: note = Synthetic
acgaggaagtgcgtcggtccctggtctacggcccaacgcgacagacggtatcgctgcagactggctccttacaatcgtcaccagctaccaccttgtgaggaccgcggcagtgctgttgtagaggagaactctcggtacttagaatgtgaaaatatgaacatgcacaatggcgactcggtccgcactagcctgaggtaa

SEQ ID NO: 6455 - DNA, 198 bp, synthetic construct
  source 1..198: mol_type = other DNA
  misc_feature 1..198: note = Synthetic
acgaggaagtgcgtcggtccctggtctacggcccaacgcgacagacggtatcgctgcagactggctccttacaatcgtcaccagctaccaccttgtgaggaccgcggcagtgctgttgtagaggagaactctcggtacttagaatgtgaaaatatgaacatgcacaatgtcgactcggtccgcactagcctgaggtaa

SEQ ID NO: 6456 - DNA, 210 bp, synthetic construct
  misc_feature 1..210: note = Synthetic
  source 1..210: mol_type = other DNA
aagagagcttattccagcatgcagtttttgggtgctagctttggagcattaaagttttcccttacgcttgccagtcccacgcttagccctggctctgaattgtcagctgtagtggcccaggacttaagtgactttttgcagctgacattgaggcgcgagctcagggcggagggcagaaccttcgactcggtccgcactagcctgaggtaa

SEQ ID NO: 6457 - DNA, 36 bp, synthetic construct
  source 1..36: mol_type = other DNA
  misc_feature 1..36: note = Synthetic
ttgcattgcttcgcgactcggtccgcactagcctga

SEQ ID NO: 6458 - DNA, 39 bp, synthetic construct
  source 1..39: mol_type = other DNA
  misc_feature 1..39: note = Synthetic
atgcagtccttcagccgcaaaattactaacagtatctga

SEQ ID NO: 6459 - DNA, 105 bp, synthetic construct
  misc_feature 1..105: note = Synthetic
  source 1..105: mol_type = other DNA
atgttccacctaataactgatactctaatagtgatacttattttatctaattgtgtagagtggtcacaaggtcagatcgactcggtccgcactagcctgaggtaa

SEQ ID NO: 6460 - DNA, 201 bp, synthetic construct
  source 1..201: mol_type = other DNA
  misc_feature 1..201: note = Synthetic
atggatgtacttttttctatagcgaaaactgtgtcagatcttaaaaagaaagttgtggttggaacaatttatactaatgtagaagatgttgtacaacagacgaatgaattgattagaactttaaatggaaatatttttcatactggtggcattggaacacagcctcagaaagagtggacgactcggtccgcactagcctga

SEQ ID NO: 6461 - DNA, 27 bp, synthetic construct
  misc_feature 1..27: note = Synthetic
  source 1..27: mol_type = other DNA
atgttgtacaacagacgaatgaattga

SEQ ID NO: 6462 - DNA, 171 bp, synthetic construct
  misc_feature 1..171: note = Synthetic
  source 1..171: mol_type = other DNA
gtgtcagatcttaaaaagaaagttgtggttggaacaatttatactaatgtagaagatgttgtacaacagacgaatgaattgattagaactttaaatggaaatatttttcatactggtggcattggaacacagcctcagaaagagtggacgactcggtccgcactagcctga

SEQ ID NO: 6463 - DNA, 219 bp, synthetic construct
  source 1..219: mol_type = other DNA
  misc_feature 1..219: note = Synthetic
aggctcggaacggctgcaaacgtgatcgagctacctgttgcctcaatggcagacgattccagcttcaccttgacaagaaagaaaactaataaaaaagagaaggaaaaaaacgtcacaagaggtcaaaggatgaattttgaagaagaagatgtttcagtagctggtgaaaccgacactaagagcattgccaccgactcggtccgcactagcctgaggtaa

SEQ ID NO: 6464 - DNA, 150 bp, synthetic construct
  source 1..150: mol_type = other DNA
  misc_feature 1..150: note = Synthetic
ttgacaagaaagaaaactaataaaaaagagaaggaaaaaaacgtcacaagaggtcaaaggatgaattttgaagaagaagatgtttcagtagctggtgaaaccgacactaagagcattgccaccgactcggtccgcactagcctgaggtaa

SEQ ID NO: 6465 - DNA, 15 bp, synthetic construct
  misc_feature 1..15: note = Synthetic
  source 1..15: mol_type = other DNA
ctgaaaattatataa

SEQ ID NO: 6466 - DNA, 66 bp, synthetic construct
  misc_feature 1..66: note = Synthetic
  source 1..66: mol_type = other DNA
ttgataagagaaatgttgaccaatcaattaaagaataccgactcggtccgcactagcctgaggtaa

SEQ ID NO: 6467 - DNA, 78 bp, synthetic construct
  source 1..78: mol_type = other DNA
  misc_feature 1..78: note = Synthetic
atggccggcatcttaggggactcaacccttggcaatgacagtctgagagcatacaacgacaaggatcttctcaactga

SEQ ID NO: 6468 - DNA, 48 bp, synthetic construct
  misc_feature 1..48: note = Synthetic
  source 1..48: mol_type = other DNA
atgcaaagcgccattataaaaaactcgactcggtccgcactagcctga

SEQ ID NO: 6469 - DNA, 174 bp, synthetic construct
  misc_feature 1..174: note = Synthetic
  source 1..174: mol_type = other DNA
gtggagcggattctgaaagaagaatccgatgaggcacttaaaatgaccatggcctctgtacctgcgtcgcgttacctaaccgacatgactcttgaggaaatgtcaagggaatggtccatgctcatacccaagcagaaagtggcaggcgactcggtccgcactagcctgaggtaa

SEQ ID NO: 6470 - DNA, 132 bp, synthetic construct
  source 1..132: mol_type = other DNA
  misc_feature 1..132: note = Synthetic
atgaccatggcctctgtacctgcgtcgcgttacctaaccgacatgactcttgaggaaatgtcaagggaatggtccatgctcatacccaagcagaaagtggcaggcgactcggtccgcactagcctgaggtaa

SEQ ID NO: 6471 - DNA, 165 bp, synthetic construct
  source 1..165: mol_type = other DNA
  misc_feature 1..165: note = Synthetic
attagcatgcacggcccggcccccgatttgggggcccaacccggtgtcccccaaagaaccccattagcatgcccctcccgccgacgcaacaggggcttggcctgcgtcggtgccccggggcttcccgccttcccgaagaaaccgactcggtccgcactagcctga

SEQ ID NO: 6472 - DNA, 168 bp, synthetic construct
  misc_feature 1..168: note = Synthetic
  source 1..168: mol_type = other DNA
atgcgagccgatcgggaagaactggatctcccgccaccagttggaggagtggctgttgatgtggtgaaagtagaagtccctgcgacgggccgaacactcgtgctggcttttgtaaaaacgtgcgcagtactggcagcggtcgactcggtccgcactagcctgaggtaa

SEQ ID NO: 6473 - DNA, 162 bp, synthetic construct
  misc_feature 1..162: note = Synthetic
  source 1..162: mol_type = other DNA
atcaaaaacctgaaagcgctgctgctgcagcacgagtctttgttggcgcgcgagctgcccggcgagcacgccgcggtcttcgtggacttcatgggtgtttacattgccgcggcgtattccgccggcagcgcgcgcgactcggtccgcactagcctgaggtaa

SEQ ID NO: 6474 - DNA, 36 bp, synthetic construct
  misc_feature 1..36: note = Synthetic
  source 1..36: mol_type = other DNA
atgattacaccaacgactcggtccgcactagcctga

SEQ ID NO: 6475 - DNA, 186 bp, synthetic construct
  misc_feature 1..186: note = Synthetic
  source 1..186: mol_type = other DNA
atgctgatagaagccggactgagtacctacgagaaagagtgcgcaaaacgcggtgacgactatcaggaaatttttgcccagcaggtccgtgaaacgatggagcgccgtgcagccggtcttaaaccgcccgcctgggcggctgcagcatttgaatccgggctgccgactcggtccgcactagcctga

SEQ ID NO: 6476 - DNA, 30 bp, synthetic construct
  source 1..30: mol_type = other DNA
  misc_feature 1..30: note = Synthetic
atggtgccaaagaagttcaggaagcggtga

SEQ ID NO: 6477 - DNA, 168 bp, synthetic construct
  misc_feature 1..168: note = Synthetic
  source 1..168: mol_type = other DNA
atggatcacgcgctcttcacacacttcgtcggccgaccccgtcactgtcggttggaaatgttgattctggacgaacaggtgtctaagagatcctgggacaccacggtttaccacaggcgccgcaaacatctacctcgacgcgactcggtccgcactagcctgaggtaa

SEQ ID NO: 6478 - DNA, 174 bp, synthetic construct
  misc_feature 1..174: note = Synthetic
  source 1..174: mol_type = other DNA
acgagcgccgatcacgcgctcttcacacacttcgtcggccgaccccgtcactgtcggttggaaatgttgattctggacgaacaggtgtctaagagatcctgggacaccacggtttaccacaggcgccgcaaacatctacctcgacgcgactcggtccgcactagcctgaggtaa

SEQ ID NO: 6479 - DNA, 213 bp, synthetic construct
  source 1..213: mol_type = other DNA
  misc_feature 1..213: note = Synthetic
atagggccaatcttgctttgcacaaattgcgagaaaaccgccttgacaaaatccgctcccatccaaccagacatacccgccgccatgcctagccagtgcggcgataaatccatagcggccccgcctagcgttaccatcaagcccacaaatgcggcgcttaccgcttcaaccgcaaattcaagtttcgactcggtccgcactagcctgaggtaa

SEQ ID NO: 6480 - DNA, 213 bp, synthetic construct
  source 1..213: mol_type = other DNA
  misc_feature 1..213: note = Synthetic
atagggccaatcttgctttgcacaagccgcgagaaaaccgccttgacaaaatccgctcccatccaaccagacatacccgccgccatgcctagccagtgcggcgataaatccatagcggccccgcctagcgttaccatcaagcccacaaatgcggcgcttaccgcttcaaccgcaaattcaagtttcgactcggtccgcactagcctgaggtaa

SEQ ID NO: 6481 - DNA, 168 bp, synthetic construct
  source 1..168: mol_type = other DNA
  misc_feature 1..168: note = Synthetic
atgttcccgttccaaccaatgtatccgatgcagccaatgccctatcgtaacccgttcgcggccccgcgcaggccctggttccccagaaccgacccttttctggcgatgcaggtgcaggaattaacccgctcgatggctaacgactcggtccgcactagcctgaggtaa

SEQ ID NO: 6482 - DNA, 141 bp, synthetic construct
  misc_feature 1..141: note = Synthetic
  source 1..141: mol_type = other DNA
atgcagccaatgccctatcgtaacccgttcgcggccccgcgcaggccctggttccccagaaccgacccttttctggcgatgcaggtgcaggaattaacccgctcgatggctaacgactcggtccgcactagcctgaggtaa

SEQ ID NO: 6483 - DNA, 168 bp, synthetic construct
  misc_feature 1..168: note = Synthetic
  source 1..168: mol_type = other DNA
atggatcccactgatctgagcttctccccagatgagatcaataagctcatagagacaggcctgaatactgtagagtattttacttcccaacaagtcacaggaacatcctctcttggaaagaatacaataccaccaggggtcgactcggtccgcactagcctgaggtaa

SEQ ID NO: 6484 - DNA, 168 bp, synthetic construct
  source 1..168: mol_type = other DNA
  misc_feature 1..168: note = Synthetic
atggcgtccgctatggagagtgacagcagcggcggtagcggaggggcagacgcccagccacccctggcagaggtggacggggggctcgcccgcgtgacgcgtcagttgctgctgtctggggacgaccccgctgcccgcctcgactcggtccgcactagcctgaggtaa

SEQ ID NO: 6485 - DNA, 186 bp, synthetic construct
  misc_feature 1..186: note = Synthetic
  source 1..186: mol_type = other DNA
acggacccctggaccttcatggcgtccgctatggagagtgacagcggcggcggtagcggaggggcagacgcccagccgcccctggcagaggtggacggggggctcgcccgcgtgacgcgtcagttgctgctgtctggggacgaccccgctgcccgcctcgactcggtccgcactagcctgaggtaa

SEQ ID NO: 6486 - DNA, 60 bp, synthetic construct
  source 1..60: mol_type = other DNA
  misc_feature 1..60: note = Synthetic
ttgcagacggcggcgatcgacggacccctggaccttcgccgcgtccgctatggagagtga

SEQ ID NO: 6487 - DNA, 156 bp, synthetic construct
  source 1..156: mol_type = other DNA
  misc_feature 1..156: note = Synthetic
atggagagtgacagcagcggcggtagcggaggggcagacgcccagccacccctggcagaggtggacggggggctcgcccgcgtgacgcgtcagttgctgctgtctggggacgaccccgctgcccgcctcgactcggtccgcactagcctgaggtaa

SEQ ID NO: 6488 - DNA, 156 bp, synthetic construct
  source 1..156: mol_type = other DNA
  misc_feature 1..156: note = Synthetic
atggagagtgacagcagcggcggtagcggaggggcagacgcccagccgcccctggcagaggtggacggggggctcgcccgcgtgacgcgtcagttgctgctgtctggggacgaccccgctgcccgcctcgactcggtccgcactagcctgaggtaa

SEQ ID NO: 6489 - DNA, 177 bp, synthetic construct
  misc_feature 1..177: note = Synthetic
  source 1..177: mol_type = other DNA
atggggcaattcattagtttcatgcaggagatacctattttcttgcaagaagcactcaacattgcattggtggcagtcagcctcatctgtatagtgaaaggcttggtgaacctatacaggtgcggactgtttcaattgatggtcttcctcgactcggtccgcactagcctgaggtaa

SEQ ID NO: 6490 - DNA, 156 bp, synthetic construct
  misc_feature 1..156: note = Synthetic
  source 1..156: mol_type = other DNA
atgcaggagatacctattttcttgcaagaagcactcaacattgcattggtggcagtcagcctcatctgtatagtgaaaggcttggtgaacctatacaggtgcggactgtttcaattgatggtcttcctcgactcggtccgcactagcctgaggtaa

SEQ ID NO: 6491 - DNA, 168 bp, synthetic construct
  misc_feature 1..168: note = Synthetic
  source 1..168: mol_type = other DNA
atgggaatcaaaaacctgaaagcgctgctgctgcagcacgagtctttgttggcgcgcgagctgcccggcgagcacgccgcggtcttcgtggacttcatgggtgtttacattgccgcggcgtattccgccggcagcgcgcgcgactcggtccgcactagcctgaggtaa

SEQ ID NO: 6492 - DNA, 195 bp, synthetic construct
  source 1..195: mol_type = other DNA
  misc_feature 1..195: note = Synthetic
aagccgcactttctaaaaaaaaaaaaaatgtccattctcatctcgcccagtaataataccggttggggactgtatgcgcccaccaagatgtatggaggcgcccgcaagcgctctacccagcatcctgtgcgcgttcgcggtcatttccgcgctccctggggcgcactcgactcggtccgcactagcctgaggtaa

SEQ ID NO: 6493 - DNA, 162 bp, synthetic construct
  misc_feature 1..162: note = Synthetic
  source 1..162: mol_type = other DNA
attctcatctcgcccagtaataataccggttggggactgtatgcgcccaccaagatgtatggaggcgcccgcaagcgctctacccagcatcctgtgcgcgttcgcggtcatttccgcgctccctggggcgcactcgactcggtccgcactagcctgaggtaa

SEQ ID NO: 6494 - DNA, 57 bp, synthetic construct
  source 1..57: mol_type = other DNA
  misc_feature 1..57: note = Synthetic
atgattgatagcccctcacacgcgagtccccaaccaatggatgtcataactatataa

SEQ ID NO: 6495 - DNA, 168 bp, synthetic construct
  misc_feature 1..168: note = Synthetic
  source 1..168: mol_type = other DNA
atgtcgtctgtgctcaaagcatttgagcgattcacaatagaacaggaacttcaagacaggggtgaggagggttcaattccgccggagactttaaagtcagcagtcaaagtcttcgttattaacacacccaatcccaccaccgactcggtccgcactagcctgaggtaa

SEQ ID NO: 6496 - DNA, 159 bp, synthetic construct
  source 1..159: mol_type = other DNA
  misc_feature 1..159: note = Synthetic
gtgctcaaagcatttgagcgattcacaatagaacaggaacttcaagacaggggtgaggagggttcaattccgccggagactttaaagtcagcagtcaaagtcttcgttattaacacacccaatcccaccaccgactcggtccgcactagcctgaggtaa

SEQ ID NO: 6497 - DNA, 168 bp, synthetic construct
  misc_feature 1..168: note = Synthetic
  source 1..168: mol_type = other DNA
atgggctccagcgagcaggagttggtcgccatcgtgcgcgaactgggctgcggaccttactttctgggcacgtttgacaaacgctttccgggttttatggcaccgcataagctggcgtgtgccattgttaacacggcgggcgactcggtccgcactagcctgaggtaa

SEQ ID NO: 6498 - DNA, 147 bp, synthetic construct
  source 1..147: mol_type = other DNA
  misc_feature 1..147: note = Synthetic
ttggtcgccatcgtgcgcgaactgggctgcggaccttactttctgggcacgtttgacaaacgctttccgggttttatggcaccgcataagctggcgtgtgccattgttaacacggcgggcgactcggtccgcactagcctgaggtaa

SEQ ID NO: 6499 - DNA, 198 bp, synthetic construct
  source 1..198: mol_type = other DNA
  misc_feature 1..198: note = Synthetic
atgccccggcttcatcgccggaacgctgcaactgagcaacatacgcaatctgctccgccgacacgttatggaactggcgagccatcgccgtcagccccgacgtcgggtctgtggtcagcttcccgaaggcttcagcgaccttgtccacctccacgccggatgcagaggagaaacgcgccacgactcggtccgcactag

SEQ ID NO: 6500 - DNA, 198 bp, synthetic construct
  source 1..198: mol_type = other DNA
  misc_feature 1..198: note = Synthetic
atgccccggcttcatcgccggaacgctgcaactgagcaacatacgcaatctgctccgccgacacgttatggaactggcgagccatcgccgtcagccccgacgtcgggtctgtggtcagcttcccggccgcttcagcgaccttgtccacctccacgccggatgcagaggagaaacgcgccacgactcggtccgcactag

SEQ ID NO: 6501 - DNA, 153 bp, synthetic construct
  misc_feature 1..153: note = Synthetic
  source 1..153: mol_type = other DNA
ttgcaggtcgccaaggtatttagacaaatccacttgcgccattccaagctgcaattggctttgcgtgctgtaatgcgcgttatcagcggcaagcgtttcaatgttcaattgggtttcaagctgcacgactcggtccgcactagcctgaggtaa

SEQ ID NO: 6502 - DNA, 48 bp, synthetic construct
  misc_feature 1..48: note = Synthetic
  source 1..48: mol_type = other DNA
atgttcaattgggtttcaagctgcacgactcggtccgcactagcctga

SEQ ID NO: 6503 - DNA, 153 bp, synthetic construct
  misc_feature 1..153: note = Synthetic
  source 1..153: mol_type = other DNA
ttgcaggtcgccaaggtatttagacaaatccacttgcgccattccaaggcccaattggctttgcgtgctgtaatgcgcgttatcagcggcaagcgtttcaatgttcaattgggtttcaagctgcacgactcggtccgcactagcctgaggtaa

SEQ ID NO: 6504 - DNA, 30 bp, synthetic construct
  misc_feature 1..30: note = Synthetic
  source 1..30: mol_type = other DNA
atcgtttgcccgtccgcccgtccttcgtag

SEQ ID NO: 6505 - DNA, 45 bp, synthetic construct
  source 1..45: mol_type = other DNA
  misc_feature 1..45: note = Synthetic
atcatcatcatctcaggctctatcggtaccatcgttgtcatctga

SEQ ID NO: 6506 - DNA, 210 bp, synthetic construct
  misc_feature 1..210: note = Synthetic
  source 1..210: mol_type = other DNA
attcgcctctcgagatcgttattcccggacccaaccgcccccatggacctgttggtcgacgatctgtttgcggacgcggacggggtttcgccaccgccccccaggccagccgggggtcccaagaacaccccagccgcccctccgctgtacgccaccggtcggctgagtcaggcccagctgatcgactcggtccgcactagcctgaggtaa

SEQ ID NO: 6507 - DNA, 210 bp, synthetic construct
  misc_feature 1..210: note = Synthetic
  source 1..210: mol_type = other DNA
attcgcctctcgagatcgttattcccggacccaaccgcccccgccgacctgttggtcgacgatctgtttgcggacgcggacggggtttcgccaccgccccccaggccagccgggggtcccaagaacaccccagccgcccctccgctgtacgccaccggtcggctgagtcaggcccagctgatcgactcggtccgcactagcctgaggtaa

SEQ ID NO: 6508 - DNA, 198 bp, synthetic construct
  misc_feature 1..198: note = Synthetic
  source 1..198: mol_type = other DNA
gtgtacacgtactttaaaatcgccgcaataatgaaacgcgctgtatccaaaaccaccgtcgcgtctaaccgcgctcctcagcaggaagatgcagcgcccgccaggcggttcggcgagaaccaggcgatgtcgtgcaccgacgcgatcaacttcgccaagtcgctctcgtccgactcggtccgcactagcctgaggtaa

SEQ ID NO: 6509 - DNA, 111 bp, synthetic construct
  misc_feature 1..111: note = Synthetic
  source 1..111: mol_type = other DNA
aggaagatgcagcgcccgccaggcggttcggcgagaaccaggcgatgtcgtgcaccgacgcgatcaacttcgccaagtcgctctcgtccgactcggtccgcactagcctga

SEQ ID NO: 6510 - DNA, 198 bp, synthetic construct
  source 1..198: mol_type = other DNA
  misc_feature 1..198: note = Synthetic
gtgtacacgtactttaaaatcgccgcaatagccaaacgcgctgtatccaaaaccaccgtcgcgtctaaccgcgctcctcagcaggaagatgcagcgcccgccaggcggttcggcgagaaccaggcgatgtcgtgcaccgacgcgatcaacttcgccaagtcgctctcgtccgactcggtccgcactagcctgaggtaa

SEQ ID NO: 6511 - DNA, 153 bp, synthetic construct
  misc_feature 1..153: note = Synthetic
  source 1..153: mol_type = other DNA
ctgtatccaaaaccaccgtcgcgtctaaccgcgctcctcagcaggaagatgcagcgcccgccaggcggttcggcgagaaccaggcgatgtcgtgcaccgacgcgatcaacttcgccaagtcgctctcgtccgactcggtccgcactagcctga

SEQ ID NO: 6512 - DNA, 123 bp, synthetic construct
  source 1..123: mol_type = other DNA
  misc_feature 1..123: note = Synthetic
atgggatgtgttcacagttttgtgggcggtaggttcacttccattttcgtggaagacgtcgggaatatgtcgattcaacgttgtttgtttctaacagttgtagcatccttagcgcgatcgtag

SEQ ID NO: 6513 - DNA, 168 bp, synthetic construct
  source 1..168: mol_type = other DNA
  misc_feature 1..168: note = Synthetic
atggagttcataccagcacaaacttactacaatagaagataccagcctagaccctggactcaacgccctactatccaggtgatcaggccaaaaccacgccgaagaaggcctgcaggacaactcgcacaactgatatccgccgactcggtccgcactagcctgaggtaa

SEQ ID NO: 6514 - DNA, 108 bp, synthetic construct
  misc_feature 1..108: note = Synthetic
  source 1..108: mol_type = other DNA
ttgcgccgcctaatgcatccgcaccacagaaactatacggcctcaaaagcctcggcacatagcgtgaagtcggtgtccagcgactcggtccgcactagcctgaggtaa

SEQ ID NO: 6515 - DNA, 168 bp, synthetic construct
  misc_feature 1..168: note = Synthetic
  source 1..168: mol_type = other DNA
atggccccggtcaccccagatgccgtgaatgcacgccaacagcgaccggcagatcccgcattgcgccgcctaatgcatccgcaccacagaaactacacggcctcaaaggcctcggcgcatagcgtgaagtcggtgtccagcgactcggtccgcactagcctgaggtaa

SEQ ID NO: 6516 - DNA, 96 bp, synthetic construct
  misc_feature 1..96: note = Synthetic
  source 1..96: mol_type = other DNA
atgcatccgcaccacagaaactacacggcctcaaaggcctcggcgcatagcgtgaagtcggtgtccagcgactcggtccgcactagcctgaggtaa

SEQ ID NO: 6517 - DNA, 72 bp, synthetic construct
  source 1..72: mol_type = other DNA
  misc_feature 1..72: note = Synthetic
atggctgagtctccatgcttgttgttgttccctaggagaacacagccgccggccgcggaggaagtcagttag

SEQ ID NO: 6518 - DNA, 108 bp, synthetic construct
  source 1..108: mol_type = other DNA
  misc_feature 1..108: note = Synthetic
aggggctctgccagccacccgccgggccgcgagagcccgtcgcctccgcctctgcccctgaagagacatacctaccgccgcgactcggtccgcactagcctgaggtaa

SEQ ID NO: 6519 - DNA, 156 bp, synthetic construct
  source 1..156: mol_type = other DNA
  misc_feature 1..156: note = Synthetic
ctgcgcgaggagcccaagatcgagctgctgccgctggagatgtacgcggaccccgaccgcgtgcgcgcgctcatcaacgagacgcgcgccacggagggcgtctacgggcgctgctacctggaggccgacgactcggtccgcactagcctgaggtaa

SEQ ID NO: 6520 - DNA, 99 bp, synthetic construct
  source 1..99: mol_type = other DNA
  misc_feature 1..99: note = Synthetic
acggtccgcgaacataaaggacacaatgcaatgaacattaccgacatcatgaacgctatcgacgcaatcaacgactcggtccgcactagcctgaggtaa

SEQ ID NO: 6521 - DNA, 99 bp, synthetic construct
  source 1..99: mol_type = other DNA
  misc_feature 1..99: note = Synthetic
acggtccgcgaacataaaggacacaatgcaatgaacattaccgacatcgccaacgctatcgacgcaatcaacgactcggtccgcactagcctgaggtaa

SEQ ID NO: 6522 - DNA, 21 bp, synthetic construct
  source 1..21: mol_type = other DNA
  misc_feature 1..21: note = Synthetic
gtggcgttcgccttcgcataa

SEQ ID NO: 6523 - DNA, 72 bp, synthetic construct
  misc_feature 1..72: note = Synthetic
  source 1..72: mol_type = other DNA
atggctgagtctccatgcttgttgttgttccctaggagaacacaatggccggccgcggaggaagtcagttag

SEQ ID NO: 6524 - DNA, 123 bp, synthetic construct
  misc_feature 1..123: note = Synthetic
  source 1..123: mol_type = other DNA
atgttcctgaaaaccgaatcatttgaacataacggtgtgaccgtcacgctttctgaactgtcagccctgcagcgcattgagcatctcgccctgatcgactcggtccgcactagcctgaggtaa

SEQ ID NO: 6525 - DNA, 66 bp, synthetic construct
  misc_feature 1..66: note = Synthetic
  source 1..66: mol_type = other DNA
ctgtcagccctgcagcgcattgagcatctcgccctgatcgactcggtccgcactagcctgaggtaa

SEQ ID NO: 6526 - DNA, 183 bp, synthetic construct
  source 1..183: mol_type = other DNA
  misc_feature 1..183: note = Synthetic
ttgcgccgccgcgtcatggatctgcctactaccgtcgtgcgaaaatactggacttttacgaatcctaaccgcatcctgcatcagagcgttaatcagactttcgacgtgcgccagttcgtctttgacaacgcccgtctggtcaactgcgtggacggcgactcggtccgcactagcctgaggtaa

SEQ ID NO: 6527 - DNA, 195 bp, synthetic construct
  source 1..195: mol_type = other DNA
  misc_feature 1..195: note = Synthetic
atgttctatctcaataacgtgatccggcgccgcatcgtgctcaacttcgactacccgaaccaggagtacgacttctttcacatgttccacctcctaaatacggtactgtgtcctcgcagcttcgacagccccaccaagaaggtgcttttcttgcagcaatcgatcttccgctcgactcggtccgcactagcctga

SEQ ID NO: 6528 - DNA, 36 bp, synthetic construct
  source 1..36: mol_type = other DNA
  misc_feature 1..36: note = Synthetic
atgcagacccccccgactcggtccgcactagcctga

SEQ ID NO: 6529 - DNA, 171 bp, synthetic construct
  source 1..171: mol_type = other DNA
  misc_feature 1..171: note = Synthetic
atggacgaggccggcaagacgggcgtgacggtcgaggacgccgcgcggcacctaggcggcgacgcgcgcctggccgagatgacgctgacgagcctgtgcagagagaaaattgcaaagagaagaaccgttgacggcatgaaacgcgactcggtccgcactagcctgaggtaa

SEQ ID NO: 6530 - DNA, 168 bp, synthetic construct
  source 1..168: mol_type = other DNA
  misc_feature 1..168: note = Synthetic
atggccgcgccgcgccgaatcagccttcccagcgtgacaatctctgcgccgcgcgcggtgctgcgccaggaaaggcaggagcctctgtcctgcgtgcttcccgagtactactacactgtcgcgcagctgcgcctgcaggtcgactcggtccgcactagcctgaggtaa

SEQ ID NO: 6531 - DNA, 24 bp, synthetic construct
  misc_feature 1..24: note = Synthetic
  source 1..24: mol_type = other DNA
atgcgtttcttcgttgccggctaa

SEQ ID NO: 6532 - DNA, 18 bp, synthetic construct
  source 1..18: mol_type = other DNA
  misc_feature 1..18: note = Synthetic
atttcacctttgatttga

SEQ ID NO: 6533 - DNA, 90 bp, synthetic construct
  misc_feature 1..90: note = Synthetic
  source 1..90: mol_type = other DNA
aaggccctgcggaggcaccggttcctgtggcaacggcggcgacgagctcggctgctgcagcacaacggcccccagcagtctcaccagtaa

SEQ ID NO: 6534 - DNA, 42 bp, synthetic construct
  source 1..42: mol_type = other DNA
  misc_feature 1..42: note = Synthetic
ataacactctccaggagagcgactcggtccgcactagcctga

SEQ ID NO: 6535 - DNA, 111 bp, synthetic construct
  misc_feature 1..111: note = Synthetic
  source 1..111: mol_type = other DNA
ttggcccaggcaaggtcaacattccggttgtatccggtaatggtgagtttgctgcggttgcagaaattaccgtcaccgccagttaatccggagagtcagcgatgttcctga

SEQ ID NO: 6536 - DNA, 48 bp, synthetic construct
  misc_feature 1..48: note = Synthetic
  source 1..48: mol_type = other DNA
atgtttcagcagcttgcagaggagcaaaaaggtgacctagaggattag

SEQ ID NO: 6537 - DNA, 87 bp, synthetic construct
  misc_feature 1..87: note = Synthetic
  source 1..87: mol_type = other DNA
ctgggcttgaagtccgaacacagcgtggggagcacggtggagacgagctggaacatgtattccgcgactcggtccgcactagcctga

SEQ ID NO: 6538 - DNA, 168 bp, synthetic construct
  misc_feature 1..168: note = Synthetic
  source 1..168: mol_type = other DNA
atgaaggtccaggggtccgtcgatcgccgccgtctgcaacgccgaatcgcggggctgctgccccctccggcccggcgtctaaatatttcccgggggtccgaattcacgcgggacgttcgtgggctggttgaggaacacgccgactcggtccgcactagcctgaggtaa

SEQ ID NO: 6539 - DNA, 192 bp, synthetic construct
  source 1..192: mol_type = other DNA
  misc_feature 1..192: note = Synthetic
ctgtcactctccatagcggacgccgccaaggtccaggggtccgtcgatcgccgccgtctgcaacgccgaatcgcggggctgctgccccctccggcccggcgtctaaatatttcccgggggtccgaattcacgcgggacgttcgtgggctggttgaggaacacgccgactcggtccgcactagcctgaggtaa

SEQ ID NO: 6540 - DNA, 195 bp, synthetic construct
  misc_feature 1..195: note = Synthetic
  source 1..195: mol_type = other DNA
ctgctgtcactctccatagcggacgccgccaaggtccaggggtccgtcgatcgccgccgtctgcaacgccgaatcgcggggctgctgccccctccggcccggcgtctaaatatttcccgggggtccgaattcacgcgggacgttcgtgggctggttgaggaacacgccgactcggtccgcactagcctgaggtaa

SEQ ID NO: 6541 - DNA, 99 bp, synthetic construct
  misc_feature 1..99: note = Synthetic
  source 1..99: mol_type = other DNA
atgaacgaatgcaagaaaaagaagatagcaagaacattaataatgacagtcctaaatcacaattatcagaaaaagtattatctaagaaagaagagataa

SEQ ID NO: 6542 - DNA, 174 bp, synthetic construct
  misc_feature 1..174: note = Synthetic
  source 1..174: mol_type = other DNA
acgaatctaaaacaagatgaacgaatgcaagaaaaagaagatagcaagaacattaataatgacagtcctaaatcacaattatcagaaaaagtattatctaagaaagaagagataattacagataatcaagaagaagttaagatatctgatgcgactcggtccgcactagcctga

SEQ ID NO: 6543 - DNA, 168 bp, synthetic construct
  source 1..168: mol_type = other DNA
  misc_feature 1..168: note = Synthetic
atggctttccgtgcttcgggacccgcctaccagcccctcgcccccgcggcctccccggcgcgggctcgtgttccggccgtggcctggatcggcgtcggagcgatcgtcggggcctttgcgctcgtcgccgcgttggttctcgactcggtccgcactagcctgaggtaa

SEQ ID NO: 6544 - DNA, 33 bp, synthetic construct
  source 1..33: mol_type = other DNA
  misc_feature 1..33: note = Synthetic
atgatgtatacgactcggtccgcactagcctga

SEQ ID NO: 6545 - DNA, 57 bp, synthetic construct
  source 1..57: mol_type = other DNA
  misc_feature 1..57: note = Synthetic
agggcgccgaacttaatggaatcctacaggcgttcgactcggtccgcactagcctga

SEQ ID NO: 6546 - DNA, 33 bp, synthetic construct
  misc_feature 1..33: note = Synthetic
  source 1..33: mol_type = other DNA
gtggctcgaaagcgtaaaaagaagtggctctag

SEQ ID NO: 6547 - DNA, 24 bp, synthetic construct
  source 1..24: mol_type = other DNA
  misc_feature 1..24: note = Synthetic
gtggcgcccgccctcacgtgctga

SEQ ID NO: 6548 - DNA, 75 bp, synthetic construct
  misc_feature 1..75: note = Synthetic
  source 1..75: mol_type = other DNA
atcatgtgtaccaaaacagactgtgataaatatagattaaaggtttccattccgactcggtccgcactagcctga

SEQ ID NO: 6549 - DNA, 120 bp, synthetic construct
  source 1..120: mol_type = other DNA
  misc_feature 1..120: note = Synthetic
atgtcacaattaatcctggaccatttgcgcaaacaggttatgctccagttaactggggacctggagaaattaatgattctacgacagttgaaccattcgactcggtccgcactagcctga

SEQ ID NO: 6550 - DNA, 15 bp, synthetic construct
  source 1..15: mol_type = other DNA
  misc_feature 1..15: note = Synthetic
atgggttatcgttaa

SEQ ID NO: 6551 - DNA, 60 bp, synthetic construct
  misc_feature 1..60: note = Synthetic
  source 1..60: mol_type = other DNA
atctggaacctgggacctttgatcttggggggctatatgaagcaattgaggagtgcctaa

SEQ ID NO: 6552 - DNA, 60 bp, synthetic construct
  misc_feature 1..60: note = Synthetic
  source 1..60: mol_type = other DNA
atgatccctgggttttgcttaatgcttcttggttcaactccttccttacacatgcattga

SEQ ID NO: 6553 - DNA, 60 bp, synthetic construct
  source 1..60: mol_type = other DNA
  misc_feature 1..60: note = Synthetic
atctggaacctgggacctttgatcttggggggctatgccaagcaattgaggagtgcctaa

SEQ ID NO: 6554 - DNA, 36 bp, synthetic construct
  misc_feature 1..36: note = Synthetic
  source 1..36: mol_type = other DNA
aaggtttccattccgactcggtccgcactagcctga

SEQ ID NO: 6555 - DNA, 192 bp, synthetic construct
  misc_feature 1..192: note = Synthetic
  source 1..192: mol_type = other DNA
atgataagcagaaacaggcgcagaaataatcaacaaaaaaacatagaaaaagagaaacaattagagactataattaacaaagaagttaaggaaaacaaagattctatgaaagaagataagctagtagttacagaagaaagcaatggagacgtcacaactgctaacgactcggtccgcactagcctgaggtaa

SEQ ID NO: 6556 - DNA, 45 bp, synthetic construct
  misc_feature 1..45: note = Synthetic
  source 1..45: mol_type = other DNA
atggagacgtcacaactgctaacgactcggtccgcactagcctga

SEQ ID NO: 6557 - DNA, 195 bp, synthetic construct
  source 1..195: mol_type = other DNA
  misc_feature 1..195: note = Synthetic
aaggccataagcagaaacaggcgcagaaataatcaacaaaaaaacatagaaaaagagaaacaattagagactataattaacaaagaagttaaggaaaacaaagattctatgaaagaagataagctagtagttacagaagaaagcaatggagacgtcacaactgctaacgactcggtccgcactagcctgaggtaa

SEQ ID NO: 6558 - DNA, 24 bp, synthetic construct
  misc_feature 1..24: note = Synthetic
  source 1..24: mol_type = other DNA
ttgatgccatttgcgacaatgtaa

SEQ ID NO: 6559 - DNA, 144 bp, synthetic construct
  source 1..144: mol_type = other DNA
  misc_feature 1..144: note = Synthetic
ctgatatcgattattctactaaattacatacttaaatcattaactagaataatggactttataatttatagatttctttttataattgtgatattgtcaccatttctcagagcacacgactcggtccgcactagcctgaggtaa

SEQ ID NO: 6560 - DNA, 27 bp, synthetic construct
  source 1..27: mol_type = other DNA
  misc_feature 1..27: note = Synthetic
atggtattgaatataccacagttctaa

SEQ ID NO: 6561 - DNA, 36 bp, synthetic construct
  misc_feature 1..36: note = Synthetic
  source 1..36: mol_type = other DNA
atgatacaaaagatagttatgaaaacgcttttttaa

SEQ ID NO: 6562 - DNA, 207 bp, synthetic construct
  misc_feature 1..207: note = Synthetic
  source 1..207: mol_type = other DNA
atgtctctcagtattgacgtgacgagtcttccttctattccttcaactatatataagaatgaatcgtcttcaacaacgtcaactctttctggaaaatctattggtaggagtgaacagtacatttcaccagatgcagaagcattcaataaatacatgctgtcgaagtctccagaggatatcgactcggtccgcactagcctgaggtaa

SEQ ID NO: 6563 - DNA, 210 bp, synthetic construct
  source 1..210: mol_type = other DNA
  misc_feature 1..210: note = Synthetic
gtggcctctctcagtattgacgtgacgagtcttccttctattccttcaactatatataagaatgaatcgtcttcaacaacgtcaactctttctggaaaatctattggtaggagtgaacagtacatttcaccagatgcagaagcattcaataaatacatgctgtcgaagtctccagaggatatcgactcggtccgcactagcctgaggtaa

SEQ ID NO: 6564 - DNA, 90 bp, synthetic construct
  misc_feature 1..90: note = Synthetic
  source 1..90: mol_type = other DNA
atgctgacagctaaagtagacaaaaaggacatggataagttttatgattcaattatttatggaatagcgactcggtccgcactagcctga

SEQ ID NO: 6565 - DNA, 15 bp, synthetic construct
  source 1..15: mol_type = other DNA
  misc_feature 1..15: note = Synthetic
atggtatccaattaa

SEQ ID NO: 6566 - DNA, 204 bp, synthetic construct
  source 1..204: mol_type = other DNA
  misc_feature 1..204: note = Synthetic
atacccatgttttcagcattatcagaaggagccaccccacaagatttaaacaccatgctaaacacagtggggggacatcaagcagccatgcaaatgttaaaagagaccatcaatgaggaagctgcagaatgggatagagtgcatccagtgcatgcagggcctattgcaccaggccagatgacgactcggtccgcactagcctga

SEQ ID NO: 6567 - DNA, 204 bp, synthetic construct
  source 1..204: mol_type = other DNA
  misc_feature 1..204: note = Synthetic
atacccatgttttcagcattatcagaaggagccaccccacaagatttaaacaccatgctaaacacagtggggggacatcaagcagccatgcaaatgttaaaagagaccatcaatgaggaagctgcagaatgggatagagtgcatccagtgcatgcagggcctattgcaccaggccaggccacgactcggtccgcactagcctga

SEQ ID NO: 6568 - DNA, 60 bp, synthetic construct
  source 1..60: mol_type = other DNA
  misc_feature 1..60: note = Synthetic
ataaagattgcattgatgattctggtgtgtataatgccgactcggtccgcactagcctga

SEQ ID NO: 6569 - DNA, 66 bp, synthetic construct
  misc_feature 1..66: note = Synthetic
  source 1..66: mol_type = other DNA
ataattataaagattgcattgatgattctggtgtgtataatgccgactcggtccgcactagcctga

SEQ ID NO: 6570 - DNA, 138 bp, synthetic construct
  source 1..138: mol_type = other DNA
  misc_feature 1..138: note = Synthetic
atcaacaaactaataaagtggtatcagactatgtggatgcaggaaactacacctatgctcaattgccacctacaacgtggggatctgggtcaatacttaaatcggcattccgactcggtccgcactagcctgaggtaa

SEQ ID NO: 6571 - DNA, 189 bp, synthetic construct
  misc_feature 1..189: note = Synthetic
  source 1..189: mol_type = other DNA
ctgggcagggtgtacctcttaatgccaattctacccctgcgcaaaatgctgggtattggcggagacaggacagaaaaattaataccgggaatggaattaagcaactggctcccaggtggtacttctactacactggaactggacccgaagcagcactcccacgactcggtccgcactagcctgaggtaa

SEQ ID NO: 6572 - DNA, 189 bp, synthetic construct
  misc_feature 1..189: note = Synthetic
  source 1..189: mol_type = other DNA
ctgggcagggtgtacctcttagccccaattctacccctgcgcaaaatgctgggtattggcggagacaggacagaaaaattaataccgggaatggaattaagcaactggctcccaggtggtacttctactacactggaactggacccgaagcagcactcccacgactcggtccgcactagcctgaggtaa

SEQ ID NO: 6573 - DNA, 195 bp, synthetic construct
  misc_feature 1..195: note = Synthetic
  source 1..195: mol_type = other DNA
aggaactaccgggaggagaggcgcggaatgccgcagaaagcgcggtggcaggacacggtccggatgcggagccccgagaagaaaccgagcccgagtccgaggagtccagcgccgagaagtaagggcacgtccgcgcggcccgagcaggacgtgcacgtggtttgctccgactcggtccgcactagcctgaggtaa

SEQ ID NO: 6574 - DNA, 195 bp, synthetic construct
  source 1..195: mol_type = other DNA
  misc_feature 1..195: note = Synthetic
aggaactaccgggaggagaggcgcggagccccgcagaaagcgcggtggcaggacacggtccggatgcggagccccgagaagaaaccgagcccgagtccgaggagtccagcgccgagaagtaagggcacgtccgcgcggcccgagcaggacgtgcacgtggtttgctccgactcggtccgcactagcctgaggtaa

SEQ ID NO: 6575 - DNA, 225 bp, synthetic construct
  misc_feature 1..225: note = Synthetic
  source 1..225: mol_type = other DNA
ttggaaacaatcttgtatagagtcatttttcctaatcatccgaaggcttcaacgaaaatgcaaagtctaccctccagaagatctgaaacaaacaagaaaataatttctgaaaaaatctctgaaacaattacacttaacaaattgcctatgtccagatacttgcactttttcctgtttactgtaacggatgtggatgacgactcggtccgcactagcctgaggtaa

SEQ ID NO: 6576 - DNA, 225 bp, synthetic construct
  misc_feature 1..225: note = Synthetic
  source 1..225: mol_type = other DNA
ttggaaacaatcttgtatagagtcatttttcctaatcatccgaaggcttcaacgaaagcccaaagtctaccctccagaagatctgaaacaaacaagaaaataatttctgaaaaaatctctgaaacaattacacttaacaaattgcctatgtccagatacttgcactttttcctgtttactgtaacggatgtggatgacgactcggtccgcactagcctgaggtaa

SEQ ID NO: 6577 - DNA, 177 bp, synthetic construct
  source 1..177: mol_type = other DNA
  misc_feature 1..177: note = Synthetic
atggaaaagcttaccgacctcaattatacattgagtgtaatcactctaatgaacaatacattgcacacaatacttgaggatccaggaatggcgtattttccttatatagcatctgtcttaacagttttgtttgcgctacataaagcatccattccaacacgactcggtccgcactag

SEQ ID NO: 6578 - DNA, 129 bp, synthetic construct
  source 1..129: mol_type = other DNA
  misc_feature 1..129: note = Synthetic
atgaacaatacattgcacacaatacttgaggatccaggaatggcgtattttccttatatagcatctgtcttaacagttttgtttgcgctacataaagcatccattccaacacgactcggtccgcactag

SEQ ID NO: 6579 - DNA, 129 bp, synthetic construct
  source 1..129: mol_type = other DNA
  misc_feature 1..129: note = Synthetic
ttgtattctaacgtgagtgatctaattcaacaatttaatcaaatgataattactatgaatggaaatgaatttcaaactggaggaatcggtaatttgccaattagaaactggcgactcggtccgcactag

SEQ ID NO: 6580 - DNA, 78 bp, synthetic construct
  misc_feature 1..78: note = Synthetic
  source 1..78: mol_type = other DNA
atgtcctatactctttgtcaaagactcttaaagacgctagagacaaaattgtcgaaggcacattgtattctaacgtga

SEQ ID NO: 6581 - DNA, 198 bp, synthetic construct
  source 1..198: mol_type = other DNA
  misc_feature 1..198: note = Synthetic
atgggcacgactgcagagcaaatgtacataattacagccacaaacaacagcttgacccaggaggacatgagaaaacggtcgctctttgaagcgcgcatgtttctcggtctttttaactttcgccaggcggcgctgcggcgggagagccaatctgatgccactgcctatcgcgactcggtccgcactagcctgaggtaa

SEQ ID NO: 6582 - DNA, 132 bp, synthetic construct
  misc_feature 1..132: note = Synthetic
  source 1..132: mol_type = other DNA
acgcaatctgcgattctccgacccagggtgacttcgaaaaatagtctaaagtccgtaaacgtgggtcccgggggcagagacaaaaaagaggctagttgctcccagctcttaagagagagcagcttggagtaa

SEQ ID NO: 6583 - DNA, 21 bp, synthetic construct
  misc_feature 1..21: note = Synthetic
  source 1..21: mol_type = other DNA
atgaatattaaacaattatag

SEQ ID NO: 6584 - DNA, 168 bp, synthetic construct
  source 1..168: mol_type = other DNA
  misc_feature 1..168: note = Synthetic
atggccaaccgtcagaaccaagcaggcagctccattaccccctacttgcgggagatgagccccgagcgcgagcaggaggcgcctcagctccctcccaagaagaaggctcgcaaggcgacacccgcgccgccgccatcccccgactcggtccgcactagcctgaggtaa

SEQ ID NO: 6585 - DNA, 105 bp, synthetic construct
  source 1..105: mol_type = other DNA
  misc_feature 1..105: note = Synthetic
atgtcccggcataacatggaccttaggatagccaaggtgggacaagagcgttgggcattcgagtttggtttcagtcgggttgacccaacctggctacccagatag

SEQ ID NO: 6586 - DNA, 126 bp, synthetic construct
  misc_feature 1..126: note = Synthetic
  source 1..126: mol_type = other DNA
ttgctaaactggaaagcaacgaagtccgtgaagacggaaaccagtttcttgttgttcgccatcctgggaagactcctgttatcaagcactgcactggtgacctggaagagtttctgcggcagttaa

SEQ ID NO: 6587 - DNA, 126 bp, synthetic construct
  misc_feature 1..126: note = Synthetic
  source 1..126: mol_type = other DNA
ttgctaaactggaaagcaacgaagtccgtgaagacggaaaccagtttcttgttgttcgccatcctgggaagactcctgttatcaagcactgcactggtgacgccgaagagtttctgcggcagttaa

SEQ ID NO: 6588 - DNA, 39 bp, synthetic construct
  source 1..39: mol_type = other DNA
  misc_feature 1..39: note = Synthetic
ctggcgttcaaggttaagaacagtaagacaaaattatga

SEQ ID NO: 6589 - DNA, 93 bp, synthetic construct
  misc_feature 1..93: note = Synthetic
  source 1..93: mol_type = other DNA
atctttttgactatcctcactctgaagctatcttggcagagtgttaagagatgcatatggatagatatgttgaatatagggataaacttgtag

SEQ ID NO: 6590 - DNA, 183 bp, synthetic construct
  misc_feature 1..183: note = Synthetic
  source 1..183: mol_type = other DNA
aagaaacttctgagtatggcagaactgtcaacacgttacaacttaccaacaaatattacagagaagagcataaatcttgatctcaattctactgcacggtgggtaaaagagcccagtgttgggggctggacagtgaaatgggggaattttatcttcgactcggtccgcactagcctgaggtaa

SEQ ID NO: 6591 - DNA, 174 bp, synthetic construct
  misc_feature 1..174: note = Synthetic
  source 1..174: mol_type = other DNA
ctgagtgccgcagaactgtcaacacgttacaacttaccaacaaatattacagagaagagcataaatcttgatctcaattctactgcacggtgggtaaaagagcccagtgttgggggctggacagtgaaatgggggaattttatcttcgactcggtccgcactagcctgaggtaa

SEQ ID NO: 6592 - DNA, 111 bp, synthetic construct
  misc_feature 1..111: note = Synthetic
  source 1..111: mol_type = other DNA
atggcctgcgtatcttcaacaagctctgtcgccgtctcccagccgttgttcgggtcaatccagttcacctcaacggcattatggcggtccttcagggcgctgaagctgtag

SEQ ID NO: 6593 - DNA, 138 bp, synthetic construct
  misc_feature 1..138: note = Synthetic
  source 1..138: mol_type = other DNA
atggcggtccttcagggcgctgaagctgtagcggaacggcgcgccatcatccggcatcaccacattactgcggttataggtccacgtcttatccgacggtcggtcctgcacgaaccgactcggtccgcactagcctga

SEQ ID NO: 6594 - DNA, 105 bp, synthetic construct
  source 1..105: mol_type = other DNA
  misc_feature 1..105: note = Synthetic
attcccagccactccagcaacaccgcactggagaggcctctggctgttcagctcgcgaggaaaaggacatcgtcggaggccacgactcggtccgcactagcctga

SEQ ID NO: 6595 - DNA, 66 bp, synthetic construct
  source 1..66: mol_type = other DNA
  misc_feature 1..66: note = Synthetic
ttgttcgggtcaatccagttcacctcaacggcattatggcggtccttcagggcgctgaagctgtag

SEQ ID NO: 6596 - DNA, 135 bp, synthetic construct
  source 1..135: mol_type = other DNA
  misc_feature 1..135: note = Synthetic
gtgcagctagctaaggtcaagctggcgttcaaggttaagaacagtaagacaaaattgccaattatgcaaattttggattggatttattcaaatcaatcacagatgctgcctatgaaggcaagaggattgatttag

SEQ ID NO: 6597 - DNA, 111 bp, synthetic construct
  source 1..111: mol_type = other DNA
  misc_feature 1..111: note = Synthetic
atgtacaccgaactgtcgctgttgtataagaagaaaaaactctccatatttatatcgtctgaatttttgcttgatagacacgtcgactcggtccgcactagcctgaggtaa

SEQ ID NO: 6598 - DNA, 225 bp, synthetic construct
  source 1..225: mol_type = other DNA
  misc_feature 1..225: note = Synthetic
atgtcaaattcctcatgttcttgtccctccgcacccactatcttcatattgttgcagatgaaacgcgccagaccgtctgaagacaccttcaaccccgtgtatccatatgacacagaaaccgggcctccaactgtgccctttcttacccctccatttgtttcacccaatggtttccaagaaagtccccctggagttctcgactcggtccgcactagcctgaggtaa

SEQ ID NO: 6599 - DNA, 66 bp, synthetic construct
  source 1..66: mol_type = other DNA
  misc_feature 1..66: note = Synthetic
atgttcttgtccctccgcacccactatcttcatattgttgcagatgaaacgcgccagaccgtctga

SEQ ID NO: 6600 - DNA, 144 bp, synthetic construct
  misc_feature 1..144: note = Synthetic
  source 1..144: mol_type = other DNA
ctgaagacaccttcaaccccgtgtatccatatgacacagaaaccgggcctccaactgtgccctttcttacccctccatttgtttcacccaatggtttccaagaaagtccccctggagttctcgactcggtccgcactagcctga

SEQ ID NO: 6601 - DNA, 225 bp, synthetic construct
  source 1..225: mol_type = other DNA
  misc_feature 1..225: note = Synthetic
atgtcaaattcctcatgttcttgtccctccgcacccactatcttcatattgttgcaggccaaacgcgccagaccgtctgaagacaccttcaaccccgtgtatccatatgacacagaaaccgggcctccaactgtgccctttcttacccctccatttgtttcacccaatggtttccaagaaagtccccctggagttctcgactcggtccgcactagcctgaggtaa

SEQ ID NO: 6602 - DNA, 66 bp, synthetic construct
  misc_feature 1..66: note = Synthetic
  source 1..66: mol_type = other DNA
atgttcttgtccctccgcacccactatcttcatattgttgcaggccaaacgcgccagaccgtctga

SEQ ID NO: 6603 - DNA, 114 bp, synthetic construct
  source 1..114: mol_type = other DNA
  misc_feature 1..114: note = Synthetic
atgacacagaaaccgggcctccaactgtgccctttcttacccctccatttgtttcacccaatggtttccaagaaagtccccctggagttctcgactcggtccgcactagcctga

SEQ ID NO: 6604 - DNA, 126 bp, synthetic construct
  misc_feature 1..126: note = Synthetic
  source 1..126: mol_type = other DNA
atgtacctctttgtctccgtgctctacttcatgccttccgagcccggcagcgcccacactgctcagacgacggtcgctgcgacggtcgctgccacagcagcggcgtcgccccagttcgtctcctaa

SEQ ID NO: 6605 - DNA, 63 bp, synthetic construct
  misc_feature 1..63: note = Synthetic
  source 1..63: mol_type = other DNA
atgtggtggggtccaacgttgatggtcgtcctgtcgcccccgactcggtccgcactagcctga

SEQ ID NO: 6606 - DNA, 69 bp, synthetic construct
  misc_feature 1..69: note = Synthetic
  source 1..69: mol_type = other DNA
atgtccagcgatagtaaaaaaactcagttgaatagaatggacgactcggtccgcactagcctgaggtaa

SEQ ID NO: 6607 - DNA, 198 bp, synthetic construct
  misc_feature 1..198: note = Synthetic
  source 1..198: mol_type = other DNA
ttgctgcctcgccggctccccgcaccgaccatgacaatgcgggatgatgttcctttgttggatcgcgagctggtagacgaggccgcgtgtggcggggaggacggagaactgccgctcgatgaacagttttcgctgtcctcgtacggcacgtctgatttttttgtcagttccgactcggtccgcactagcctgaggtaa

SEQ ID NO: 6608 - DNA, 162 bp, synthetic construct
  source 1..162: mol_type = other DNA
  misc_feature 1..162: note = Synthetic
atgcgggatgatgttcctttgttggatcgcgagctggtagacgaggccgcgtgtggcggggaggacggagaactgccgctcgatgaacagttttcgctgtcctcgtacggcacgtctgatttttttgtcagttccgactcggtccgcactagcctgaggtaa

SEQ ID NO: 6609 - DNA, 75 bp, synthetic construct
  misc_feature 1..75: note = Synthetic
  source 1..75: mol_type = other DNA
attttgcggttgaaatttgggccaagccttccgaaaagggcaacactggttatgaatatggtgtcaagccgctga

SEQ ID NO: 6610 - DNA, 180 bp, synthetic construct
  misc_feature 1..180: note = Synthetic
  source 1..180: mol_type = other DNA
atgtctgcccccggatgctctgaaagacaggataagaagcgagtcactattggggagacagaatttggacaattgctgagctgggaccccactgaccttccccggacggtggcccgcgtctacgtggcggtgggaggcctctttgagcaggacgactcggtccgcactagcctgaggtaa

SEQ ID NO: 6611 - DNA, 45 bp, synthetic construct
  misc_feature 1..45: note = Synthetic
  source 1..45: mol_type = other DNA
atgcatggggccacccagctccgcggcggcctgcagccggggtag

SEQ ID NO: 6612 - DNA, 120 bp, synthetic construct
  source 1..120: mol_type = other DNA
  misc_feature 1..120: note = Synthetic
atccttcgggtgagggcgggtggcatttcctttttctataccatcatggcagtccttctgctccttctcgtggttgaggccggggccattctcgactcggtccgcactagcctgaggtaa

SEQ ID NO: 6613 - DNA, 135 bp, synthetic construct
  source 1..135: mol_type = other DNA
  misc_feature 1..135: note = Synthetic
ttgggacgtgccagcatttcctcgccgcgaatcgctacctcgaaacccgggacattatgccgatcgactggtcggtataagatgccgacatccggggtcttgatttacgactcggtccgcactagcctgaggtaa

SEQ ID NO: 6614 - DNA, 51 bp, synthetic construct
  misc_feature 1..51: note = Synthetic
  source 1..51: mol_type = other DNA
atgtttttgcagggaagaacacagatcttgaggctctcatggaatggctaa

SEQ ID NO: 6615 - DNA, 99 bp, synthetic construct
  misc_feature 1..99: note = Synthetic
  source 1..99: mol_type = other DNA
gtggcgaatcgtctggcgccagtgaggagaccttccgacatggttatctttatatcgagtcttcggctggacaaatgtttcttatgccatcctatttag

SEQ ID NO: 6616 - DNA, 54 bp, synthetic construct
  source 1..54: mol_type = other DNA
  misc_feature 1..54: note = Synthetic
atgtataactcggtcaccccaaacttatccctgggggacggtgcgccgatgtag

SEQ ID NO: 6617 - DNA, 168 bp, synthetic construct
  source 1..168: mol_type = other DNA
  misc_feature 1..168: note = Synthetic
atggttccttctcagagactctcccgaactagcagcatttcctccaacgaggatcccgcagagagccacattctggaactcgaagcggtctcagacaccaacacagactgcgatctggaccctatggagggcagcgaagacgactcggtccgcactagcctgaggtaa

SEQ ID NO: 6618 - DNA, 171 bp, synthetic construct
  misc_feature 1..171: note = Synthetic
  source 1..171: mol_type = other DNA
aaggccgttccttctcagagactctcccgaactagcagcatttcctccaacgaggatcccgcagagagccacattctggaactcgaagcggtctcagacaccaacacagactgcgatatggaccctatggacggcagcgaagacgactcggtccgcactagcctgaggtaa

SEQ ID NO: 6619 - DNA, 171 bp, synthetic construct
  source 1..171: mol_type = other DNA
  misc_feature 1..171: note = Synthetic
aaggccgttccttctcagagactctcccgaactagcagcatttcctccaacgaggatcccgcagagagccacattctggaactcgaagcggtctcagacaccaacacagactgcgatatggaccctatggagggcagcgaagacgactcggtccgcactagcctgaggtaa

SEQ ID NO: 6620 - DNA, 171 bp, synthetic construct
  source 1..171: mol_type = other DNA
  misc_feature 1..171: note = Synthetic
aaggccgttccttctcagagactctcccgaactagcagcatttcctccaacgaggatcccgcagagagccacattctggaactcgaagcggtctcagacaccaacacagactgcgatctggaccctatggagggcagcgaagacgactcggtccgcactagcctgaggtaa

SEQ ID NO: 6621 - DNA, 186 bp, synthetic construct
  source 1..186: mol_type = other DNA
  misc_feature 1..186: note = Synthetic
ctgtccgctgtgtggaccatgacgcttgacctgggactagattgcaccggcaaagcccaggcgattcccatgcgacaggagcaccagctggcgtttcagaagcagtgctatttatataaagccaaccaaaaggcagagtcgttagcgaactgctccgataagccgactcggtccgcactagcctga

SEQ ID NO: 6622 - DNA, 42 bp, synthetic construct
  source 1..42: mol_type = other DNA
  misc_feature 1..42: note = Synthetic
atggcctcttccagccagcacagaaacatctggctcgcctga

SEQ ID NO: 6623 - DNA, 126 bp, synthetic construct
  misc_feature 1..126: note = Synthetic
  source 1..126: mol_type = other DNA
acgggatgcgacgaattttcgccgccccataaagtacgcccacgactcgttcgcactggcccgtgccgtggagtagctcatctgggcgtaattccgggaaagccgactcggtccgcactagcctga

SEQ ID NO: 6624 - DNA, 45 bp, synthetic construct
  source 1..45: mol_type = other DNA
  misc_feature 1..45: note = Synthetic
ctgggcgtaattccgggaaagccgactcggtccgcactagcctga

SEQ ID NO: 6625 - DNA, 186 bp, synthetic construct
  source 1..186: mol_type = other DNA
  misc_feature 1..186: note = Synthetic
atgagtcttctaaccgaggtcgaaacgcttaccagaaacggatgggagtgcaaatgcagagattcaagtgatcctctcgttgttgcagcaagtatcattgggatattgcacttgatattgtggattcttgatcgtcttttcttcaaatgcatttatcgtcgctttaaacgactcggtccgcactag

SEQ ID NO: 6626 - DNA, 186 bp, synthetic construct
  misc_feature 1..186: note = Synthetic
  source 1..186: mol_type = other DNA
atgagtcttctaaccgaggtcgaaacgtacgttctctctatcatcccatcaggccccctcaaagccgagatcgcgcagagacttgaggatgtttttgcagggaagaacacagatcttgaggctctcatggaatggctaaagacaagaccaatcctgtcacctctgactcgactcggtccgcactag

SEQ ID NO: 6627 - DNA, 81 bp, synthetic construct
  misc_feature 1..81: note = Synthetic
  source 1..81: mol_type = other DNA
ttgcacttgatattgtggattcttgatcgtcttttcttcaaatgcatttatcgtcgctttaaacgactcggtccgcactag

SEQ ID NO: 6628 - DNA, 57 bp, synthetic construct
  source 1..57: mol_type = other DNA
  misc_feature 1..57: note = Synthetic
atgcatgctttgcatacttctgcctgctggggagcctggggactttccacaccctaa

SEQ ID NO: 6629 - DNA, 18 bp, synthetic construct
  source 1..18: mol_type = other DNA
  misc_feature 1..18: note = Synthetic
ataagcagccctatataa

SEQ ID NO: 6630 - DNA, 153 bp, synthetic construct
  source 1..153: mol_type = other DNA
  misc_feature 1..153: note = Synthetic
atgtcgttggcaagcgcccataccggttttatgtcacgcacacgggcgatgatgtcagcgcagtcaaatgcccccgccaccatcccgccgggcgtgtccatatcgagcagaatgccgtccaccatcggatcgctgcgactcggtccgcactag

SEQ ID NO: 6631 - DNA, 147 bp, synthetic construct
  misc_feature 1..147: note = Synthetic
  source 1..147: mol_type = other DNA
ttggcaagcgcccataccggttttatgtcacgcacacgggcgatgatgtcagcgcagtcaaatgcccccgccaccatcccgccgggcgtgtccatatcgagcagaatgccgtccaccatcggatcgctgcgactcggtccgcactag

SEQ ID NO: 6632 - DNA, 186 bp, synthetic construct
  source 1..186: mol_type = other DNA
  misc_feature 1..186: note = Synthetic
atagccattcgcaggtccagagagacgcgcccgacggcccatccggagtccccgctaaccttcggcataaaagccaccgcgcgcctgttgaccaggttcagttgcacgactccgcccccgcgagtagcgacggccgtgtgccagtcgccatcgtacccccgacccaagcgactcggtccgcactag

SEQ ID NO: 6633 - DNA, 39 bp, synthetic construct
  source 1..39: mol_type = other DNA
  misc_feature 1..39: note = Synthetic
atgggctttacctcacgtacgactctgaccgccccctaa

SEQ ID NO: 6634 - DNA, 39 bp, synthetic construct
  misc_feature 1..39: note = Synthetic
  source 1..39: mol_type = other DNA
atgggctttacctcacgtacgactctgaccggcccctaa

SEQ ID NO: 6635 - DNA, 168 bp, synthetic construct
  misc_feature 1..168: note = Synthetic
  source 1..168: mol_type = other DNA
atggttccttctcagagactctcccgaactagcagcatttcctccaacgaggatcccgcagagagccacattctggaactcgaagcggtctcagacaccaacacagactgcgatatggaccctatggacggcagcgaagacgactcggtccgcactagcctgaggtaa

SEQ ID NO: 6636 - DNA, 168 bp, synthetic construct
  misc_feature 1..168: note = Synthetic
  source 1..168: mol_type = other DNA
atggttccttctcagagactctcccgaactagcagcatttcctccaacgaggatcccgcagagagccacattctggaactcgaagcggtctcagacaccaacacagactgcgatatggaccctatggagggcagcgaagacgactcggtccgcactagcctgaggtaa

SEQ ID NO: 6637 - DNA, 69 bp, synthetic construct
  misc_feature 1..69: note = Synthetic
  source 1..69: mol_type = other DNA
atggttttggattcccctgacggggcggggccttggcggccgcccaactctcgcaccatcccgggttaa

SEQ ID NO: 6638 - DNA, 24 bp, synthetic construct
  misc_feature 1..24: note = Synthetic
  source 1..24: mol_type = other DNA
atggctgttctaccgcgtgaatga

SEQ ID NO: 6639 - DNA, 54 bp, synthetic construct
  misc_feature 1..54: note = Synthetic
  source 1..54: mol_type = other DNA
ctgcgggttctgttcttcgttgacatgaggttgccccgtattcagtgtcgctga

SEQ ID NO: 6640 - DNA, 33 bp, synthetic construct
  misc_feature 1..33: note = Synthetic
  source 1..33: mol_type = other DNA
atggcctccacgcacgttgtgatatgtagatga

SEQ ID NO: 6641 - DNA, 198 bp, synthetic construct
  source 1..198: mol_type = other DNA
  misc_feature 1..198: note = Synthetic
atcatccagggttgcagctgggagagaatggtgtcgatcaaagtgtctttagctgatttcattgttaagactgaggaaggttggattccatctgataactgtcctgctttagatagatttaaaactaaaactgaaaaggagctgttggattcaataaaaaaagaaggagcagatacgactcggtccgcactagcctga

SEQ ID NO: 6642 - DNA, 168 bp, synthetic construct
  misc_feature 1..168: note = Synthetic
  source 1..168: mol_type = other DNA
atgtttgcgctagttttagcggtggtaattcttcctctttggaccacggctaataaatcttacgtaacaccaacccctgcgactcgctctatcggacatatgtctgctcttctacgagaatattccgaccgtaatatgtccgactcggtccgcactagcctgaggtaa

SEQ ID NO: 6643 - DNA, 72 bp, synthetic construct
  misc_feature 1..72: note = Synthetic
  source 1..72: mol_type = other DNA
gtgcgctttggaacaatggatgctgagaccccgcaggaacgctcagcagtctttgtgagccaggatgagtga

SEQ ID NO: 6644 - DNA, 150 bp, synthetic construct
  misc_feature 1..150: note = Synthetic
  source 1..150: mol_type = other DNA
atggcgcagcgccaaaagccaatggctctgaggccagcggccaggatcttgttcctgccgccgttgaacaggccgtccccattcaacccgtggctggcgcggctcttgccgcccccgccgccgggcacgactcggtccgcactagcctga

SEQ ID NO: 6645 - DNA, 192 bp, synthetic construct
  misc_feature 1..192: note = Synthetic
  source 1..192: mol_type = other DNA
ctgggtagaaatcaaaatctttatatgctgggtcagacattgtggggaggaactatgaaggggctcttgctgattatcctttccctggtggggggtgtgctgtcatgccacgaacagccacgatgtaacatcaccacaggcaatgagaggagtgtcatatgcaccgactcggtccgcactagcctgaggtaa

SEQ ID NO: 6646 - DNA, 48 bp, synthetic construct
  source 1..48: mol_type = other DNA
  misc_feature 1..48: note = Synthetic
atcaaaatctttatatgctgggtcagacattgtggggaggaactatga

SEQ ID NO: 6647 - DNA, 24 bp, synthetic construct
  source 1..24: mol_type = other DNA
  misc_feature 1..24: note = Synthetic
atgtattgtctaaagccgttatag

SEQ ID NO: 6648 - DNA, 33 bp, synthetic construct
  source 1..33: mol_type = other DNA
  misc_feature 1..33: note = Synthetic
atgtcacttgtcaatggattaaagaaaacttag

SEQ ID NO: 6649 - DNA, 24 bp, synthetic construct
  source 1..24: mol_type = other DNA
  misc_feature 1..24: note = Synthetic
atggagctgcctgcttggttctga

SEQ ID NO: 6650 - DNA, 129 bp, synthetic construct
  misc_feature 1..129: note = Synthetic
  source 1..129: mol_type = other DNA
ctggccgctcctccccccgctcctccccccgctcctccccccgctcctccccccgctcctccccccgctcctccccccgctcctccccccgctcctccccccgctcctccccgactcggtccgcactag

SEQ ID NO: 6651 - DNA, 174 bp, synthetic construct
  source 1..174: mol_type = other DNA
  misc_feature 1..174: note = Synthetic
atgggggttatggcggacccaccgcaccaccatactccgattcgaccacatatgcaaccaaatcacccccagaggggaggttccatttttacgaggaggaggagtataatagagtctttgtgtttaaaacccggggtcggtgtggtgttcgcgactcggtccgcactagcctga

SEQ ID NO: 6652 - DNA, 132 bp, synthetic construct
  misc_feature 1..132: note = Synthetic
  source 1..132: mol_type = other DNA
attaggggatataagcagagcgcataccggtcggcagtaggtatgtcatccggcggtctcggggattgcagcgcctgtgagacccgagccgctgggggcagtgaattgccgactcggtccgcactagcctga

SEQ ID NO: 6653 - DNA, 102 bp, synthetic construct
  misc_feature 1..102: note = Synthetic
  source 1..102: mol_type = other DNA
ctgcatgacatgccaccggccatttttcagttgctgaataaacgcgccgggaatacgacggttacccaccacaagcacgctgccgccacctttcagggatga

SEQ ID NO: 6654 - DNA, 33 bp, synthetic construct
  source 1..33: mol_type = other DNA
  misc_feature 1..33: note = Synthetic
atgacgccccaccggccatttttcagttgctga

SEQ ID NO: 6655 - DNA, 81 bp, synthetic construct
  source 1..81: mol_type = other DNA
  misc_feature 1..81: note = Synthetic
atttttcagttgctgaataaacgcgccgggaatacgacggttacccaccacaagcacgctgccgccacctttcagggatga

SEQ ID NO: 6656 - DNA, 21 bp, synthetic construct
  source 1..21: mol_type = other DNA
  misc_feature 1..21: note = Synthetic
gtgttgcagtcttgtgaatag

SEQ ID NO: 6657 - DNA, 126 bp, synthetic construct
  misc_feature 1..126: note = Synthetic
  source 1..126: mol_type = other DNA
atggctgaattaacgccgtcctgcacccactcttctctggtatcccagggaagaaggtcgctcgcgcatttggaaatttcgatggagctccctgatcactttgcgactcggtccgcactagcctga

SEQ ID NO: 6658 - DNA, 15 bp, synthetic construct
  misc_feature 1..15: note = Synthetic
  source 1..15: mol_type = other DNA
atgtcagccacctag

SEQ ID NO: 6659 - DNA, 168 bp, synthetic construct
  source 1..168: mol_type = other DNA
  misc_feature 1..168: note = Synthetic
atgcccagaatgaaggacatacctactaagagttccccgggaacggacaattctgagaaagatgaagctgtcattgaggaagatctaagcctcaacgggcaaccattttttacggacaatactgacggtggggaaaacgacgactcggtccgcactagcctgaggtaa

SEQ ID NO: 6660 - DNA, 159 bp, synthetic construct
  misc_feature 1..159: note = Synthetic
  source 1..159: mol_type = other DNA
atgaaggacatacctactaagagttccccgggaacggacaattctgagaaagatgaagctgtcattgaggaagatctaagcctcaacgggcaaccattttttacggacaatactgacggtggggaaaacgacgactcggtccgcactagcctgaggtaa

SEQ ID NO: 6661 - DNA, 219 bp, synthetic construct
  misc_feature 1..219: note = Synthetic
  source 1..219: mol_type = other DNA
atttctgattggtttgttattgtaggtgtggctaaacatacagataaaactatggaaagaagtggagctacttcacctatgttgattgttggacaaccatctgaaaccatggcatcgaatgacgaaagacatattgaatatcacccagataccaccgtggaagagaccatcagagacatattgcaagacagcgactcggtccgcactagcctgaggtaa

SEQ ID NO: 6662 - DNA, 219 bp, synthetic construct
  source 1..219: mol_type = other DNA
  misc_feature 1..219: note = Synthetic
atttctgattggtttgttattgtaggtgtggctaaacatacagataaaactgccgaaagaagtggagctacttcacctatgttgattgttggacaaccatctgaaaccatggcatcgaatgacgaaagacatattgaatatcacccagataccaccgtggaagagaccatcagagacatattgcaagacagcgactcggtccgcactagcctgaggtaa

SEQ ID NO: 6663 - DNA, 180 bp, synthetic construct
  source 1..180: mol_type = other DNA
  misc_feature 1..180: note = Synthetic
ctgagagaagacatgactgcaattatcttcctagctctagtagcattgtctattcaagcacctatgtccaatagatgctttgaaggtggagttttggtagaagagaaagttatgaatcatggcattgctgaattatgcataaaggatgacatcgactcggtccgcactagcctgaggtaa

SEQ ID NO: 6664 - DNA, 24 bp, synthetic construct
  misc_feature 1..24: note = Synthetic
  source 1..24: mol_type = other DNA
acgccactgcaattatcttcctag

SEQ ID NO: 6665 - DNA, 81 bp, synthetic construct
  misc_feature 1..81: note = Synthetic
  source 1..81: mol_type = other DNA
atccaaaaaagacaaaacagaacaaacatatcaagacaaaaaatcataaggcccaagtcaccacccttagaccagccataa

SEQ ID NO: 6666 - DNA, 168 bp, synthetic construct
  source 1..168: mol_type = other DNA
  misc_feature 1..168: note = Synthetic
atgagcagaactacacggtcactgtccatggtagcgatggaaatcacactttcggtttcaaatttatttttgaagtcatgtgtgatatcacactgcatgtggctagacttcatggcttgtggccccctaccaaggagaacatggttgggttttctttggcttttgtaa

SEQ ID NO: 6667 - DNA, 198 bp, synthetic construct
  source 1..198: mol_type = other DNA
  misc_feature 1..198: note = Synthetic
atgagctcgttgaacagcaccgtacgccggtgcaggcgtttttcgccgcattttttcaggatcttggggtgtgcctcgagatccacgtcgggcttttgcgtgagatggcgcagaaagttgaccagggctaccacatcgcgccgctgtagaccgataaactgcaaactcatgctggcttttcgactcggtccgcactag

SEQ ID NO: 6668 - DNA, 54 bp, synthetic construct
  source 1..54: mol_type = other DNA
  misc_feature 1..54: note = Synthetic
gtgatgagaggcttggcggcagcgttatccgcaacctcaccagctttaagttga

SEQ ID NO: 6669 - DNA, 81 bp, synthetic construct
  misc_feature 1..81: note = Synthetic
  source 1..81: mol_type = other DNA
ttgacgctcaaacatcttgcggaagcgtgcttcacccatctcgtaagactcatgctcaagggccaactgttcgcgagctaa

SEQ ID NO: 6670 - DNA, 39 bp, synthetic construct
  source 1..39: mol_type = other DNA
  misc_feature 1..39: note = Synthetic
ataattacgtttgattcagatagtacttcgggttactga

SEQ ID NO: 6671 - DNA, 174 bp, synthetic construct
  source 1..174: mol_type = other DNA
  misc_feature 1..174: note = Synthetic
atggccctggacgcgctagcttcaatcttggagactgtattgcgcaaatgcggtatcaatgaaatttctagaataacaaccaagtttgaagaagcactcgatgattgcgggatgaaggtggacgactggagagaggcatattataacgactcggtccgcactagcctgaggtaa

SEQ ID NO: 6672 - DNA, 168 bp, synthetic construct
  misc_feature 1..168: note = Synthetic
  source 1..168: mol_type = other DNA
ctggacgcgctagcttcaatcttggagactgtattgcgcaaatgcggtatcaatgaaatttctagaataacaaccaagtttgaagaagcactcgatgattgcgggatgaaggtggacgactggagagaggcatattataacgactcggtccgcactagcctgaggtaa

SEQ ID NO: 6673 - DNA, 162 bp, synthetic construct
  misc_feature 1..162: note = Synthetic
  source 1..162: mol_type = other DNA
attgtgggcaaagaagaggaaataaaatttgacatccctttcaaagtgtggagaaagtatgccaccctccgacgtttagagtaccagagttgggaagagggtgaggtgctgctggtagaaagttttgacaaagacgactcggtccgcactagcctgaggtaa

SEQ ID NO: 6674 - DNA, 18 bp, synthetic construct
  source 1..18: mol_type = other DNA
  misc_feature 1..18: note = Synthetic
atgccaacaaccttctaa

SEQ ID NO: 6675 - DNA, 78 bp, synthetic construct
  misc_feature 1..78: note = Synthetic
  source 1..78: mol_type = other DNA
attccctcgaatccctaccaggaacaactgtcagacactccattaattcccgactcggtccgcactagcctgaggtaa

SEQ ID NO: 6676 - DNA, 195 bp, synthetic construct
  misc_feature 1..195: note = Synthetic
  source 1..195: mol_type = other DNA
ttgtgttttgctttatctgctgccatcatgcctacatactatcttgcgttacatgggggacagtcatataatctaattgttgacactgatatgtctggaaacccgtcactctccgtaattcccacgaatccttaccaggaacaactatcaaataatccattaattcacgactcggtccgcactagcctgaggtaa

SEQ ID NO: 6677 - DNA, 177 bp, synthetic construct
  source 1..177: mol_type = other DNA
  misc_feature 1..177: note = Synthetic
ctggtcaccgccacgcagtcagtttctctttctgatttcatcgttaagactgaagatggatatatgccatcagacagagaatgtgttgcattggatagatatttatccaaagagcagaaggaactaagagaaacttttaaggatggaaaaaatgcgactcggtccgcactagcctga

SEQ ID NO: 6678 - DNA, 165 bp, synthetic construct
  source 1..165: mol_type = other DNA
  misc_feature 1..165: note = Synthetic
aagattgtgggtacaggagaggagctaaaatttgacatcccctttaaagtatggagaaagtatgccgctgaacggggtttagaataccagagttgggaagagggaagtgaggtgctgctgggagaaaatttcaacagcgactcggtccgcactagcctgaggtaa

SEQ ID NO: 6679 - DNA, 162 bp, synthetic construct
  misc_feature 1..162: note = Synthetic
  source 1..162: mol_type = other DNA
attgtgggtacaggagaggagctaaaatttgacatcccctttaaagtatggagaaagtatgccgctgaacggggtttagaataccagagttgggaagagggaagtgaggtgctgctgggagaaaatttcaacagcgactcggtccgcactagcctgaggtaa

SEQ ID NO: 6680 - DNA, 42 bp, synthetic construct
  source 1..42: mol_type = other DNA
  misc_feature 1..42: note = Synthetic
atgcggaaagcaagaacaataaaggcggtggtatctagttga

SEQ ID NO: 6681 - DNA, 72 bp, synthetic construct
  source 1..72: mol_type = other DNA
  misc_feature 1..72: note = Synthetic
attgaagacttgctgcaggaagaacagacgcaacctttggacctgtccatgaaacgccctaagctgacttaa

SEQ ID NO: 6682 - DNA, 141 bp, synthetic construct
  misc_feature 1..141: note = Synthetic
  source 1..141: mol_type = other DNA
attcttcctctttggaccacggctaataaatcttacgtaacaccaacccctgcgactcgctctatcggacatatgtctgctcttctacgagaatattccgaccgtaatatgtccgactcggtccgcactagcctgaggtaa

SEQ ID NO: 6683 - DNA, 168 bp, synthetic construct
  source 1..168: mol_type = other DNA
  misc_feature 1..168: note = Synthetic
atggctttctcggcgtctttatttaaacccgtccagctagtcccagtttctcctgcatttcatcgcattgagtctactgactctattgttttcacatacattcctgctagcggctatgtagctgctttagctgtcaatgtcgactcggtccgcactagcctgaggtaa

SEQ ID NO: 6684 - DNA, 192 bp, synthetic construct
  misc_feature 1..192: note = Synthetic
  source 1..192: mol_type = other DNA
ctgggtagaaatcaaaatctttatgccctgggtcagacattgtggggaggaactatgaaggggctcttgctgattatcctttccctggtggggggtgtgctgtcatgccacgaacagccacgatgtaacatcaccacaggcaatgagaggagtgtcatatgcaccgactcggtccgcactagcctgaggtaa

SEQ ID NO: 6685 - DNA, 42 bp, synthetic construct
  misc_feature 1..42: note = Synthetic
  source 1..42: mol_type = other DNA
atctttatgccctgggtcagacattgtggggaggaactatga

SEQ ID NO: 6686 - DNA, 18 bp, synthetic construct
  misc_feature 1..18: note = Synthetic
  source 1..18: mol_type = other DNA
ctggactgggaacagtag

SEQ ID NO: 6687 - DNA, 204 bp, synthetic construct
  misc_feature 1..204: note = Synthetic
  source 1..204: mol_type = other DNA
atgcgccgtgggctaatcttggttacatctgacctcatggaggcttgggagtgtttggaagatttttctgctgtgcgtaacttgctggaacagagctctaacagtacctcttggttttggaggtttctgtggggctcctcccaggcaaagttagtctgcagaattaaggaggattacgactcggtccgcactagcctgaggtaa

SEQ ID NO: 6688 - DNA, 204 bp, synthetic construct
  source 1..204: mol_type = other DNA
  misc_feature 1..204: note = Synthetic
atgcgccgtgggctaatcttggttacatctgacctcgccgaggcttgggagtgtttggaagatttttctgctgtgcgtaacttgctggaacagagctctaacagtacctcttggttttggaggtttctgtggggctcctcccaggcaaagttagtctgcagaattaaggaggattacgactcggtccgcactagcctgaggtaa

SEQ ID NO: 6689 - DNA, 27 bp, synthetic construct
  source 1..27: mol_type = other DNA
  misc_feature 1..27: note = Synthetic
atgcgcaatattttgggttatacataa

SEQ ID NO: 6690 - DNA, 144 bp, synthetic construct
  source 1..144: mol_type = other DNA
  misc_feature 1..144: note = Synthetic
atgttttattgtgggttctctctcaggatgccgaagatgaggatgttcctgtctgctggatttgcaacgaggagctcggaaatgagagatttagagcctgtggatgcacaggagagctcgagaacgtccatagaagttgtttaa

SEQ ID NO: 6691 - DNA, 99 bp, synthetic construct
  misc_feature 1..99: note = Synthetic
  source 1..99: mol_type = other DNA
ctgttactcaaggcactgaccccgttaaaacttattaccagtacactcctgtatcatcaaaagccgcctatgacgccgactcggtccgcactagcctga

SEQ ID NO: 6692 - DNA, 177 bp, synthetic construct
  source 1..177: mol_type = other DNA
  misc_feature 1..177: note = Synthetic
ctggtcaccatgacgcagtcagtttctctttctgatttcatcgttaagactgaagatggatatatgccatcagacagagaatgtgttgcattggatagatatttatccaaagagcagaaggaactaagagaaacttttaaggatggaaaaaatgcgactcggtccgcactagcctga

SEQ ID NO: 6693 - DNA, 48 bp, synthetic construct
  source 1..48: mol_type = other DNA
  misc_feature 1..48: note = Synthetic
atgagctcacgcccgccgagactacagttaggctacgagcgtacatga

SEQ ID NO: 6694 - DNA, 186 bp, synthetic construct
  misc_feature 1..186: note = Synthetic
  source 1..186: mol_type = other DNA
aggctacgagcgtacatgaacaccccggggcttcccgtgtgccaggaccatcttgaattttgggagggcgtctttacgggcctcactcatatagatgcccactttctatcccagacaaagcagagtggggagaactttccttacctggtagcgtaccaagccaccgtgcgactcggtccgcactag

SEQ ID NO: 6695 - DNA, 57 bp, synthetic construct
  source 1..57: mol_type = other DNA
  misc_feature 1..57: note = Synthetic
atgcccactttctatcccagacaaagcagagtggggagaactttccttacctggtag

SEQ ID NO: 6696 - DNA, 18 bp, synthetic construct
  misc_feature 1..18: note = Synthetic
  source 1..18: mol_type = other DNA
atgaataaagacggttaa

SEQ ID NO: 6697 - DNA, 105 bp, synthetic construct
  source 1..105: mol_type = other DNA
  misc_feature 1..105: note = Synthetic
atgcttatgttactcgcaccaacatattttatcatgccagcagttctagacttcttgcagtgggacatccttatttttccatcgactcggtccgcactagcctga

SEQ ID NO: 6698 - DNA, 180 bp, synthetic construct
  source 1..180: mol_type = other DNA
  misc_feature 1..180: note = Synthetic
atgtggcggcctagcgacagcacagtatatgtgcctcctcctaaccctgtatccaaagttgttgccacgggcccttatgttactcgcaccaacatattttatcatgccagcagttctagacttcttgcagtgggacatccttatttttccatcgactcggtccgcactagcctgaggtaa

SEQ ID NO: 6699 - DNA, 213 bp, synthetic construct
  source 1..213: mol_type = other DNA
  misc_feature 1..213: note = Synthetic
ctgcttacgctggctgcccgacggcggcgaagaatgcgagcgacgccagtccgtacttatttttccgttttaaatggaagacgtggacgaggccaacctcctgcacctgctggaacgcttggcgggcagcggcgacgacgacttcggcgcaacgctggccgccatccgcgagctaatcagcgccacgactcggtccgcactagcctgaggtaa

SEQ ID NO: 6700 - DNA, 171 bp, synthetic construct
  source 1..171: mol_type = other DNA
  misc_feature 1..171: note = Synthetic
atcgcccctacatactatcttgcgttacatgggggacagtcatataatctaattgttgacactgatatgtctggaaacccgtcactctccgtaattcccacgaatccttaccaggaacaactatcaaataatccattaattcacgactcggtccgcactagcctgaggtaa

SEQ ID NO: 6701 - DNA, 18 bp, synthetic construct
  misc_feature 1..18: note = Synthetic
  source 1..18: mol_type = other DNA
atgccaccaaccttctaa

SEQ ID NO: 6702 - DNA, 168 bp, synthetic construct
  misc_feature 1..168: note = Synthetic
  source 1..168: mol_type = other DNA
atgcctacattctatcttgcgttacatgggggacaaacatatcatctaattgttgacacggatagtcgtggaaacccgtcactctcagtaattccctcgaatccctaccaggaacaactgtcagacactccattaattcccgactcggtccgcactagcctgaggtaa

SEQ ID NO: 6703 - DNA, 171 bp, synthetic construct
  misc_feature 1..171: note = Synthetic
  source 1..171: mol_type = other DNA
atcgcccctacattctatcttgcgttacatgggggacaaacatatcatctaattgttgacacggatagtcgtggaaacccgtcactctcagtaattccctcgaatccctaccaggaacaactgtcagacactccattaattcccgactcggtccgcactagcctgaggtaa

SEQ ID NO: 6704 - DNA, 210 bp, synthetic construct
  source 1..210: mol_type = other DNA
  misc_feature 1..210: note = Synthetic
atgtccaagctcattgagttttcagatcttggcgctgagatctcaaatagagaagaccttttcaaactgtctaatgacacatcatcttttaagattataaagccaacagtggctatcaaagattacattggaaccagtacgcattacgtagttttagatagaagagataatgatgaaactgccgatgttcttcgactcggtccgcactag

SEQ ID NO: 6705 - DNA, 63 bp, synthetic construct
  source 1..63: mol_type = other DNA
  misc_feature 1..63: note = Synthetic
atagaagagataatgatgaaactgccgatgttcttcgactcggtccgcactagcctgaggtaa

SEQ ID NO: 6706 - DNA, 165 bp, synthetic construct
  source 1..165: mol_type = other DNA
  misc_feature 1..165: note = Synthetic
atggcagaagcgtctgagttcaactttaccacaaagagaaagcaaagaataatgagtgatcgaagaacaagagaagacacaaaacaaaaaaagattgaagaaaaatctgatgttgacttggttgattcagcctcagtttattcgactcggtccgcactagcctga

SEQ ID NO: 6707 - DNA, 132 bp, synthetic construct
  misc_feature 1..132: note = Synthetic
  source 1..132: mol_type = other DNA
aagagaaagcaaagaataatgagtgatcgaagaacaagagaagacacaaaacaaaaaaagattgaagaaaaatctgatgttgacttggttgattcagcctcagtttattcgactcggtccgcactagcctga

SEQ ID NO: 6708 - DNA, 12 bp, synthetic construct
  source 1..12: mol_type = other DNA
  misc_feature 1..12: note = Synthetic
atgcaagcataa

SEQ ID NO: 6709 - DNA, 93 bp, synthetic construct
  source 1..93: mol_type = other DNA
  misc_feature 1..93: note = Synthetic
atcgtacctatggtagttgacgactacgctggagcatttacagggaggagtgtgtgttcagcggctaataaagatatccggacatggccttaa

SEQ ID NO: 6710 - DNA, 111 bp, synthetic construct
  misc_feature 1..111: note = Synthetic
  source 1..111: mol_type = other DNA
atgttcccttacaaacttctgcaaaaccttctattactagtgggcctatggctcgtcctcctgtggtggtggagcctgtggccccttcggatccatctattgtgtctttaa

SEQ ID NO: 6711 - DNA, 168 bp, synthetic construct
  source 1..168: mol_type = other DNA
  misc_feature 1..168: note = Synthetic
atggacgcgccgcgcgagtgccagcgagtgatccttgccaagccgtatctgacggtcgtcctggagcctagcccccggttcccggtgctgctgccaataccaggccacgtgctcaagtgcgtcgacgtggagcctgaggccgactcggtccgcactagcctgaggtaa

SEQ ID NO: 6712 - DNA, 108 bp, synthetic construct
  misc_feature 1..108: note = Synthetic
  source 1..108: mol_type = other DNA
ctggagcctagcccccggttcccggtgctgctgccaataccaggccacgtgctcaagtgcgtcgacgtggagcctgaggccgactcggtccgcactagcctgaggtaa

SEQ ID NO: 6713 - DNA, 36 bp, synthetic construct
  misc_feature 1..36: note = Synthetic
  source 1..36: mol_type = other DNA
atgcaggtgacttttattcgactcggtccgcactag

SEQ ID NO: 6714 - DNA, 204 bp, synthetic construct
  misc_feature 1..204: note = Synthetic
  source 1..204: mol_type = other DNA
atacaacagagaagaaacgaacgcacgctggtcgccatggccttgagcatcaacgactgcgcgcgcctcacgggccagaccgtgcccaccatgaactacttcctgccgctgcgcaacatctggaaccgcgtccgcgagttccctcgcgcctccaccaccgccgccggcatcacctgcgactcggtccgcactagcctgaggtaa

SEQ ID NO: 6715 - DNA, 120 bp, synthetic construct
  source 1..120: mol_type = other DNA
  misc_feature 1..120: note = Synthetic
atggcaacgcgagccgtaggcgctatactagctcgacacaggacgatggcggaagagggcaaaggcgactggagcaggcgctatggcagtagcaagcaattcgacaggtttttcatatag

SEQ ID NO: 6716 - DNA, 123 bp, synthetic construct
  misc_feature 1..123: note = Synthetic
  source 1..123: mol_type = other DNA
atgtcaacaactcatgacccaaagtgcaggagtgccccccctttgcgggttgcgtggaagtatgacacgtggtttggcttggttcctgggatagccaaaacgactcggtccgcactagcctga

SEQ ID NO: 6717 - DNA, 60 bp, synthetic construct
  source 1..60: mol_type = other DNA
  misc_feature 1..60: note = Synthetic
atgaaacccagaatagccggcagtgcatcctttttaataaaattcgcctcgtctacgtag

SEQ ID NO: 6718 - DNA, 171 bp, synthetic construct
  source 1..171: mol_type = other DNA
  misc_feature 1..171: note = Synthetic
atcgccatgacaccagaaaacgacgaagagcaaacatctgtgttctccgccactgtttacggagacaaaattcagggaaaaaataaacgcaaacgcgtaattggtatatgtattagaatatctatggttatttcactactatccgactcggtccgcactagcctgaggtaa

SEQ ID NO: 6719 - DNA, 165 bp, synthetic construct
  source 1..165: mol_type = other DNA
  misc_feature 1..165: note = Synthetic
atgacaccagaaaacgacgaagagcagacatctgtgttctccgctactgtttacggagacaaaattcagggaaagaataaacgcaaacgcgtgattggtctatgtattagaatatctatggttatttcactactatccgactcggtccgcactagcctgaggtaa

SEQ ID NO: 6720 - DNA, 171 bp, synthetic construct
  source 1..171: mol_type = other DNA
  misc_feature 1..171: note = Synthetic
atcgccatgacaccagaaaacgacgaagagcagacatctgtgttctccgctactgtttacggagacaaaattcagggaaagaataaacgcaaacgcgtgattggtctatgtattagaatatctatggttatttcactactatccgactcggtccgcactagcctgaggtaa

SEQ ID NO: 6721 - DNA, 60 bp, synthetic construct
  misc_feature 1..60: note = Synthetic
  source 1..60: mol_type = other DNA
attgccgcgatgaagtggaaattgaagccagcggcggcggcggtggtggcggcggtgtaa

SEQ ID NO: 6722 - DNA, 168 bp, synthetic construct
  source 1..168: mol_type = other DNA
  misc_feature 1..168: note = Synthetic
atggccctgcaaactgacacacatgcctggcgggtggagatagggaccaggggactaatgttctctaactgtgtcccactccacctgccggagggacagtaccacaagctccggctgcccgtctcggcctacgaggccctcgactcggtccgcactagcctgaggtaa

SEQ ID NO: 6723 - DNA, 180 bp, synthetic construct
  misc_feature 1..180: note = Synthetic
  source 1..180: mol_type = other DNA
acgggcaccgaggtagatcaatgtctggcctatcggagcctgacacgcaaaaagctggaacaacacgcggctaaaaagcagaacatctacgaacggattccataccggccctccagacagaacgacaactccccgttgatcgaaccgacgggcacagcgactcggtccgcactagcctga

SEQ ID NO: 6724 - DNA, 15 bp, synthetic construct
  source 1..15: mol_type = other DNA
  misc_feature 1..15: note = Synthetic
atgccagatctgtaa

SEQ ID NO: 6725 - DNA, 57 bp, synthetic construct
  misc_feature 1..57: note = Synthetic
  source 1..57: mol_type = other DNA
atggagagagcgtgcacacaaacagtaattttagggatggtggatgttttcgcttga

SEQ ID NO: 6726 - DNA, 30 bp, synthetic construct
  misc_feature 1..30: note = Synthetic
  source 1..30: mol_type = other DNA
atccaatgttgccacgattatatgaaatga

SEQ ID NO: 6727 - DNA, 204 bp, synthetic construct
  misc_feature 1..204: note = Synthetic
  source 1..204: mol_type = other DNA
ttgccacgattatatgaaatgatgcttccttctttggaggcgcgactgaattttcttagtgttggatatagacacgttgcttttgctagatacgttcacggggatgtcgattgcgtgcatagagaggtcatggctcaaaaaatggtacttcttacttcgatattgtcaaagctgttaaatgcgactcggtccgcactagcctga

SEQ ID NO: 6728 - DNA, 168 bp, synthetic construct
  source 1..168: mol_type = other DNA
  misc_feature 1..168: note = Synthetic
atgatgacaccagaaaacgacgaagagcagacatctgtgttctccgctactgtttacggagacaaaattcaaggaaagaataaacgcaaacgcgtgattggtctatgtattagaatatctatggttatttcactactatccgactcggtccgcactagcctgaggtaa

SEQ ID NO: 6729 - DNA, 171 bp, synthetic construct
  source 1..171: mol_type = other DNA
  misc_feature 1..171: note = Synthetic
atcgccatgacaccagaaaacgacgaagagcagacatctgtgttctccgctactgtttacggagacaaaattcaaggaaagaataaacgcaaacgcgtgattggtctatgtattagaatatctatggttatttcactactatccgactcggtccgcactagcctgaggtaa

SEQ ID NO: 6730 - DNA, 165 bp, synthetic construct
  misc_feature 1..165: note = Synthetic
  source 1..165: mol_type = other DNA
atgacaccagaaaacgacgaagagcaaacatctgtgttctccgccactgtttacggagacaaaattcagggaaaaaataaacgcaaacgcgtaattggtatatgtattagaatatctatggttatttcactactatccgactcggtccgcactagcctgaggtaa

SEQ ID NO: 6731 - DNA, 162 bp, synthetic construct
  misc_feature 1..162: note = Synthetic
  source 1..162: mol_type = other DNA
ctgcaaactgacacacatgcctggcgggtggagatagggaccaggggactaatgttctctaactgtgtcccactccacctgccggagggacagtaccacaagctccggctgcccgtctcggcctacgaggccctcgactcggtccgcactagcctgaggtaa

SEQ ID NO: 6732 - DNA, 168 bp, synthetic construct
  source 1..168: mol_type = other DNA
  misc_feature 1..168: note = Synthetic
atggccctgcaaactgacacacaggcctggcgggtggagatagggaccagaggactaatgttctctaactgtgtcccactccacctgccggagggacagtaccacaagctccggctgcccgtctcggcctacgaggccctcgactcggtccgcactagcctgaggtaa

SEQ ID NO: 6733 - DNA, 162 bp, synthetic construct
  misc_feature 1..162: note = Synthetic
  source 1..162: mol_type = other DNA
ctgcaaactgacacacaggcctggcgggtggagatagggaccagaggactaatgttctctaactgtgtcccactccacctgccggagggacagtaccacaagctccggctgcccgtctcggcctacgaggccctcgactcggtccgcactagcctgaggtaa

SEQ ID NO: 6734 - DNA, 168 bp, synthetic construct
  source 1..168: mol_type = other DNA
  misc_feature 1..168: note = Synthetic
atggctaccttctatgaagtcattgttcgcgttccatttgatgtggaagagcacctgcctggaatttctgacaactttgtagactgggtaactggtcaaatttgggagctgcctcccgagtcagatttgaatttgactctcgactcggtccgcactagcctgaggtaa

SEQ ID NO: 6735 - DNA, 126 bp, synthetic construct
  source 1..126: mol_type = other DNA
  misc_feature 1..126: note = Synthetic
aggggtattaatatcagggtatcaaataataaaatgttaactataactagttttcgacgattcgtcaataaacttaaaatgtacaaaactactaaatgcgactcggtccgcactagcctgaggtaa

SEQ ID NO: 6736 - DNA, 60 bp, synthetic construct
  misc_feature 1..60: note = Synthetic
  source 1..60: mol_type = other DNA
atgtcttcaagtggagcatcaggcagacccctccttattgctttaattttgctcatgtaa

SEQ ID NO: 6737 - DNA, 48 bp, synthetic construct
  source 1..48: mol_type = other DNA
  misc_feature 1..48: note = Synthetic
atgagtgtcttctgcttgattcctctgctggccaggattttttcgtag

SEQ ID NO: 6738 - DNA, 120 bp, synthetic construct
  misc_feature 1..120: note = Synthetic
  source 1..120: mol_type = other DNA
ctgatttgcttgctattgggcgcggtaatgattcctacgatgaaaataaaaacggcttgcttgttctcgatgagtgcggtacttggtttaatcgactcggtccgcactagcctgaggtaa

SEQ ID NO: 6739 - DNA, 168 bp, synthetic construct
  source 1..168: mol_type = other DNA
  misc_feature 1..168: note = Synthetic
atggaagagaccaaagttaagacatcagagtactgggccaggagtcctcaaattcacgcaacaaatcatcctaacgtacagaacagagagaagatcaaagaaatattaacaattttaatatcatttatttcttccctatccgactcggtccgcactagcctgaggtaa

SEQ ID NO: 6740 - DNA, 45 bp, synthetic construct
  source 1..45: mol_type = other DNA
  misc_feature 1..45: note = Synthetic
atcatcctaacgtacagaacagagagaagatcaaagaaatattaa

SEQ ID NO: 6741 - DNA, 168 bp, synthetic construct
  source 1..168: mol_type = other DNA
  misc_feature 1..168: note = Synthetic
atgaatagaggattctttaacatgctcggccgccgccccttcccggcccccactgccatgtggaggccgcggagaaggaggcaggcggccccgatgcctgcccgcaacgggctggcttctcaaatccagcaactgaccaccgactcggtccgcactagcctgaggtaa

SEQ ID NO: 6742 - DNA, 147 bp, synthetic construct
  misc_feature 1..147: note = Synthetic
  source 1..147: mol_type = other DNA
atgctcggccgccgccccttcccggcccccactgccatgtggaggccgcggagaaggaggcaggcggccccgatgcctgcccgcaacgggctggcttctcaaatccagcaactgaccaccgactcggtccgcactagcctgaggtaa

SEQ ID NO: 6743 - DNA, 105 bp, synthetic construct
  source 1..105: mol_type = other DNA
  misc_feature 1..105: note = Synthetic
gtgcttgccaaaggcagaagaaagtcacatttgacagactgcaagttctggacagccattaccaggacgtgctcaaggaggtcaaagcagcggcgtcaaaagtga

SEQ ID NO: 6744 - DNA, 144 bp, synthetic construct
  misc_feature 1..144: note = Synthetic
  source 1..144: mol_type = other DNA
atgtatgcaggtaagcaactgagccgaacgcacctcagcagacgagaggatgtcgtcgcggcgtcgcagctcgtcacgtcgctctggcgaaccctcgacggtgatttatatcccctcgagcaacgaggacacgccggcggatga

SEQ ID NO: 6745 - DNA, 144 bp, synthetic construct
  source 1..144: mol_type = other DNA
  misc_feature 1..144: note = Synthetic
atgtatgcaggtaagcaactgagccgaacgcacctcagcagacgagagggcctcgtcgcggcgtcgcagctcgtcacgtcgctctggcgaaccctcgacggtgatttatatcccctcgagcaacgaggacacgccggcggatga

SEQ ID NO: 6746 - DNA, 204 bp, synthetic construct
  source 1..204: mol_type = other DNA
  misc_feature 1..204: note = Synthetic
atacaacagagaagaaacgaacgcacgctggtcgccgccgccttgagcatcaacgactgcgcgcgcctcacgggccagaccgtgcccaccatgaactacttcctgccgctgcgcaacatctggaaccgcgtccgcgagttccctcgcgcctccaccaccgccgccggcatcacctgcgactcggtccgcactagcctgaggtaa

SEQ ID NO: 6747 - DNA, 162 bp, synthetic construct
  misc_feature 1..162: note = Synthetic
  source 1..162: mol_type = other DNA
ttgttcacatgtgtcaggatgacgagtttccggatctacaagatcctccagatgaggcctaagcaaaggtgtagaagtgtgtccccctccattccacccactgataatacgcccgacaataaagttgatgatattgaattccacacctgcttgtgtttgtga

SEQ ID NO: 6748 - DNA, 15 bp, synthetic construct
  source 1..15: mol_type = other DNA
  misc_feature 1..15: note = Synthetic
atggttgattattaa

SEQ ID NO: 6749 - DNA, 138 bp, synthetic construct
  source 1..138: mol_type = other DNA
  misc_feature 1..138: note = Synthetic
acgccgccgtctatgcgtccagtacacagctcgcgcgggcgttatatggaggggatctggtttcgtggattaaacacacccacccgggaattagcctggaactgcaattggatgtcgactcggtccgcactagcctga

SEQ ID NO: 6750 - DNA, 168 bp, synthetic construct
  misc_feature 1..168: note = Synthetic
  source 1..168: mol_type = other DNA
atggctcgcggggccgggttggtgttttttgttggagtttgggtcgtatcgtgcctggcggcagcacccagaacgtcctggaaacgggtaacctcgggcgaggacgtggtgttgcttccggcgcccgcggaacgcacccgcgactcggtccgcactagcctgaggtaa

SEQ ID NO: 6751 - DNA, 168 bp, synthetic construct
  source 1..168: mol_type = other DNA
  misc_feature 1..168: note = Synthetic
atgtcgtcggtgttcactgactacgctaagctgcaagatgcccttgtggccccttcaaaaaggaaggtggatagtgcaccaagcggattgttaagggttgggatccctgtgtgtgtcctactctccgaggatcctgaagacgactcggtccgcactagcctgaggtaa

SEQ ID NO: 6752 - DNA, 201 bp, synthetic construct
  source 1..201: mol_type = other DNA
  misc_feature 1..201: note = Synthetic
atcgctagagacagccgatctccacgcgaccccatggccgctcccaaccgcgaccctccgggataccggtatgccgcggccatggtgccgaccgggtccctccttagcacgatcgaggtggcgtcgcatcgacgcctgtttgattttttttcccgcgtgcgctccgatgcaaacgactcggtccgcactagcctgaggtaa

SEQ ID NO: 6753 - DNA, 102 bp, synthetic construct
  misc_feature 1..102: note = Synthetic
  source 1..102: mol_type = other DNA
aaggatatcatgtcggatttgttgatggaacgccacaactattttggtagagaagtgtgccaatacttagacatcgactcggtccgcactagcctgaggtaa

SEQ ID NO: 6754 - DNA, 93 bp, synthetic construct
  source 1..93: mol_type = other DNA
  misc_feature 1..93: note = Synthetic
atgtcggatttgttgatggaacgccacaactattttggtagagaagtgtgccaatacttagacatcgactcggtccgcactagcctgaggtaa

SEQ ID NO: 6755 - DNA, 21 bp, synthetic construct
  misc_feature 1..21: note = Synthetic
  source 1..21: mol_type = other DNA
atgatcttgcagttggcctga

SEQ ID NO: 6756 - DNA, 201 bp, synthetic construct
  misc_feature 1..201: note = Synthetic
  source 1..201: mol_type = other DNA
atgcgggccaatgcgcttactgatgcggaattacgccgtaaggccgcagatgagcttgtccatatgactgcgagaattaaccgtggtgaggcgatccctgaaccagtaaaacaacttcctgtcatgggcggtagacctctaaatcgcccacaggctctggcgaagatcgcagaaatcacgactcggtccgcactagcctga

SEQ ID NO: 6757 - DNA, 201 bp, synthetic construct
  misc_feature 1..201: note = Synthetic
  source 1..201: mol_type = other DNA
atgcgggccaatgcgcttactgatgcggaattacgccgtaaggccgcagatgagcttgtccatatgactgcgagaattaaccgtggtgaggcgatccctgaaccagtaaaacaacttcctgtcatgggcggtagacctctaaatcgtgcacaggctctggcgaagatcgcagaaatcacgactcggtccgcactagcctga

SEQ ID NO: 6758 - DNA, 201 bp, synthetic construct
  misc_feature 1..201: note = Synthetic
  source 1..201: mol_type = other DNA
atgcgggccaatgcgcttactgatgcggaattacgccgtaaggccgcagatgagcttgtccatatgactgcgagaattaaccgtggtgaggcgatccctgaaccagtaaaacaacttcctgtcatgggcggtagacctctaaatcgtgcacaggctgccgcgaagatcgcagaaatcacgactcggtccgcactagcctga

SEQ ID NO: 6759 - DNA, 216 bp, synthetic construct
  misc_feature 1..216: note = Synthetic
  source 1..216: mol_type = other DNA
attgtaactgttttctgtttggacaacatcaaaaacatccattgcacaatggggcagttcattagcttcatgcaagaaataccaacctttttgcaggaggctctgaacattgctcttgttgcagtcagtctcattgccatcattaagggtatagtgaacttgtacaaaagtggtttattccaattcttcgactcggtccgcactagcctgaggtaa

SEQ ID NO: 6760 - DNA, 156 bp, synthetic construct
  source 1..156: mol_type = other DNA
  misc_feature 1..156: note = Synthetic
attagcttcatgcaagaaataccaacctttttgcaggaggctctgaacattgctcttgttgcagtcagtctcattgccatcattaagggtatagtgaacttgtacaaaagtggtttattccaattcttcgactcggtccgcactagcctgaggtaa

SEQ ID NO: 6761 - DNA, 69 bp, synthetic construct
  misc_feature 1..69: note = Synthetic
  source 1..69: mol_type = other DNA
atgacccggcgatacaacctggctaccgcacgtttaaacgggactagctggcgactcggtccgcactag

SEQ ID NO: 6762 - DNA, 213 bp, synthetic construct
  source 1..213: mol_type = other DNA
  misc_feature 1..213: note = Synthetic
gtggaattggctaagataggaaaagagagaatgattaatcggtttgttgaaaaacccaggacctcaacgccggtaacagaatttaagaggggggccgggagcggctgctcaaggccagacaatccaagaggagggcatagacgggaatggagcctcagctgggtccaaggagaggtccgggtcttcgactcggtccgcactagcctgaggtaa

SEQ ID NO: 6763 - DNA, 213 bp, synthetic construct
  source 1..213: mol_type = other DNA
  misc_feature 1..213: note = Synthetic
gtggaattggctaagataggaaaagagagaatgattaatcggtttgttgaaaaacccaggacctcaacgccggtaacagaatttaagaggggggccgggagcggctgctcaaggccagacaatccaagaggagggcatagacgggaatggagcctcagctgggtccagccagaggtccgggtcttcgactcggtccgcactagcctgaggtaa

SEQ ID NO: 6764 - DNA, 27 bp, synthetic construct
  source 1..27: mol_type = other DNA
  misc_feature 1..27: note = Synthetic
atgaaaaataaatactattacgagtga

SEQ ID NO: 6765 - DNA, 78 bp, synthetic construct
  misc_feature 1..78: note = Synthetic
  source 1..78: mol_type = other DNA
acgagaaaacttaatttccgttgtatgatgacgctaagttttgttacgtcaactacgactcggtccgcactagcctga

SEQ ID NO: 6766 - DNA, 36 bp, synthetic construct
  source 1..36: mol_type = other DNA
  misc_feature 1..36: note = Synthetic
aagatactgttgacgactcggtccgcactagcctga

SEQ ID NO: 6767 - DNA, 213 bp, synthetic construct
  misc_feature 1..213: note = Synthetic
  source 1..213: mol_type = other DNA
atgaactggcttaagtctgctgctaagctgctggctgctgaggtcaaagataagaagagccgagagattcttcgcaagcgttgcgctgtgcattgggtaactcctgatggtttccctgtgtggcaggaatacaagaagcctattcagacgcgcttgaacctgatgttcctcggtcagttccgcttacagccgactcggtccgcactagcctga

SEQ ID NO: 6768 - DNA, 201 bp, synthetic construct
  misc_feature 1..201: note = Synthetic
  source 1..201: mol_type = other DNA
aagtctgctgctaagctgctggctgctgaggtcaaagataagaagactggagagattcttcgcaagcgttgcgctgtgcattgggtaactcctgatggtttccctgtgtggcaggaatacaagaagcctattcagacgcgcttgaacctgatgttcctcggtcagttccgcttacagccgactcggtccgcactagcctga

SEQ ID NO: 6769 - DNA, 63 bp, synthetic construct
  misc_feature 1..63: note = Synthetic
  source 1..63: mol_type = other DNA
gtggcctcttcaagtggagcatcaggcagacccctccttattgctttaattttgctcatgtaa

SEQ ID NO: 6770 - DNA, 18 bp, synthetic construct
  source 1..18: mol_type = other DNA
  misc_feature 1..18: note = Synthetic
ttggtaactacgtcgtag

SEQ ID NO: 6771 - DNA, 30 bp, synthetic construct
  misc_feature 1..30: note = Synthetic
  source 1..30: mol_type = other DNA
ctgcagcaatccatgttatttaactcgtga

SEQ ID NO: 6772 - DNA, 69 bp, synthetic construct
  source 1..69: mol_type = other DNA
  misc_feature 1..69: note = Synthetic
atggacagattgagtaaaaatttgttttttctgtcttgcagctgtcatgagtggaaacgcttcttttaa

SEQ ID NO: 6773 - DNA, 78 bp, synthetic construct
  source 1..78: mol_type = other DNA
  misc_feature 1..78: note = Synthetic
atgttatgggatctactgtggatggaagacccgtccaacccgccaattcttcaaccgactcggtccgcactagcctga

SEQ ID NO: 6774 - DNA, 69 bp, synthetic construct
  source 1..69: mol_type = other DNA
  misc_feature 1..69: note = Synthetic
atggacagattgagtaaaaatttgttttttctgtcttgcagctgtcgccagtggaaacgcttcttttaa

SEQ ID NO: 6775 - DNA, 198 bp, synthetic construct
  misc_feature 1..198: note = Synthetic
  source 1..198: mol_type = other DNA
atattggggtttaatgataaaatccaggttatggatatgaggaaactgaatacctcgcagggtcgaaatcttaccacagttgatgatagaagacggttttccatcgggtgggaaacatgggatgacggtggagagtctctatacgatgtgactaataatggtacaacggtcgactcggtccgcactagcctgaggtaa

SEQ ID NO: 6776 - DNA, 162 bp, synthetic construct
  misc_feature 1..162: note = Synthetic
  source 1..162: mol_type = other DNA
atgaggaaactgaatacctcgcagggtcgaaatcttaccacagttgatgatagaagacggttttccatcgggtgggaaacatgggatgacggtggagagtctctatacgatgtgactaataatggtacaacggtcgactcggtccgcactagcctgaggtaa

SEQ ID NO: 6777 - DNA, 153 bp, synthetic construct
  misc_feature 1..153: note = Synthetic
  source 1..153: mol_type = other DNA
aggagtgttctgaccctttactcatcattctttgtcgatcggcagagacgtatgatgttacgcgtggctcgaatcctagggcaaatgcctgagagccagttcagaggatcaggttacgggtattacgactcggtccgcactagcctgaggtaa

SEQ ID NO: 6778 - DNA, 198 bp, synthetic construct
  misc_feature 1..198: note = Synthetic
  source 1..198: mol_type = other DNA
atggatctgatcgagacagtgaacgcatgcgtaaaattgcaaaagcgagtacttggtttggctccaaatacgaatctcaatacagctggacaaagcgtattaaatgattacaacgcactggcttctcgagtaaacgggaaaacgtatgcactgctgaatcagatagctgtcgactcggtccgcactagcctgaggtaa

SEQ ID NO: 6779 - DNA, 216 bp, synthetic construct
  source 1..216: mol_type = other DNA
  misc_feature 1..216: note = Synthetic
attggaatcatccttgcaatagccgcttaccgcgatacgcttggcgaattgtttagcatcattaaggacgtttcaaaagatgctaaggggtttggctattgggtattggcggcggttattttgggattcgcggcaagtatcaagccaataaaagagccggttaatgcgtttatgattttgctgatgatcgactcggtccgcactagcctgaggtaa

SEQ ID NO: 6780 - DNA, 180 bp, synthetic construct
  source 1..180: mol_type = other DNA
  misc_feature 1..180: note = Synthetic
atcacccgcctcatggacccgccgctgccgtcgctacattcgccgcaatgggcttccctcctgcagctgcaccacggccttatgtggctgcgccgttttgctgtcctcgtccgggtctacgccctagtggtctttcacatcgccatcagtaccgactcggtccgcactagcctgaggtaa

SEQ ID NO: 6781 - DNA, 180 bp, synthetic construct
  source 1..180: mol_type = other DNA
  misc_feature 1..180: note = Synthetic
atcacccgcctcgccgacccgccgctgccgtcgctacattcgccgcaatgggcttccctcctgcagctgcaccacggccttatgtggctgcgccgttttgctgtcctcgtccgggtctacgccctagtggtctttcacatcgccatcagtaccgactcggtccgcactagcctgaggtaa

SEQ ID NO: 6782 - DNA, 45 bp, synthetic construct
  source 1..45: mol_type = other DNA
  misc_feature 1..45: note = Synthetic
atgactagctatatagccgctgcgactcggtccgcactagcctga

SEQ ID NO: 6783 - DNA, 198 bp, synthetic construct
  misc_feature 1..198: note = Synthetic
  source 1..198: mol_type = other DNA
atgacgtctaagcggctgggtacaaggttgaccggcttcctgagtcgaataggctcggggatttcgaaagcagtgagaagcgacacaacgaagcgagttttaagcgcggcggggcgagcggcggagcgcgccatatcatctgaggtcgggcaacgtgcgataactggtgcggtggaaggccgactcggtccgcactag

SEQ ID NO: 6784 - DNA, 183 bp, synthetic construct
  misc_feature 1..183: note = Synthetic
  source 1..183: mol_type = other DNA
ctgggtacaaggttgaccggcttcctgagtcgaataggctcggggatttcgaaagcagtgagaagcgacacaacgaagcgagttttaagcgcggcggggcgagcggcggagcgcgccatatcatctgaggtcgggcaacgtgcgataactggtgcggtggaaggccgactcggtccgcactag

SEQ ID NO: 6785 - DNA, 201 bp, synthetic construct
  source 1..201: mol_type = other DNA
  misc_feature 1..201: note = Synthetic
atggacgcgtacacagccagagcgctttcggttttggagggcctagccatttcaggagatccacgctcacacagagacccgactacggaggcgacgatgtcgatcttcgcgatgaggttcaacagtacgacttcgcgcccagtgattggaacgccgacgacgagggaggcaagacgcaataaccgactcggtccgcactag

SEQ ID NO: 6786 - DNA, 171 bp, synthetic construct
  source 1..171: mol_type = other DNA
  misc_feature 1..171: note = Synthetic
attcgcaaattcaaaccggttggaggagcggcacttggcctgaggacgatcgaggctttgtctgacatatggacgtgcggccacaagcgattctcatgcatgtaccaaggccagtgtgttgtgcagaaccttgacgcctttgtcgcgccgactcggtccgcactagcctga

SEQ ID NO: 6787 - DNA, 66 bp, synthetic construct
  misc_feature 1..66: note = Synthetic
  source 1..66: mol_type = other DNA
atggacgtgcggccacaagcgattctcatgcatgtaccaaggccagtgtgttgtgcagaaccttga

SEQ ID NO: 6788 - DNA, 201 bp, synthetic construct
  source 1..201: mol_type = other DNA
  misc_feature 1..201: note = Synthetic
attgctgcaaacgcaacgatgtctgccgacaagcaaattccgatgatccgaaagccctttacccgaacaatcgtcctcaagagtacggggaaagatgactacgtcgcgaaaatgtgcaacgcgttggggtgtgagtacttagttgtacgtcatggactcgggatgcacgtggccgactcggtccgcactagcctgaggtaa

SEQ ID NO: 6789 - DNA, 222 bp, synthetic construct
  source 1..222: mol_type = other DNA
  misc_feature 1..222: note = Synthetic
atttcctcatttccgagcgaaattgctgcaaacgcaacggcctctgccgacaagcaaattccgatgatccgaaagccctttacccgaacaatcgtcctcaagagtacggggaaagatgactacgtcgcgaaaatgtgcaacgcgttggggtgtgagtacttagttgtacgtcatggactcgggatgcacgtggccgactcggtccgcactagcctgaggtaa

SEQ ID NO: 6790 - DNA, 210 bp, synthetic construct
  misc_feature 1..210: note = Synthetic
  source 1..210: mol_type = other DNA
atggcaaatccgcaaaatcgagtgcaaacagaaagacagcagagcaacagctcaccatatctaagaggcgatgaagtacacgacgaccctggaatcgcattgtctgtcttcgccctacaagagatcatccgaaaagtccgagagtcacagacttcactgcgcaatgaggggcgtgaggtcaacgactcggtccgcactagcctgaggtaa

SEQ ID NO: 6791 - DNA, 48 bp, synthetic construct
  misc_feature 1..48: note = Synthetic
  source 1..48: mol_type = other DNA
atcgagtgcaaacagaaagacagcagagcaacagctcaccatatctaa

SEQ ID NO: 6792 - DNA, 135 bp, synthetic construct
  source 1..135: mol_type = other DNA
  misc_feature 1..135: note = Synthetic
atgaagtacacgacgaccctggaatcgcattgtctgtcttcgccctacaagagatcatccgaaaagtccgagagtcacagacttcactgcgcaatgaggggcgtgaggtcaacgactcggtccgcactagcctga

SEQ ID NO: 6793 - DNA, 183 bp, synthetic construct
  misc_feature 1..183: note = Synthetic
  source 1..183: mol_type = other DNA
aagtttttagtgccgaaaaagatggaaagtcgtcaacgtggtcctccttctcaaccgccctctctgaaatccagaaagaacgggtaccgggcctggaggagaaaacatccattgactttgaggttgatggaaagagatactctcttgtatcctcgcgtaagccaacgactcggtccgcactag

SEQ ID NO: 6794 - DNA, 153 bp, synthetic construct
  source 1..153: mol_type = other DNA
  misc_feature 1..153: note = Synthetic
acgtggtcctccttctcaaccgccctctctgaaatccagaaagaacgggtaccgggcctggaggagaaaacatccattgactttgaggttgatggaaagagatactctcttgtatcctcgcgtaagccaacgactcggtccgcactagcctga

SEQ ID NO: 6795 - DNA, 168 bp, synthetic construct
  misc_feature 1..168: note = Synthetic
  source 1..168: mol_type = other DNA
atggagaccaaagggcgccaagcgacagaagttttcgaccagcaggatgagtctgaagcgcaccctggcaagcgcccaagcaggcgcacaccccttcactgtgacggaaacaaccctgactcgaacactgagaccctggacgactcggtccgcactagcctgaggtaa

SEQ ID NO: 6796 - DNA, 213 bp, synthetic construct
  misc_feature 1..213: note = Synthetic
  source 1..213: mol_type = other DNA
atgttcgggccacacacggtgattctgctgcatcagtctttacggcgttataggaaggagctctatggaccaagttttcaaatacgacgcgattggacgttaaacgacctatggcgtgagaatggacgttacgctacagatgtgtacgctgagggtgatgtatcatggcttacaatcaggcaggtgcgtgcacaccgactcggtccgcactag

SEQ ID NO: 6797 - DNA, 39 bp, synthetic construct
  source 1..39: mol_type = other DNA
  misc_feature 1..39: note = Synthetic
atggaccaagttttcaaatacgacgcgattggacgttaa

SEQ ID NO: 6798 - DNA, 153 bp, synthetic construct
  misc_feature 1..153: note = Synthetic
  source 1..153: mol_type = other DNA
atttcaggagatccacgctcacacagagacccgactacggaggcgacgatgtcgatcttcgcgatgaggttcaacagtacgacttcgcgcccagtgattggaacgccgacgacgagggaggcaagacgcaataaccgactcggtccgcactag

SEQ ID NO: 6799 - DNA, 171 bp, synthetic construct
  misc_feature 1..171: note = Synthetic
  source 1..171: mol_type = other DNA
ttgaatgctctggacatggaaaaaatgaaagttggtaagcgactcccttccgtggtttggtggaaaagtcacaagggtaccatagcgaggaaccccggttcgaaaccggcaggatccgctatgagcacaagtgaggcgcttgcgcgttcgactcggtccgcactagcctga

SEQ ID NO: 6800 - DNA, 216 bp, synthetic construct
  misc_feature 1..216: note = Synthetic
  source 1..216: mol_type = other DNA
gtgttgctttcattgccaagtttgtttcataacaaaagccttaggcatctcctatggcaggaagaagcggagacagcgacgaagagctcatcagaacagtcagactcatcaagcttctctatcaaagcaacccacctcccaaccccgaggggacccgacaggcccgaaggaatagaagaagaaggtggagagacgactcggtccgcactagcctga

SEQ ID NO: 6801 - DNA, 168 bp, synthetic construct
  source 1..168: mol_type = other DNA
  misc_feature 1..168: note = Synthetic
atggcaggaagaagcggagacagcgacgaagagctcatcagaacagtcagactcatcaagcttctctatcaaagcaacccacctcccaaccccgaggggacccgacaggcccgaaggaatagaagaagaaggtggagagacgactcggtccgcactagcctgaggtaa

SEQ ID NO: 6802 - DNA, 201 bp, synthetic construct
  misc_feature 1..201: note = Synthetic
  source 1..201: mol_type = other DNA
atggaggagttcgaggtgctgatcaagaacgcagatggaaaatataaagtggggtcgtatacggagttcgatatcgtgctcacgccacatacgaaagaggatgaagctgcatacgttttagagaagcggctctgttctgatatagaatatgagaagcaagagagggttgggatgccgatgtcgcgactcggtccgcactag

SEQ ID NO: 6803 - DNA, 87 bp, synthetic construct
  source 1..87: mol_type = other DNA
  misc_feature 1..87: note = Synthetic
atggaaaatataaagtggggtcgtatacggagttcgatatcgtgctcacgccacatacgaaagaggatgaagctgcatacgttttag

SEQ ID NO: 6804 - DNA, 210 bp, synthetic construct
  misc_feature 1..210: note = Synthetic
  source 1..210: mol_type = other DNA
ctgtcgaccgccgaggagttcgaggtgctgatcaagaacgcagatggaaaatataaagtggggtcgtatacggagttcgatatcgtgctcacgccacatacgaaagaggatgaagctgcatacgttttagagaagcggctctgttctgatatagaatatgagaagcaagagagggttgggatgccgatgtcgcgactcggtccgcactag

SEQ ID NO: 6805 - DNA, 81 bp, synthetic construct
  source 1..81: mol_type = other DNA
  misc_feature 1..81: note = Synthetic
atgctagctgcacttgagatgaagtcgtcaccaactgccccacccgctccgcggcgatccccagtgctaacgtcgccctga

SEQ ID NO: 6806 - DNA, 183 bp, synthetic construct
  source 1..183: mol_type = other DNA
  misc_feature 1..183: note = Synthetic
atggaacgattcattcgcaaattcaaaccggttggaggagcggcacttggcctgaggacgatcgaggctttgtctgacatatggacgtgcggccacaagcgattctcatgcatgtaccaaggccagtgtgttgtgcagaaccttgacgcctttgtcgcgccgactcggtccgcactagcctga

SEQ ID NO: 6807 - DNA, 168 bp, synthetic construct
  source 1..168: mol_type = other DNA
  misc_feature 1..168: note = Synthetic
atgccaagaaagaagcaggagccactagtggaggagatggaagaagaatgggacagccaggcagaggaggacgaatgggaggaggaagaattggaagaggtggaacaggagcaggcaacagagcagcccgtcgccgcacccgactcggtccgcactagcctgaggtaa

SEQ ID NO: 6808 - DNA, 156 bp, synthetic construct
  source 1..156: mol_type = other DNA
  misc_feature 1..156: note = Synthetic
aagcaggagccactagtggaggagatggaagaagaatgggacagccaggcagaggaggacgaatgggaggaggaagaattggaagaggtggaacaggagcaggcaacagagcagcccgtcgccgcacccgactcggtccgcactagcctgaggtaa

SEQ ID NO: 6809 - DNA, 222 bp, synthetic construct
  source 1..222: mol_type = other DNA
  misc_feature 1..222: note = Synthetic
atgtcatggctgcggtggagcagcggatcacctcagcgagatcagcactacgacgcattttcaaccacaaactgttcacccaaacgcaaagatgttatgaatactacaaattttcacagtggcagcattcggagaatgagaagcgcggatatctatacaccgtcccagttgtgcgagaaaacggatggcaggagcgactcggtccgcactagcctgaggtaa

SEQ ID NO: 6810 - DNA, 222 bp, synthetic construct
  misc_feature 1..222: note = Synthetic
  source 1..222: mol_type = other DNA
atgtcgccgctgcggtggagcagcggatcacctcagcgagatcagcactacgacgcattttcaaccacaaactgttcacccaaacgcaaagatgttatgaatactacaaattttcacagtggcagcattcggagaatgagaagcgcggatatctatacaccgtcccagttgtgcgagaaaacggatggcaggagcgactcggtccgcactagcctgaggtaa

SEQ ID NO: 6811 - DNA, 168 bp, synthetic construct
  source 1..168: mol_type = other DNA
  misc_feature 1..168: note = Synthetic
atgttaaacagggtacaaatcttaatgaaaacagctaacaattatgaaactattgagatattgcgtaactatttaagactgtatatcattttggcacgaaatgaagaaggtcatggtatactaatatacgatgataacatcgactcggtccgcactagcctgaggtaa

SEQ ID NO: 6812 - DNA, 204 bp, synthetic construct
  misc_feature 1..204: note = Synthetic
  source 1..204: mol_type = other DNA
atggctcaaacgctctcaaaaatctctaacaaagaaaacgcctcttcaggccttcggcctaagaggtttaaaccccaccaacccatcccaacgtggatggtgcggtgtgagcctcttgaccacgactcacgtcgtggtcgagaccctgtacgtgcttcgccacaagcgaaacgcgtcagaacgactcggtccgcactagcctga

SEQ ID NO: 6813 - DNA, 183 bp, synthetic construct
  source 1..183: mol_type = other DNA
  misc_feature 1..183: note = Synthetic
atctctaacaaagaaaacgcctcttcaggccttcggcctaagaggtttaaaccccaccaacccatcccaacgtggatggtgcggtgtgagcctcttgaccacgactcacgtcgtggtcgagaccctgtacgtgcttcgccacaagcgaaacgcgtcagaacgactcggtccgcactagcctga

SEQ ID NO: 6814 - DNA, 27 bp, synthetic construct
  source 1..27: mol_type = other DNA
  misc_feature 1..27: note = Synthetic
atgtcgaaaataaatagacgggcatga

SEQ ID NO: 6815 - DNA, 39 bp, synthetic construct
  misc_feature 1..39: note = Synthetic
  source 1..39: mol_type = other DNA
atgtcgaaaataaatagacgggcgccaactcggacgtga

SEQ ID NO: 6816 - DNA, 168 bp, synthetic construct
  misc_feature 1..168: note = Synthetic
  source 1..168: mol_type = other DNA
atggaaaccgtctactgcactttcgatcacaaactgtcactttccgatatcagcaccctctgcaagctcatgaacatcgtcataccgatcccagctcaccaccatctaataggtagcggcaatttaggtctttatcccatcgactcggtccgcactagcctgaggtaa

SEQ ID NO: 6817 - DNA, 135 bp, synthetic construct
  source 1..135: mol_type = other DNA
  misc_feature 1..135: note = Synthetic
ctgtcactttccgatatcagcaccctctgcaagctcatgaacatcgtcataccgatcccagctcaccaccatctaataggtagcggcaatttaggtctttatcccatcgactcggtccgcactagcctgaggtaa

SEQ ID NO: 6818 - DNA, 54 bp, synthetic construct
  misc_feature 1..54: note = Synthetic
  source 1..54: mol_type = other DNA
atgtcatccaattcttcctcagtggctgtgtctgcaggattagtgctcacatga

SEQ ID NO: 6819 - DNA, 63 bp, synthetic construct
  source 1..63: mol_type = other DNA
  misc_feature 1..63: note = Synthetic
atgaccaaatctcacctttggttccagaaacttctcaaaacgcctcgactcggtccgcactag

SEQ ID NO: 6820 - DNA, 87 bp, synthetic construct
  source 1..87: mol_type = other DNA
  misc_feature 1..87: note = Synthetic
ttgcagacaatgacaaggtggcaagactcatccaagaagatatcaacagttacatggcccggctcgaggaggcagagtaaaggctga

SEQ ID NO: 6821 - DNA, 66 bp, synthetic construct
  source 1..66: mol_type = other DNA
  misc_feature 1..66: note = Synthetic
atgtgtgattttcagcgtagtgaaataatattagtccatccgaactacgaagcagtgcgggtttag

SEQ ID NO: 6822 - DNA, 105 bp, synthetic construct
  source 1..105: mol_type = other DNA
  misc_feature 1..105: note = Synthetic
ctgggcctggttgaggaacctgttaagacggctccgggaaaaaagaggccggtagagcactctcctgtggagccagactcctcgactcggtccgcactagcctga

SEQ ID NO: 6823 - DNA, 42 bp, synthetic construct
  source 1..42: mol_type = other DNA
  misc_feature 1..42: note = Synthetic
atggtgttacttcgaccgcgtagggccattcgagtaagctaa

SEQ ID NO: 6824 - DNA, 27 bp, synthetic construct
  source 1..27: mol_type = other DNA
  misc_feature 1..27: note = Synthetic
atgaccatccttttgatcgccagatag

SEQ ID NO: 6825 - DNA, 45 bp, synthetic construct
  source 1..45: mol_type = other DNA
  misc_feature 1..45: note = Synthetic
atgaggaatgcgaacggcgatttcaggaaaaaaaagcgggcttaa

SEQ ID NO: 6826 - DNA, 168 bp, synthetic construct
  source 1..168: mol_type = other DNA
  misc_feature 1..168: note = Synthetic
atgtctgggatagtaaaatctatcatattgagcggaccatctggttcaggaaagacagctatagtcaaaagactgttaaaagactatggaaatatatttggatttgtggtgtcccataccactagatttcctcgtcctatcgactcggtccgcactagcctgaggtaa

SEQ ID NO: 6827 - DNA, 78 bp, synthetic construct
  source 1..78: mol_type = other DNA
  misc_feature 1..78: note = Synthetic
atgtcgagaaggtccacctgccgtgcctcagcttgcatccaaaagccgacgttacgtagttaccgatcgcccttatga

SEQ ID NO: 6828 - DNA, 42 bp, synthetic construct
  misc_feature 1..42: note = Synthetic
  source 1..42: mol_type = other DNA
atgaatgctttacgcaccctgacacctggtccttctacgtga

SEQ ID NO: 6829 - DNA, 33 bp, synthetic construct
  misc_feature 1..33: note = Synthetic
  source 1..33: mol_type = other DNA
gtgacgaggacttctattgctggaatcacatag

SEQ ID NO: 6830 - DNA, 57 bp, synthetic construct
  source 1..57: mol_type = other DNA
  misc_feature 1..57: note = Synthetic
atgcagtttccattgccagctgtgtttctcgaaaaaggggctcggaatatcatatga

SEQ ID NO: 6831 - DNA, 150 bp, synthetic construct
  source 1..150: mol_type = other DNA
  misc_feature 1..150: note = Synthetic
aagggcagacgaagaaggactccaaggaaaactaagactccttcgccttctgcaccagacaaatccatatccacaaggaccggggacagccagccaacgaaggaacagaagaagacgtcggaggcgacagtgcgactcggtccgcactag

SEQ ID NO: 6832 - DNA, 168 bp, synthetic construct
  source 1..168: mol_type = other DNA
  misc_feature 1..168: note = Synthetic
atgtcccaacgacgagaaaacaagaagttgaaggtgcagccgccgcccccagaagatatggaggaagattgggacagtcaggcagaggaggcggaggaggacagtctggaggacagtctggaggaagacagtttggaggacgactcggtccgcactagcctgaggtaa

SEQ ID NO: 6833 - DNA, 111 bp, synthetic construct
  misc_feature 1..111: note = Synthetic
  source 1..111: mol_type = other DNA
atggaggaagattgggacagtcaggcagaggaggcggaggaggacagtctggaggacagtctggaggaagacagtttggaggacgactcggtccgcactagcctgaggtaa

SEQ ID NO: 6834 - DNA, 60 bp, synthetic construct
  misc_feature 1..60: note = Synthetic
  source 1..60: mol_type = other DNA
atggctgagtttactgcgtcagccggactggtgacaggacgtgcgaacggaggtgagtag

SEQ ID NO: 6835 - DNA, 21 bp, synthetic construct
  misc_feature 1..21: note = Synthetic
  source 1..21: mol_type = other DNA
atggtaccgaaggagtcgtga

SEQ ID NO: 6836 - DNA, 132 bp, synthetic construct
  source 1..132: mol_type = other DNA
  misc_feature 1..132: note = Synthetic
gtgaatcagtgcaaaagattcgattccgtacttctcgtgtgcccacactacagtcttacgaaggtggctaccgtcttggctgtgtacaaagttaggagcgataccagaccgactcggtccgcactagcctga

SEQ ID NO: 6837 - DNA, 207 bp, synthetic construct
  source 1..207: mol_type = other DNA
  misc_feature 1..207: note = Synthetic
atgcctgtcaaccatagtttcgcgcactgctttgaacaggttcgcagcgtcagccggaatggtaccgaaggagtcgtgaatcagtgcaaaagattcgattccgtacttctcgtgtgcccacactacagtcttacgaaggtggctaccgtcttggctgtgtacaaagttaggagcgataccagaccgactcggtccgcactagcctga

SEQ ID NO: 6838 - DNA, 48 bp, synthetic construct
  misc_feature 1..48: note = Synthetic
  source 1..48: mol_type = other DNA
atggcgtcccgaatgcaaaacgcgagaccgtgccaccatgaaacataa

SEQ ID NO: 6839 - DNA, 30 bp, synthetic construct
  misc_feature 1..30: note = Synthetic
  source 1..30: mol_type = other DNA
acgggggtacacggatgctcgaatacatag

SEQ ID NO: 6840 - DNA, 141 bp, synthetic construct
  misc_feature 1..141: note = Synthetic
  source 1..141: mol_type = other DNA
atggaaattgatccctgtgattatatatctgtggaaaatttgtgtgcaactgaaaaaatggaaatttcagattcagactgcctgtctaaggattctccagatcttcaaattcacgggaccttagatttcatgtgtcattaa

SEQ ID NO: 6841 - DNA, 168 bp, synthetic construct
  misc_feature 1..168: note = Synthetic
  source 1..168: mol_type = other DNA
atggaaaccgtctactgcactttcgatcacaaactgtcactttccgatatcagcaccctatgcaagctcatgaacatcgtcataccgatcccagctcaccaccatctaataggtagcggcaatttaggtctttatcccatcgactcggtccgcactagcctgaggtaa

SEQ ID NO: 6842 - DNA, 105 bp, synthetic construct
  misc_feature 1..105: note = Synthetic
  source 1..105: mol_type = other DNA
aagctcatgaacatcgtcataccgatcccagctcaccaccatctaataggtagcggcaatttaggtctttatcccatcgactcggtccgcactagcctgaggtaa

SEQ ID NO: 6843 - DNA, 207 bp, synthetic construct
  misc_feature 1..207: note = Synthetic
  source 1..207: mol_type = other DNA
atcatccatttcatcctaagtgctgggttcttctcctgtcttcctgatgtgtacttcttgattatggccatatggtccacggtggtttttgtgagtatctcgcgggtgcgagactgcgacattagatttcttagttcttttattctttccatagccaatataattgacctgctttcgctcgactcggtccgcactagcctgaggtaa

SEQ ID NO: 6844 - DNA, 39 bp, synthetic construct
  misc_feature 1..39: note = Synthetic
  source 1..39: mol_type = other DNA
ctgggttcttctcctgtcttcctgatgtgtacttcttga

SEQ ID NO: 6845 - DNA, 207 bp, synthetic construct
  misc_feature 1..207: note = Synthetic
  source 1..207: mol_type = other DNA
atcatccatttcatcctaagtgctgggttcttctcctgtcttcctgatgtgtacttcttgattatggccatatggtccacggtggtttttgtgagtatctcgcgggtgcgagactgcgacattagatttcttagttcttttattctttccatattgaatataattgacctgctttcgctcgactcggtccgcactagcctgaggtaa

SEQ ID NO: 6846 - DNA, 21 bp, synthetic construct
  source 1..21: mol_type = other DNA
  misc_feature 1..21: note = Synthetic
atccttttgatcgccagatag

SEQ ID NO: 6847 - DNA, 147 bp, synthetic construct
  misc_feature 1..147: note = Synthetic
  source 1..147: mol_type = other DNA
atggtgaaaggcattcctaaaattatgctcctgatctctataacgttcttgctcctttccctcataaattgtaatgtattggtaaactccagaggaacaagacgttcctggccgtataccgactcggtccgcactagcctgaggtaa

SEQ ID NO: 6848 - DNA, 153 bp, synthetic construct
  misc_feature 1..153: note = Synthetic
  source 1..153: mol_type = other DNA
atgataatggtgaaaggcattcctaaaattatgctcctgatctctataacgttcttgctcctttccctcataaattgtaatgtattggtaaactccagaggaacaagacgttcctggccgtataccgactcggtccgcactagcctgaggtaa

SEQ ID NO: 6849 - DNA, 210 bp, synthetic construct
  source 1..210: mol_type = other DNA
  misc_feature 1..210: note = Synthetic
atcctattatcagggacaagagcaggattagggatatccgagatggccacacttttgaggagcttagcattgttcaaaagaaacaaggacaaaccacccattacatcaggatccggtggagccatcagaggaatcaaacacattattatagtaccaattcctggagattcctcaattaccaccgactcggtccgcactagcctgaggtaa

SEQ ID NO: 6850 - DNA, 153 bp, synthetic construct
  source 1..153: mol_type = other DNA
  misc_feature 1..153: note = Synthetic
aggagcttagcattgttcaaaagaaacaaggacaaaccacccattacatcaggatccggtggagccatcagaggaatcaaacacattattatagtaccaattcctggagattcctcaattaccaccgactcggtccgcactagcctgaggtaa

SEQ ID NO: 6851 - DNA, 132 bp, synthetic construct
  misc_feature 1..132: note = Synthetic
  source 1..132: mol_type = other DNA
gtgaatcagtgcaaaagattcgattccgtacttctcgtgtgcccacactacagtcttacgaaggccgctaccgtcttggctgtgtacaaagttaggagcgataccagaccgactcggtccgcactagcctga

SEQ ID NO: 6852 - DNA, 198 bp, synthetic construct
  source 1..198: mol_type = other DNA
  misc_feature 1..198: note = Synthetic
atgcttctaagaagtgccataggccaggtttcaaggcccatgttcttgtatgtgaggacaaatggaacctcaaaaattaaaatgaaatggggaatggagatgaggcgttgtctcctccagtcacttcaacaaattgagagtatgattgaagctgagtcctctgtcaaagagaaagcgactcggtccgcactagcctga

SEQ ID NO: 6853 - DNA, 198 bp, synthetic construct
  source 1..198: mol_type = other DNA
  misc_feature 1..198: note = Synthetic
atgcttctaagaagtgccataggccaggtttcaaggcccatgttcttgtatgtgaggacaaatggaacctcaaaaattaaaatgaaatggggaatggagatgaggcgttgtctcctccagtcacttcaacaaattgagagtatgattgaagctgagtcctgcctcaaagagaaagcgactcggtccgcactagcctga

SEQ ID NO: 6854 - DNA, 198 bp, synthetic construct
  source 1..198: mol_type = other DNA
  misc_feature 1..198: note = Synthetic
atgcttctaagaagtgccataggccaggtttcaaggcccatgttcttgtatgtgaggacaaatggaacctcaaaaattaaaatgaaatggggaatggagatgaggcgttgtctcctccagtcacttcaacaaattgagagtgccattgaagctgagtcctctgtcaaagagaaagcgactcggtccgcactagcctga

SEQ ID NO: 6855 - DNA, 135 bp, synthetic construct
  source 1..135: mol_type = other DNA
  misc_feature 1..135: note = Synthetic
gtgtttggagtgccaggaaagtggggtgggatgtcgctgtgtagattgttgctcatgcttgcaatgtgctgcggggtgtcaaggggctcccaaacgctcccagccggaggcaggcgtcgactcggtccgcactag

SEQ ID NO: 6856 - DNA, 90 bp, synthetic construct
  misc_feature 1..90: note = Synthetic
  source 1..90: mol_type = other DNA
aagttctttgccacagtggggggccgctcatcgacctacttacagaagaccccccgccttatagggacgactcggtccgcactagcctga

SEQ ID NO: 6857 - DNA, 144 bp, synthetic construct
  source 1..144: mol_type = other DNA
  misc_feature 1..144: note = Synthetic
atgaaaagaacagaagtagatcgtatcatcactaattcagttggatctagacgtttaatggaattgtcacgaccatacattgaaggaggcaaaatacaatatgtcgatagaaataatgtgattggtcgactcggtccgcactag

SEQ ID NO: 6858 - DNA, 15 bp, synthetic construct
  source 1..15: mol_type = other DNA
  misc_feature 1..15: note = Synthetic
atggtaggatgctag

SEQ ID NO: 6859 - DNA, 15 bp, synthetic construct
  misc_feature 1..15: note = Synthetic
  source 1..15: mol_type = other DNA
atggtagggccctag

SEQ ID NO: 6860 - DNA, 12 bp, synthetic construct
  source 1..12: mol_type = other DNA
  misc_feature 1..12: note = Synthetic
acgacgctttga

SEQ ID NO: 6861 - DNA, 39 bp, synthetic construct
  source 1..39: mol_type = other DNA
  misc_feature 1..39: note = Synthetic
atgatacgtcttgtgttagagaatttgacagattgttga

SEQ ID NO: 6862 - DNA, 198 bp, synthetic construct
  source 1..198: mol_type = other DNA
  misc_feature 1..198: note = Synthetic
atgaatactattgaacgtacaacctcactggtgaacgagacttcagctcaattgaaaactttggtttccaatgctgagaaatctcattttcttaaaccggatgaagtcagagctaaactagcttttttgattaatccaaaacaaaacttgtttgctaatttgaactctttctttacgactcggtccgcactagcctga

SEQ ID NO: 6863 - DNA, 48 bp, synthetic construct
  source 1..48: mol_type = other DNA
  misc_feature 1..48: note = Synthetic
ctgagaaatctcattttcttaaaccggatgaagtcagagctaaactag

SEQ ID NO: 6864 - DNA, 189 bp, synthetic construct
  misc_feature 1..189: note = Synthetic
  source 1..189: mol_type = other DNA
attgaacgtacaacctcactggtgaacgagacttcagctcaattgaaaactttggtttccaatgctgagaaatctcattttcttaaaccggatgaagtcagagctaaactagcttttttgattaatccaaaacaaaacttgtttgctaatttgaactctttctttacgactcggtccgcactagcctga

SEQ ID NO: 6865 - DNA, 162 bp, synthetic construct
  misc_feature 1..162: note = Synthetic
  source 1..162: mol_type = other DNA
attgtggaccaggaatttgacatccctttcaaggtgtggaggaagttcgccgcccgccggggactggaataccagagctgggaggagggtaacgaggtgctgctgaacaactacaccagagacatactttcagacgactcggtccgcactagcctgaggtaa

SEQ ID NO: 6866 - DNA, 159 bp, synthetic construct
  misc_feature 1..159: note = Synthetic
  source 1..159: mol_type = other DNA
gtggaccaggaatttgacatccctttcaaggtgtggaggaagttcgccgcccgccggggactggaataccagagctgggaggagggtaacgaggtgctgctgaacaactacaccagagacatactttcagacgactcggtccgcactagcctgaggtaa

SEQ ID NO: 6867 - DNA, 126 bp, synthetic construct
  source 1..126: mol_type = other DNA
  misc_feature 1..126: note = Synthetic
atgttacgtatgattcgcctattacgtatatcattttcgatatccatgatgatcagacaactcaaattacgatttcaatattataatcttgatgtaatcgactcggtccgcactagcctgaggtaa

SEQ ID NO: 6868 - DNA, 24 bp, synthetic construct
  misc_feature 1..24: note = Synthetic
  source 1..24: mol_type = other DNA
atgctcggaggcagaccattctga

SEQ ID NO: 6869 - DNA, 177 bp, synthetic construct
  misc_feature 1..177: note = Synthetic
  source 1..177: mol_type = other DNA
atggatccgacccatccgaaggacacttttgtatctatagattcgatgaaggacaaccattcactgttaaatttcgtcagaaagggaagattcagcacattgagcttgagaactcgattggccataatggtgctattaactacggtagtcgactcggtccgcactagcctgaggtaa

SEQ ID NO: 6870 - DNA, 174 bp, synthetic construct
  source 1..174: mol_type = other DNA
  misc_feature 1..174: note = Synthetic
atgcctaataaaagaagtaataaaggaaaagcttcgaaagatgtaaaagttacaagttcagacactaaaacaattaacggtggttcactaaacgatgaaaaagctaactcgattttagacgaagcgttcaactcacgtcaagtcaacgattctggccgactcggtccgcactag

SEQ ID NO: 6871 - DNA, 33 bp, synthetic construct
  source 1..33: mol_type = other DNA
  misc_feature 1..33: note = Synthetic
atgaagctccaccaacagataacagtttattga

SEQ ID NO: 6872 - DNA, 189 bp, synthetic construct
  misc_feature 1..189: note = Synthetic
  source 1..189: mol_type = other DNA
ctgtcaaacttaaacggaatttttgcggaaagtcattatttcgtattcaaaatcattatgaataacgttaagggtatgcttcaagagttatgtgttaaacgtggattggaactgcctgtttacgaaaaattgtctaaagttggtcctgaccatgcaccaaccattactgttcgactcggtccgcactag

SEQ ID NO: 6873 - DNA, 48 bp, synthetic construct
  source 1..48: mol_type = other DNA
  misc_feature 1..48: note = Synthetic
atgcaccaaccattactgttcgactcggtccgcactagcctgaggtaa

SEQ ID NO: 6874 - DNA, 48 bp, synthetic construct
  misc_feature 1..48: note = Synthetic
  source 1..48: mol_type = other DNA
atgttggctttgttggaagtgcaaatccaagaacccattactttatga

SEQ ID NO: 6875 - DNA, 168 bp, synthetic construct
  source 1..168: mol_type = other DNA
  misc_feature 1..168: note = Synthetic
atgatgccaactactttgtttgctggcacacacataactatgactactgtataccatataacagtgtcacagatacaattgtcgttactgaaggtgacggcatttcaacaccaaaactcaaagaagactaccaaattggtcgactcggtccgcactagcctgaggtaa

SEQ ID NO: 6876 - DNA, 81 bp, synthetic construct
  source 1..81: mol_type = other DNA
  misc_feature 1..81: note = Synthetic
atgttggctttgttggaagtgcaaatccaagaacccattactttgccatgccaactactttgtttgctggcacacacataa

SEQ ID NO: 6877 - DNA, 165 bp, synthetic construct
  source 1..165: mol_type = other DNA
  misc_feature 1..165: note = Synthetic
atgccaactactttgtttgctggcacacacataactatgactactgtataccatataacagtgtcacagatacaattgtcgttactgaaggtgacggcatttcaacaccaaaactcaaagaagactaccaaattggtcgactcggtccgcactagcctgaggtaa

SEQ ID NO: 6878 - DNA, 216 bp, synthetic construct
  source 1..216: mol_type = other DNA
  misc_feature 1..216: note = Synthetic
atggtcaatgatatgatttttaatcaagattcatttttaaaatatttattagaacatctgattagaagccactatagagtttctaaacatataacaatagttagatacaaggataccgaagaattaaatctaacgagaatatgttataatagagataagtttaaggcgtttgtattcgcttggtttaacgactcggtccgcactagcctgaggtaa

SEQ ID NO: 6879 - DNA, 54 bp, synthetic construct
  source 1..54: mol_type = other DNA
  misc_feature 1..54: note = Synthetic
ctgctgaagtcctccccggagagaaaatcgtcgactcggtccgcactagcctga

SEQ ID NO: 6880 - DNA, 90 bp, synthetic construct
  misc_feature 1..90: note = Synthetic
  source 1..90: mol_type = other DNA
atgttcaaactaatacatctgaaacatacgataaagaaaaagattgttggacattggataatggtcacttggtaccacataattatataa

SEQ ID NO: 6881 - DNA, 30 bp, synthetic construct
  source 1..30: mol_type = other DNA
  misc_feature 1..30: note = Synthetic
gtgagcgaagacttgcatattatccagtag

SEQ ID NO: 6882 - DNA, 141 bp, synthetic construct
  misc_feature 1..141: note = Synthetic
  source 1..141: mol_type = other DNA
atgctaagtgttagccccaaaaattgcgcacccaacgtattcctactcatcaccacgaacttacgttttgtcgtgagtgccgataagacactggataacttcaaaatgaaaagcgactcggtccgcactagcctgaggtaa

SEQ ID NO: 6883 - DNA, 198 bp, synthetic construct
  misc_feature 1..198: note = Synthetic
  source 1..198: mol_type = other DNA
atgtatggggatgaaatgttgagaaagattgccgatctaggaaagaaacttagagatggtaatggaaacggaggaaacggttgtacatccagctgtgaattcgaaagaaaaagaatcgccgtcctagaagctgaacttcggaaatctatggaaacaatcaaatcgttggagaaatttatgcgactcggtccgcactag

SEQ ID NO: 6884 - DNA, 168 bp, synthetic construct
  source 1..168: mol_type = other DNA
  misc_feature 1..168: note = Synthetic
atgccgaggaagaagcaggagccgctagtggaggagatggaagaagaatgggacagccaggcagaggaggacgaatgggaggaggagacagaggaggaagaattggaagaggtggaagaggagcaggcaacagagcagcccgactcggtccgcactagcctgaggtaa

SEQ ID NO: 6885 - DNA, 156 bp, synthetic construct
  source 1..156: mol_type = other DNA
  misc_feature 1..156: note = Synthetic
aagcaggagccgctagtggaggagatggaagaagaatgggacagccaggcagaggaggacgaatgggaggaggagacagaggaggaagaattggaagaggtggaagaggagcaggcaacagagcagcccgactcggtccgcactagcctgaggtaa

SEQ ID NO: 6886 - DNA, 159 bp, synthetic construct
  misc_feature 1..159: note = Synthetic
  source 1..159: mol_type = other DNA
atgtcgcaggtacgtagcatggagcccgaccttacgttggcggcggtctatcaggcggcggcgaatctcacagagcaggataaggagattttttccgaagcggtaaaaactgcgttttcagtgtgtagttccgactcggtccgcactagcctgaggtaa

SEQ ID NO: 6887 - DNA, 168 bp, synthetic construct
  misc_feature 1..168: note = Synthetic
  source 1..168: mol_type = other DNA
atgtgggttatgtcgcaggtacgtagcatggagcccgaccttacgttggcggcggtctatcaggcggcggcgaacctcacagagcaagataaggagatttttgccgaagcggtaaaaactgcgttttcagtgtgtagttccgactcggtccgcactagcctgaggtaa

SEQ ID NO: 6888 - DNA, 159 bp, synthetic construct
  misc_feature 1..159: note = Synthetic
  source 1..159: mol_type = other DNA
atgtcgcaggtacgtagcatggagcccgaccttacgttggcggcggtctatcaggcggcggcgaacctcacagagcaagataaggagatttttgccgaagcggtaaaaactgcgttttcagtgtgtagttccgactcggtccgcactagcctgaggtaa

SEQ ID NO: 6889 - DNA, 90 bp, synthetic construct
  misc_feature 1..90: note = Synthetic
  source 1..90: mol_type = other DNA
atgaaacaacgaatcgaacgccttaagcgtgaactccgcattaaccgcaagattaacaagataggttccggctatgacagaacgcactga

SEQ ID NO: 6890 - DNA, 78 bp, synthetic construct
  misc_feature 1..78: note = Synthetic
  source 1..78: mol_type = other DNA
atcgaacgccttaagcgtgaactccgcattaaccgcaagattaacaagataggttccggctatgacagaacgcactga

SEQ ID NO: 6891 - DNA, 192 bp, synthetic construct
  source 1..192: mol_type = other DNA
  misc_feature 1..192: note = Synthetic
atggagatcttgagaacgaaatcgcagtcagctgcagtggttattggaatttccaaattcttcgatgagaaggaaaaccgtgatgttattgtgactgcttcggatttcaaacgtaacaatgctttcattttcaaagattctggtaactatttccttggcttagagaatacgactcggtccgcactagcctga

SEQ ID NO: 6892 - DNA, 30 bp, synthetic construct
  source 1..30: mol_type = other DNA
  misc_feature 1..30: note = Synthetic
atgagaaggaaaaccgtgatgttattgtga

SEQ ID NO: 6893 - DNA, 198 bp, synthetic construct
  misc_feature 1..198: note = Synthetic
  source 1..198: mol_type = other DNA
attgcagccgagatcttgagaacgaaatcgcagtcagctgcagtggttattggaatttccaaattcttcgatgagaaggaaaaccgtgatgttattgtgactgcttcggatttcaaacgtaacaatgctttcattttcaaagattctggtaactatttccttggcttagagaatacgactcggtccgcactagcctga

SEQ ID NO: 6894 - DNA, 93 bp, synthetic construct
  source 1..93: mol_type = other DNA
  misc_feature 1..93: note = Synthetic
ctgaccatgtcatcaataaagataaagcgcaatttagtgatttgccatttcacactaccttataccgactcggtccgcactagcctgaggtaa

SEQ ID NO: 6895 - DNA, 153 bp, synthetic construct
  source 1..153: mol_type = other DNA
  misc_feature 1..153: note = Synthetic
atggacaagcaacaattacaagaaatggaggaaggttcgaaatcaggtgtcgtcacttggaccgtgactacaccatgccactaccaaatgctactagtaatgataattttcttgattgtattaagtttatcgactcggtccgcactagcctga

SEQ ID NO: 6896 - DNA, 171 bp, synthetic construct
  source 1..171: mol_type = other DNA
  misc_feature 1..171: note = Synthetic
ttggatatgatgttcaagatgcttgcaaagctcctcttgtttttatggaccacacttcaggcatggtctataccgctgtcaaatagatgctttgaaggaggagtcctggtagaagaaagatcaatggaccatggaattgctgaaatctgtgtccgactcggtccgcactag

SEQ ID NO: 6897 - DNA, 21 bp, synthetic construct
  source 1..21: mol_type = other DNA
  misc_feature 1..21: note = Synthetic
atgagcaaggcgagtcaataa

SEQ ID NO: 6898 - DNA, 108 bp, synthetic construct
  source 1..108: mol_type = other DNA
  misc_feature 1..108: note = Synthetic
atggcctggacagtagtaaacagtatttgcaacactacaggggctgagaaaccaaagtttctaccagatttgtatgattacaaggcgactcggtccgcactagcctga

SEQ ID NO: 6899 - DNA, 30 bp, synthetic construct
  source 1..30: mol_type = other DNA
  misc_feature 1..30: note = Synthetic
atgattacaaggcgactcggtccgcactag

SEQ ID NO: 6900 - DNA, 108 bp, synthetic construct
  misc_feature 1..108: note = Synthetic
  source 1..108: mol_type = other DNA
atggcctggacagtagtaaacagtatttgcaacactacagggggccagaaaccaaagtttctaccagatttgtatgattacaaggcgactcggtccgcactagcctga

SEQ ID NO: 6901 - DNA, 15 bp, synthetic construct
  misc_feature 1..15: note = Synthetic
  source 1..15: mol_type = other DNA
attgcgttgacctag

SEQ ID NO: 6902 - DNA, 78 bp, synthetic construct
  source 1..78: mol_type = other DNA
  misc_feature 1..78: note = Synthetic
atgaccggacgtgcttggactggtacatacgcaggggctggacgtggttaccggtcactggactcggtttcgctgtag

SEQ ID NO: 6903 - DNA, 168 bp, synthetic construct
  source 1..168: mol_type = other DNA
  misc_feature 1..168: note = Synthetic
atgtccgacgagggctaccgagagctcgtggagagtaagagtgctcccacgaccccgggaccctggagcccggacagggagagatggaagcgtcacgaggcagcgtggaagcagcactgtagctggagtcacgggctctgcgactcggtccgcactagcctgaggtaa

SEQ ID NO: 6904 - DNA, 195 bp, synthetic construct
  source 1..195: mol_type = other DNA
  misc_feature 1..195: note = Synthetic
atgttatcagagactgagttaagggctttgaagaagttgagtacaacgaccactagggtcgttggagattcaactttagctcttccttcgaatgttaaactaagtaaaggtgaggttgaaaagatcgctgtaacgaagaaagaaatgttcgatgagttagctcaatgtaatctacctcgactcggtccgcactag

SEQ ID NO: 6905 - DNA, 129 bp, synthetic construct
  misc_feature 1..129: note = Synthetic
  source 1..129: mol_type = other DNA
atgagcggcaaagaactcatctttctgagatttttctgggattattctggtaaaaatgtatgtctcgtttgtagtcgtttttggatttctgtaatgttacgatttgcgactcggtccgcactagcctga

SEQ ID NO: 6906 - DNA, 48 bp, synthetic construct
  misc_feature 1..48: note = Synthetic
  source 1..48: mol_type = other DNA
ctggtaaaaatgtatgtctcgtttgtagtcgtttttggatttctgtaa

SEQ ID NO: 6907 - DNA, 30 bp, synthetic construct
  misc_feature 1..30: note = Synthetic
  source 1..30: mol_type = other DNA
atcacatccccgttttttgaaattttataa

SEQ ID NO: 6908 - DNA, 102 bp, synthetic construct
  misc_feature 1..102: note = Synthetic
  source 1..102: mol_type = other DNA
ttgtgttcgtctgcggagtgtgttttgttctgtgtgctttgtcgcggtaagacggggcagcttatttggtttggattggggggcaaagggaggcatttgtaa

SEQ ID NO: 6909 - DNA, 27 bp, synthetic construct
  source 1..27: mol_type = other DNA
  misc_feature 1..27: note = Synthetic
ctggcaccatcaaagaatcacttctaa

SEQ ID NO: 6910 - DNA, 21 bp, synthetic construct
  source 1..21: mol_type = other DNA
  misc_feature 1..21: note = Synthetic
attaggcgaccagcgcgatag

SEQ ID NO: 6911 - DNA, 51 bp, synthetic construct
  misc_feature 1..51: note = Synthetic
  source 1..51: mol_type = other DNA
atgacgtgggcgctaataattgcgttatcgactcggtccgcactagcctga

SEQ ID NO: 6912 - DNA, 108 bp, synthetic construct
  source 1..108: mol_type = other DNA
  misc_feature 1..108: note = Synthetic
aaggaagattttcataattccgaggaaatgaaggtgtttgttgttcaacattcgcaagaaatggtcgatggaacggatttatttgtacatgcggaggaaagcgtgtga

SEQ ID NO: 6913 - DNA, 153 bp, synthetic construct
  source 1..153: mol_type = other DNA
  misc_feature 1..153: note = Synthetic
atgcttgcaaagctcctcttgtttttatggaccacacttcaggcatggtctataccgctgtcaaatagatgctttgaaggaggagtcctggtagaagaaagatcaatggaccatggaattgctgaaatctgtgtccgactcggtccgcactag

SEQ ID NO: 6914 - DNA, 150 bp, synthetic construct
  source 1..150: mol_type = other DNA
  misc_feature 1..150: note = Synthetic
atggaagcgtccggactccgacgcagagacttgctctttgtgagccacacgtctgactacgcactgtgcgtttgcccgatgagtccagacgcaatctttagcgtagcggcgctcgtgctcagcgagagcaacaagcgcacacggcgctag

SEQ ID NO: 6915 - DNA, 225 bp, synthetic construct
  source 1..225: mol_type = other DNA
  misc_feature 1..225: note = Synthetic
gtgtacccctatctacaaaacttacagaaaattcagtcatatcacaatatatgcataatggactatcaagagtatcaacaattcttggctaggattaatactgcaagggatgcatgtgtagccaaggatatcgatgttgacctattaatggccagacatgattattttggtagagagctgtgcaagtccttaaatatcgactcggtccgcactagcctgaggtaa

SEQ ID NO: 6916 - DNA, 15 bp, synthetic construct
  source 1..15: mol_type = other DNA
  misc_feature 1..15: note = Synthetic
acgtttgaatattaa

SEQ ID NO: 6917 - DNA, 198 bp, synthetic construct
  misc_feature 1..198: note = Synthetic
  source 1..198: mol_type = other DNA
attatcgttgttgttacgttaatgtttattttttttaaaaccgaaattatcttggcttttaataaaacaaaagttgttaataatccaatcgacaaatttaaagatacatttttgttttgcaaagaaaataaaatgatgattggcggattacccaataacaatgttacagaagcgtcgactcggtccgcactagcctga

SEQ ID NO: 6918 - DNA, 87 bp, synthetic construct
  misc_feature 1..87: note = Synthetic
  source 1..87: mol_type = other DNA
atcgagatcaaccaaaagagcttgaacaccctgcaacctatgctctttaagaccagcattccgaagttatgcaaggccgagtcgtga

SEQ ID NO: 6919 - DNA, 117 bp, synthetic construct
  source 1..117: mol_type = other DNA
  misc_feature 1..117: note = Synthetic
atgcaaggccgagtcgtgaatttcaccgatcaacaggctagtcggctctgccgacacaggggtcattactggatatcctcaacatctcctagtccgactcggtccgcactagcctga

SEQ ID NO: 6920 - DNA, 75 bp, synthetic construct
  source 1..75: mol_type = other DNA
  misc_feature 1..75: note = Synthetic
atgacgtcccagagggcatccggcgccacctccgcaatcccaagattcggcgcgcgtttacggatcggtgtataa

SEQ ID NO: 6921 - DNA, 15 bp, synthetic construct
  source 1..15: mol_type = other DNA
  misc_feature 1..15: note = Synthetic
atgatacagtattag

SEQ ID NO: 6922 - DNA, 192 bp, synthetic construct
  misc_feature 1..192: note = Synthetic
  source 1..192: mol_type = other DNA
ataggggggcaactaaaggaagctctattagatacaggagcagatgatacagtattagaagaaatgagtttgccaggaagatggaaaccaaaaatgatagggggaattggaggttttatcaaagtaagacagtatgatcagatactcatagaaatgcctggacacgactcggtccgcactagcctgaggtaa

SEQ ID NO: 6923 - DNA, 66 bp, synthetic construct
  source 1..66: mol_type = other DNA
  misc_feature 1..66: note = Synthetic
atggcagccggaacttccaaaatgtgtacgctaataaacataacgactcggtccgcactagcctga

SEQ ID NO: 6924 - DNA, 183 bp, synthetic construct
  misc_feature 1..183: note = Synthetic
  source 1..183: mol_type = other DNA
ttgcatgttgctagtatgtcagattctccgcttttggattccggtgtggaaacggctgttgagtcgaatgcatcgaacggtttgtttaatctggaatcgaatacagttgaatcacctgttccggaggtctactggaccacgtttttgcagagcttcgactcggtccgcactagcctgaggtaa

SEQ ID NO: 6925 - DNA, 117 bp, synthetic construct
  misc_feature 1..117: note = Synthetic
  source 1..117: mol_type = other DNA
acgcgcccgacgaggagatttacgccttctgcgacgcgcacccggacgacgagcgctgcgcgtgcctcaagcccagccaggccgtggtcgacaccgactcggtccgcactagcctga

SEQ ID NO: 6926 - DNA, 84 bp, synthetic construct
  source 1..84: mol_type = other DNA
  misc_feature 1..84: note = Synthetic
acgcgcacccggacgacgagcgctgcgcgtgcctcaagcccagccaggccgtggtcgacaccgactcggtccgcactagcctga

SEQ ID NO: 6927 - DNA, 126 bp, synthetic construct
  misc_feature 1..126: note = Synthetic
  source 1..126: mol_type = other DNA
ctgaaaagaaagaactcccgcaagacgagcaacaagatcaggaccacactcaagaggccaggaaccaggacagtgacaacacccagtcagaacactcttttgaggagatgtatcgccacattctaa

SEQ ID NO: 6928 - DNA, 105 bp, synthetic construct
  source 1..105: mol_type = other DNA
  misc_feature 1..105: note = Synthetic
atgtatcgccacattctaagatcacaggggccatttgatgctgttttgtattatcatatgatgaaggatgagcctgtcgactcggtccgcactagcctgaggtaa

SEQ ID NO: 6929 - DNA, 126 bp, synthetic construct
  misc_feature 1..126: note = Synthetic
  source 1..126: mol_type = other DNA
ctgaaaagaaagaactcccgcaagacgagcaacaagatcaggaccacactcaagaggccaggaaccaggacagtgacaacacccagtcagaacactcttttgaggaggcctatcgccacattctaa

SEQ ID NO: 6930 - DNA, 126 bp, synthetic construct
  source 1..126: mol_type = other DNA
  misc_feature 1..126: note = Synthetic
ctgaaaagaaagaactcccgcaaggccagcaacaagatcaggaccacactcaagaggccaggaaccaggacagtgacaacacccagtcagaacactcttttgaggagatgtatcgccacattctaa

SEQ ID NO: 6931 - DNA, 174 bp, synthetic construct
  misc_feature 1..174: note = Synthetic
  source 1..174: mol_type = other DNA
agggctttgaagaagttgagtacaacgaccactagggtcgttggagattcaactttagctcttccttcgaatgttaaactaagtaaaggtgaggttgaaaagatcgctgtaacgaagaaagaaatgttcgatgagttagctcaatgtaatctacctcgactcggtccgcactag

SEQ ID NO: 6932 - DNA, 114 bp, synthetic construct
  source 1..114: mol_type = other DNA
  misc_feature 1..114: note = Synthetic
atgattgctttaattcaaatgaagaatatgaagtgcactttgaaagtcgaggaaacaactgaaaatcaagaattggaaggcgtttccgactcggtccgcactagcctgaggtaa

SEQ ID NO: 6933 - DNA, 180 bp, synthetic construct
  misc_feature 1..180: note = Synthetic
  source 1..180: mol_type = other DNA
acgcaagcgtatagttcgggattgtcacagaacagtatcattagtctaacagggaatgacaggactgttgctgatggcacttttaattccatgattatgccaagagctgtaattgctaatgagcgtgaacattttatgaaaacgagaatagataagattgaacgactcggtccgcactag

SEQ ID NO: 6934 - DNA, 174 bp, synthetic construct
  misc_feature 1..174: note = Synthetic
  source 1..174: mol_type = other DNA
gtgacaatgatacactcagtgtttctactgatgttcttgttaacacctacagaaagttacgttgatgtagggccagattctgttaagtctgcttgtattgaggttgatatacaacagactttctttgataaaacttggcctaggcccgactcggtccgcactagcctgaggtaa

SEQ ID NO: 6935 - DNA, 105 bp, synthetic construct
  source 1..105: mol_type = other DNA
  misc_feature 1..105: note = Synthetic
gtgagaatactgtccaggcagccacaaaaatggcgcaagatgacaagggtaagaagcttcggcggtcctgtgtggaaagcttcgtcggcctctcggacgaactga

SEQ ID NO: 6936 - DNA, 54 bp, synthetic construct
  misc_feature 1..54: note = Synthetic
  source 1..54: mol_type = other DNA
atgacgcatacgaaacaatctacgatcccagcgactcggtccgcactagcctga

SEQ ID NO: 6937 - DNA, 42 bp, synthetic construct
  source 1..42: mol_type = other DNA
  misc_feature 1..42: note = Synthetic
atgttaatatcgtcgttccatttggaccaacttgcgtgctga

SEQ ID NO: 6938 - DNA, 51 bp, synthetic construct
  misc_feature 1..51: note = Synthetic
  source 1..51: mol_type = other DNA
atgttccgctgtcccagaccagtccagcaatggacgggccagtgtgcgtag

SEQ ID NO: 6939 - DNA, 216 bp, synthetic construct
  misc_feature 1..216: note = Synthetic
  source 1..216: mol_type = other DNA
atggattttattctgggcgcgaacagtcaggagcagcgggaaaggctgaccggctggattggtgaaattgccgcgtattacgccgcagcgccggtccggctgggaggcgcaaaagtaccgcacctgatgccgggtgactcactgaacctgcagacggctcaggatacggataacggctactccgtgtttgagccgactcggtccgcactagcctga

SEQ ID NO: 6940 - DNA, 216 bp, synthetic construct
  source 1..216: mol_type = other DNA
  misc_feature 1..216: note = Synthetic
atggattttattctgggcgcgaacagtcaggagcagcgggaaaggctgaccggctggattggtgaaattgccgcgtattacgccgcagcgccggtccggctgggaggcgcaaaagtaccgcacctgatgccgggtgactcactgaacctgcagacggctcaggatacggatagccgctactccgtgtttgagccgactcggtccgcactagcctga

SEQ ID NO: 6941 - DNA, 48 bp, synthetic construct
  misc_feature 1..48: note = Synthetic
  source 1..48: mol_type = other DNA
atgttgatgaagggtctcgtcaattcgttgcagtcgctgagcttttag

SEQ ID NO: 6942 - DNA, 186 bp, synthetic construct
  misc_feature 1..186: note = Synthetic
  source 1..186: mol_type = other DNA
atggcaaatagagcaacttcagcctttctcgataaccctcatccagtcggagtcaactatgttgatgaagggtctcgtcaattcgttgcagtcgctgagcttttagcttcaaagttgattgctagtagtagagagtcagatgaaagtaattcagatgtaccgttcgttcgactcggtccgcactag

SEQ ID NO: 6943 - DNA, 57 bp, synthetic construct
  source 1..57: mol_type = other DNA
  misc_feature 1..57: note = Synthetic
atgaaagtaattcagatgtaccgttcgttcgactcggtccgcactagcctgaggtaa

SEQ ID NO: 6944 - DNA, 195 bp, synthetic construct
  misc_feature 1..195: note = Synthetic
  source 1..195: mol_type = other DNA
atggatgtactgagtaaaagttctttgaaggagttgttagctcatttggagagaactccacttgaggaagcgatttcttataagattggaactataccatatcagaatgttttgataagcagaaatgaatattataatcaaccgtatccagatgtgacttcattaattgacgcgactcggtccgcactagcctga

SEQ ID NO: 6945 - DNA, 198 bp, synthetic construct
  source 1..198: mol_type = other DNA
  misc_feature 1..198: note = Synthetic
ttgcggcacttcttaggcttatttaaaaccgcccaggctatgctaccagtcattttaattttgctactaccctgcattcccctagcttccaccgccactcgcgctacacctgaacaacttagaaaatgcaaatttcaacaaccatggtcatttcttgattgctaccatgacgactcggtccgcactagcctgaggtaa

SEQ ID NO: 6946 - DNA, 33 bp, synthetic construct
  misc_feature 1..33: note = Synthetic
  source 1..33: mol_type = other DNA
atgcaaatttcaacaaccatggtcatttcttga

SEQ ID NO: 6947 - DNA, 117 bp, synthetic construct
  source 1..117: mol_type = other DNA
  misc_feature 1..117: note = Synthetic
atgctcttgttgcgcgagatgaagtcggagtacgacttctcgccagcaccctcgcgcaggtacgcgcggatcttcgggatgatctccagcagcacggactccttggtgttcatttaa

SEQ ID NO: 6948 - DNA, 24 bp, synthetic construct
  source 1..24: mol_type = other DNA
  misc_feature 1..24: note = Synthetic
atgcaaaatacacgaaggagttag

SEQ ID NO: 6949 - DNA, 168 bp, synthetic construct
  misc_feature 1..168: note = Synthetic
  source 1..168: mol_type = other DNA
ctgaaaatgatgctctgcgtgatgatgttgccgctggtcgtcgtcggttgcacatcaaagcagtctgtcagtcagtgcgtgaagccaccaccgcctccggcgtggataatgcagcctccccccgactggcagacaccgctcgactcggtccgcactagcctgaggtaa

SEQ ID NO: 6950 - DNA, 33 bp, synthetic construct
  misc_feature 1..33: note = Synthetic
  source 1..33: mol_type = other DNA
ctgcgctcgatgcaaaatacacgaaggagttag

SEQ ID NO: 6951 - DNA, 168 bp, synthetic construct
  misc_feature 1..168: note = Synthetic
  source 1..168: mol_type = other DNA
ctgaaagccatgctctgcgtgatgatgttgccgctggtcgtcgtcggttgcacatcaaagcagtctgtcagtcagtgcgtgaagccaccaccgcctccggcgtggataatgcagcctccccccgactggcagacaccgctcgactcggtccgcactagcctgaggtaa

SEQ ID NO: 6952 - DNA, 117 bp, synthetic construct
  source 1..117: mol_type = other DNA
  misc_feature 1..117: note = Synthetic
gtgggactccgcgtcgtctgcgccaaatacgccttagcagacccctcgcttaagatggccgatcccaatcgatttcgcgggaagaacctcgactcggtccgcactagcctgaggtaa

SEQ ID NO: 6953 - DNA, 195 bp, synthetic construct
  misc_feature 1..195: note = Synthetic
  source 1..195: mol_type = other DNA
atctcctctgtttcaagaatggaaaacatcatgtggagatcagtagaaggggagctcaacgcaatcctggaagagaatggagttcaactgacggtcgttgtgggatctgtaaaaaaccccatgtggggaggtccacagagattgcccgtgcctgtgaacgagctgcccgactcggtccgcactagcctgaggtaa

SEQ ID NO: 6954 - DNA, 207 bp, synthetic construct
  misc_feature 1..207: note = Synthetic
  source 1..207: mol_type = other DNA
gtggtggacgacgagtacgtgcatgtgaccagcgccgacatggacggcacgcactacgcgcggcacgccttcgtcagctttaactgcgcggagcgcgcattcgcgcgagcgcttggtgcgctcttcgagcgcgactggcagtcgtccttcagctcgccgcttcctcgggcaccgccacccgactcggtccgcactagcctgaggtaa

SEQ ID NO: 6955 - DNA, 168 bp, synthetic construct
  misc_feature 1..168: note = Synthetic
  source 1..168: mol_type = other DNA
atggtacgtccaaccgaggccgaggttaagaaatccctgagcaggcttccagcagcacgcaaaagagcaggtaaccgggcccacctggccacctaccgccggctcctcaagtactccaccctgcccgatctatggcggttcgactcggtccgcactagcctgaggtaa

SEQ ID NO: 6956 - DNA, 33 bp, synthetic construct
  misc_feature 1..33: note = Synthetic
  source 1..33: mol_type = other DNA
ctgctgcatttagagacgtacttgttgttttaa

SEQ ID NO: 6957 - DNA, 153 bp, synthetic construct
  misc_feature 1..153: note = Synthetic
  source 1..153: mol_type = other DNA
atggaccccaatcaaaccaacgtagtgccccccgcattacatttggtggacccacagattcaactgacaataaccagaatggaggacgcaatggggcaaggccaaaacagcgccgaccccaaggtttacccgactcggtccgcactagcctga

SEQ ID NO: 6958 - DNA, 165 bp, synthetic construct
  misc_feature 1..165: note = Synthetic
  source 1..165: mol_type = other DNA
aagcctctgataatggaccccaatcaaaccaacgtagtgccccccgcattacatttggtggacccacagattcaactgacaataaccagaatggaggacgcaatggggcaaggccaaaacagcgccgaccccaaggtttacccgactcggtccgcactagcctga

SEQ ID NO: 6959 - DNA, 198 bp, synthetic construct
  misc_feature 1..198: note = Synthetic
  source 1..198: mol_type = other DNA
ttgcggcacttcttaggcttatttaaaaccatgcaggctatgctaccagtcattttaattttgctactaccctgcattcccctagcttccaccgccactcgcgctacacctgaacaacttagaaaatgcaaatttcaacaaccatggtcatttcttgattgctaccatgacgactcggtccgcactagcctgaggtaa

SEQ ID NO: 6960 - DNA, 153 bp, synthetic construct
  source 1..153: mol_type = other DNA
  misc_feature 1..153: note = Synthetic
attttacgattcttccgagttacgtctgatcctcgacagagtacttcacatagacactataagagtatggatttgattgatatccccccctttacgcccgtgattagccaaggaccctgggaccctggagaactgcgactcggtccgcactag

SEQ ID NO: 6961 - DNA, 198 bp, synthetic construct
  source 1..198: mol_type = other DNA
  misc_feature 1..198: note = Synthetic
ctgggttctgctgcgcttcatctagaaaagatgaagatggtgggtagggattgggaagaagaatctgaccttccatttaagatttggagaaagtttgctgtttgcaagtctgtcaggtttgacagttgggaagagggaaattttataagagtacacggagaccatgatgtcgactcggtccgcactagcctgaggtaa

SEQ ID NO: 6962 - DNA, 222 bp, synthetic construct
  source 1..222: mol_type = other DNA
  misc_feature 1..222: note = Synthetic
attttcttctgtttcttcagcatactgggttctgctgcgcttcatctagaaaaggccaagatggtgggtagggattgggaagaagaatctgaccttccatttaagatttggagaaagtttgctgtttgcaagtctgtcaggtttgacagttgggaagagggaaattttataagagtacacggagaccatgatgtcgactcggtccgcactagcctgaggtaa

SEQ ID NO: 6963 - DNA, 225 bp, synthetic construct
  misc_feature 1..225: note = Synthetic
  source 1..225: mol_type = other DNA
atgtcggtttcgtttattggaaaaaggttgggagatacggggtggtgctcgagcgagagcactggcaggggtggcaaaacgcagttgagcggggtatgcgtgttcagttgggcggcaggggcatgcggccttagcggctcgggctggcgtgctgttttccgtgttgccgacggcggcgcggtccgtcgagaccggcgcgactcggtccgcactagcctgaggtaa

SEQ ID NO: 6964 - DNA, 66 bp, synthetic construct
  source 1..66: mol_type = other DNA
  misc_feature 1..66: note = Synthetic
atctgtccagaccggatgagagtggcgacgtgccaacagctcccgtggccaagccctccaccctga

SEQ ID NO: 6965 - DNA, 168 bp, synthetic construct
  source 1..168: mol_type = other DNA
  misc_feature 1..168: note = Synthetic
atgatggctacccaacatacacaatatcctgatgcaagattgtcttccccaattgtcttagaccaatgtgacctagtgacaagagcatgtggactttactctgagtattcgctgaaccctaaactaaagacatgccgtttcgactcggtccgcactagcctgaggtaa

SEQ ID NO: 6966 - DNA, 165 bp, synthetic construct
  source 1..165: mol_type = other DNA
  misc_feature 1..165: note = Synthetic
atggctacccaacatacacaatatcctgatgcaagattgtcttccccaattgtcttagaccaatgtgacctagtgacaagagcatgtggactttactctgagtattcgctgaaccctaaactaaagacatgccgtttcgactcggtccgcactagcctgaggtaa

SEQ ID NO: 6967 - DNA, 192 bp, synthetic construct
  source 1..192: mol_type = other DNA
  misc_feature 1..192: note = Synthetic
attccaccctccttcctccaggccatgcgcaagtactcccccttccgaaacggatacatggaacccacccttgggcaacacctcccaaccctgtcttttccagaccccggcctccggccccaaaacctgtacaccctctggggagactctgttgtctgcctgtacgactcggtccgcactagcctgaggtaa

SEQ ID NO: 6968 - DNA, 192 bp, synthetic construct
  misc_feature 1..192: note = Synthetic
  source 1..192: mol_type = other DNA
attccaccctccttcctccaggccgcccgcaagtactcccccttccgaaacggatacatggaacccacccttgggcaacacctcccaaccctgtcttttccagaccccggcctccggccccaaaacctgtacaccctctggggagactctgttgtctgcctgtacgactcggtccgcactagcctgaggtaa

SEQ ID NO: 6969 - DNA, 48 bp, synthetic construct
  misc_feature 1..48: note = Synthetic
  source 1..48: mol_type = other DNA
atgccttacattgcttccccctgttcgactcggtccgcactagcctga

SEQ ID NO: 6970 - DNA, 63 bp, synthetic construct
  misc_feature 1..63: note = Synthetic
  source 1..63: mol_type = other DNA
atggactcccatagacatgatccatctgagttgccccaacaacctcgactcggtccgcactag

SEQ ID NO: 6971 - DNA, 168 bp, synthetic construct
  misc_feature 1..168: note = Synthetic
  source 1..168: mol_type = other DNA
atggaacagcagcaggcaccggaccccgcaatgcgggcggcgctgcagagccagccgtccggcattaactcctcggacgattggacccaggccatgcaacgcataatggcgctgacgacccgcaaccccgaagcctttagcgactcggtccgcactagcctgaggtaa

SEQ ID NO: 6972 - DNA, 93 bp, synthetic construct
  source 1..93: mol_type = other DNA
  misc_feature 1..93: note = Synthetic
atggcgcgacccgtatttttgctaggccgaacagcagcaggcaccggaccccgcaatgcgggcggcgctgcagagccagccgtccggcattaa

SEQ ID NO: 6973 - DNA, 126 bp, synthetic construct
  source 1..126: mol_type = other DNA
  misc_feature 1..126: note = Synthetic
ctgcagagccagccgtccggcattaactcctcggacgattggacccaggccatgcaacgcataatggcgctgacgacccgcaaccccgaagcctttagcgactcggtccgcactagcctgaggtaa

SEQ ID NO: 6974 - DNA, 48 bp, synthetic construct
  misc_feature 1..48: note = Synthetic
  source 1..48: mol_type = other DNA
ataaaatattgcaatatggcagtctcgactcggtccgcactagcctga

SEQ ID NO: 6975 - DNA, 210 bp, synthetic construct
  source 1..210: mol_type = other DNA
  misc_feature 1..210: note = Synthetic
gtgtctaacttctcgttgataatcaaccagctaactctcaacatgttcaccaacaaagctatccttgctgtttatcaactccctgaagagtgcacactcgaattggtcgttcgtgacgcgtccggaaacattgtcgactcttgctacgctgagcttttccaactacgtgggaacgtcaaacacgactcggtccgcactagcctgaggtaa

SEQ ID NO: 6976 - DNA, 141 bp, synthetic construct
  misc_feature 1..141: note = Synthetic
  source 1..141: mol_type = other DNA
ttgctgtttatcaactccctgaagagtgcacactcgaattggtcgttcgtgacgcgtccggaaacattgtcgactcttgctacgctgagcttttccaactacgtgggaacgtcaaacacgactcggtccgcactagcctga

SEQ ID NO: 6977 - DNA, 210 bp, synthetic construct
  source 1..210: mol_type = other DNA
  misc_feature 1..210: note = Synthetic
gtgtctaacttctcgttgataatcaaccagctaactctcaacgccttcaccaacaaagctatccttgctgtttatcaactccctgaagagtgcacactcgaattggtcgttcgtgacgcgtccggaaacattgtcgactcttgctacgctgagcttttccaactacgtgggaacgtcaaacacgactcggtccgcactagcctgaggtaa

SEQ ID NO: 6978 - DNA, 165 bp, synthetic construct
  source 1..165: mol_type = other DNA
  misc_feature 1..165: note = Synthetic
acgccttcaccaacaaagctatccttgctgtttatcaactccctgaagagtgcacactcgaattggtcgttcgtgacgcgtccggaaacattgtcgactcttgctacgctgagcttttccaactacgtgggaacgtcaaacacgactcggtccgcactagcctga

SEQ ID NO: 6979 - DNA, 33 bp, synthetic construct
  misc_feature 1..33: note = Synthetic
  source 1..33: mol_type = other DNA
attatacccagccaccgactcggtccgcactag

SEQ ID NO: 6980 - DNA, 39 bp, synthetic construct
  source 1..39: mol_type = other DNA
  misc_feature 1..39: note = Synthetic
acgcgggcttccgggaaaacacgacaacagtatgggtga

SEQ ID NO: 6981 - DNA, 105 bp, synthetic construct
  misc_feature 1..105: note = Synthetic
  source 1..105: mol_type = other DNA
atgggtgatggtcaccgggtccgataccccatacaacaatctttcgtaacgatgaaggatatgccgggatcgaataagctagcgactcggtccgcactagcctga

SEQ ID NO: 6982 - DNA, 195 bp, synthetic construct
  source 1..195: mol_type = other DNA
  misc_feature 1..195: note = Synthetic
attgatctcgtgtgtacaaccgaaatcgccgcgatgttttacgcacacgctctcggtgggtacgacgagaatcttcatgcctttcctggaatatcatcgactgttgccaatgatgtcaggaaatattctgttgtgtcagtttataataacaagtatgacattgtaaacgactcggtccgcactagcctgaggtaa

SEQ ID NO: 6983 - DNA, 84 bp, synthetic construct
  source 1..84: mol_type = other DNA
  misc_feature 1..84: note = Synthetic
atgatacccaagactgcgaccgccgccgggcactgcatgatgaagcaatgcgatggaacagaattggaattacggacgagttag

SEQ ID NO: 6984 - DNA, 84 bp, synthetic construct
  source 1..84: mol_type = other DNA
  misc_feature 1..84: note = Synthetic
ctgctgttggcgcttgtactgctgtgctctctgtctactggtaagcgggctgagctatggctgaatctctgtatgctttcatag

SEQ ID NO: 6985 - DNA, 63 bp, synthetic construct
  source 1..63: mol_type = other DNA
  misc_feature 1..63: note = Synthetic
ataccttcttttgccctgaatctttccacattcctccgcatggggtggtattgcttcacctaa

SEQ ID NO: 6986 - DNA, 168 bp, synthetic construct
  misc_feature 1..168: note = Synthetic
  source 1..168: mol_type = other DNA
atggtgtccgactacgacccggcggtgctcgtgtttatcttctgcatggcgctggccgcgaacttctgcatgcccatgaagacgaagctgagcaccatcttcgtgctgcagtccgtcgtgttctcgtggtttctattccacgactcggtccgcactagcctgaggtaa

SEQ ID NO: 6987 - DNA, 132 bp, synthetic construct
  misc_feature 1..132: note = Synthetic
  source 1..132: mol_type = other DNA
atcttctgcatggcgctggccgcgaacttctgcatgcccatgaagacgaagctgagcaccatcttcgtgctgcagtccgtcgtgttctcgtggtttctattccacgactcggtccgcactagcctgaggtaa

SEQ ID NO: 6988 - DNA, 168 bp, synthetic construct
  source 1..168: mol_type = other DNA
  misc_feature 1..168: note = Synthetic
atgaaccccgtttcggcatcgggcgccccggcccctccgccgcccggcgacgggagttatttgtggatccccgcctctcattacaatcagctcgtcaccgggcaatccgcgccccgccacccgccgctgaccgcgtgcggcgactcggtccgcactagcctgaggtaa

SEQ ID NO: 6989 - DNA, 99 bp, synthetic construct
  source 1..99: mol_type = other DNA
  misc_feature 1..99: note = Synthetic
attttttgcgagtctgtatttcaaaaatgtacaaaggtacaaaaaaagtcaaacttccatgtgtctaataacgactcggtccgcactagcctgaggtaa

SEQ ID NO: 6990 - DNA, 99 bp, synthetic construct
  source 1..99: mol_type = other DNA
  misc_feature 1..99: note = Synthetic
attttttgcgagtcggtatttcaaaaatgtacaaaggtacaaaaaaagtcaaacttccatgtgtctaataacgactcggtccgcactagcctgaggtaa

SEQ ID NO: 6991 - DNA, 72 bp, synthetic construct
  misc_feature 1..72: note = Synthetic
  source 1..72: mol_type = other DNA
atgagcatcgaggcagccgtattccccccaactttatcaggaggtatacgacagccagttccagacacgtga

SEQ ID NO: 6992 - DNA, 24 bp, synthetic construct
  source 1..24: mol_type = other DNA
  misc_feature 1..24: note = Synthetic
atgatccgcgaacgatatttgtga

SEQ ID NO: 6993 - DNA, 168 bp, synthetic construct
  misc_feature 1..168: note = Synthetic
  source 1..168: mol_type = other DNA
atgtccattctcatctcgcccagtaataacaccggttggggcctgcgcgcgcccagcaagatgtacggaggcgctcgccaacgctccacgcaacaccccgtgcgcgtgcgcgggcacttccgcgctccctggggcgccctcgactcggtccgcactagcctgaggtaa

SEQ ID NO: 6994 - DNA, 153 bp, synthetic construct
  source 1..153: mol_type = other DNA
  misc_feature 1..153: note = Synthetic
attgaagacgacttcaaccccgtctacccctatgacacctcctcaactcccagcattccctatgtagctccgcccttcgtttcttccgacgggttacaggaaaaccccccgggagttttagcactcgactcggtccgcactagcctgaggtaa

SEQ ID NO: 6995 - DNA, 66 bp, synthetic construct
  source 1..66: mol_type = other DNA
  misc_feature 1..66: note = Synthetic
ttgaagacgacttcaaccccgtctacccctatgacacctcctcaactcccagcattccctatgtag

SEQ ID NO: 6996 - DNA, 177 bp, synthetic construct
  misc_feature 1..177: note = Synthetic
  source 1..177: mol_type = other DNA
atcttgcaggccaaaagaaccagaattgaagacgacttcaaccccgtctacccctatgacacctcctcaactcccagcattccctatgtagctccgcccttcgtttcttccgacgggttacaggaaaaccccccgggagttttagcactcgactcggtccgcactagcctgaggtaa

SEQ ID NO: 6997 - DNA, 36 bp, synthetic construct
  misc_feature 1..36: note = Synthetic
  source 1..36: mol_type = other DNA
atgacacctcctcaactcccagcattccctatgtag

SEQ ID NO: 6998 - DNA, 15 bp, synthetic construct
  misc_feature 1..15: note = Synthetic
  source 1..15: mol_type = other DNA
atgttaacattgtga

SEQ ID NO: 6999 - DNA, 135 bp, synthetic construct
  misc_feature 1..135: note = Synthetic
  source 1..135: mol_type = other DNA
attagggcctcaggtcggaagataatggatttcacagtatctgagagcttcctacaagagccccgtgtcgagtgctggagccaagccagcgcagtccctgagaatatcgactcggtccgcactagcctgaggtaa

SEQ ID NO: 7000 - DNA, 147 bp, synthetic construct
  misc_feature 1..147: note = Synthetic
  source 1..147: mol_type = other DNA
gtggtgttcggcgtcctgggtctgtgcggcgtggggctggagctgatggtattcttcgcggaaagacgcgtggccgcgcgccgacaagaggagatggacgagctgcttctcgagcaggcgcaggaaggggagtttgttaattattga

SEQ ID NO: 7001 - DNA, 45 bp, synthetic construct
  source 1..45: mol_type = other DNA
  misc_feature 1..45: note = Synthetic
atggggatgtggacgatggtggcgctgctgcccggcagcgagtag

SEQ ID NO: 7002 - DNA, 21 bp, synthetic construct
  source 1..21: mol_type = other DNA
  misc_feature 1..21: note = Synthetic
atggacatgttcagcacgtag

SEQ ID NO: 7003 - DNA, 69 bp, synthetic construct
  misc_feature 1..69: note = Synthetic
  source 1..69: mol_type = other DNA
atgcgcgtgatctgcgtgagttcgtccttggtcatcaccggcgtgccgactcggtccgcactagcctga

SEQ ID NO: 7004 - DNA, 33 bp, synthetic construct
  source 1..33: mol_type = other DNA
  misc_feature 1..33: note = Synthetic
atgagacaagcacatcgactcggtccgcactag

SEQ ID NO: 7005 - DNA, 51 bp, synthetic construct
  source 1..51: mol_type = other DNA
  misc_feature 1..51: note = Synthetic
atgtcattatggagacaatcaagagcattgcagatatggcgaccggtgtaa

SEQ ID NO: 7006 - DNA, 168 bp, synthetic construct
  source 1..168: mol_type = other DNA
  misc_feature 1..168: note = Synthetic
atggagacaatcaagagcattgcagatatggcgaccggtgtaactaaaaccattgatgccacaatcaattctgttaatgagatcatcactaacacagataatgcttcaggtggagatatattgactaaagttgctgatgacgactcggtccgcactagcctgaggtaa

SEQ ID NO: 7007 - DNA, 162 bp, synthetic construct
  source 1..162: mol_type = other DNA
  misc_feature 1..162: note = Synthetic
attctcatctcgcccagcaataacaccggctggggtcttactaggcccagcaccatgtacggaggagccaagaagcgctcccaacagcaccccgttcgcgtccgcggccactttcgcgctccctggggcgcttacgactcggtccgcactagcctgaggtaa

SEQ ID NO: 7008 - DNA, 147 bp, synthetic construct
  source 1..147: mol_type = other DNA
  misc_feature 1..147: note = Synthetic
atgtttacccgcagcggtacacaaataggtgctagggttcacttttatcatgatataagtcctattgcaccttccccagaatatattgaactgcagcctttagtatctgccacggaggacaatgacttgcgactcggtccgcactag

SEQ ID NO: 7009 - DNA, 183 bp, synthetic construct
  misc_feature 1..183: note = Synthetic
  source 1..183: mol_type = other DNA
attgctacttgcatgatggctgagcccacaggctccggcgagcaggagctcagggccatcatccgcgacctgggctgcgggccctacttcctgggcaccttcgataagcgcttcccgggattcatggccccgcacaagctggcctgcgccatcgtcgactcggtccgcactagcctgaggtaa

SEQ ID NO: 7010 - DNA, 183 bp, synthetic construct
  source 1..183: mol_type = other DNA
  misc_feature 1..183: note = Synthetic
attgctacttgcatggccgctgagcccacaggctccggcgagcaggagctcagggccatcatccgcgacctgggctgcgggccctacttcctgggcaccttcgataagcgcttcccgggattcatggccccgcacaagctggcctgcgccatcgtcgactcggtccgcactagcctgaggtaa

SEQ ID NO: 7011 - DNA, 108 bp, synthetic construct
  misc_feature 1..108: note = Synthetic
  source 1..108: mol_type = other DNA
atggtagagcgggaaatgtccgcagtctcttgcggggcttctaccgtagtccgtagggactgcgaggacacgttgcgcgacggagatgcgggagttgacacttcgtga

SEQ ID NO: 7012 - DNA, 165 bp, synthetic construct
  misc_feature 1..165: note = Synthetic
  source 1..165: mol_type = other DNA
gtgacaatggcaggaaacatgatttgcaacgtgttcgctggtcttgctactgaaatttgctcccctaaacaaggacctctccttgacaacgaattgccccttccacttgaattggctgaatttccaaacaaagacaacgactcggtccgcactagcctgaggtaa

SEQ ID NO: 7013 - DNA, 159 bp, synthetic construct
  source 1..159: mol_type = other DNA
  misc_feature 1..159: note = Synthetic
atggcaggaaacatgatttgcaacgtgttcgctggtcttgctactgaaatttgctcccctaaacaaggacctctccttgacaacgaattgccccttccacttgaattggctgaatttccaaacaaagacaacgactcggtccgcactagcctgaggtaa

SEQ ID NO: 7014 - DNA, 186 bp, synthetic construct
  source 1..186: mol_type = other DNA
  misc_feature 1..186: note = Synthetic
attgttaatattgacattatggagacaattaagagtattgcagatatggctactggtgttgtaagttctgttgattctaccatcaatgcagtcaatgaaaaggtagaaagcgtcggtaatgaaattggaggtaatttgttaactaaagtagctgatgacgactcggtccgcactagcctgaggtaa

SEQ ID NO: 7015 - DNA, 186 bp, synthetic construct
  misc_feature 1..186: note = Synthetic
  source 1..186: mol_type = other DNA
attgttaatattgacattgccgagacaattaagagtattgcagatatggctactggtgttgtaagttctgttgattctaccatcaatgcagtcaatgaaaaggtagaaagcgtcggtaatgaaattggaggtaatttgttaactaaagtagctgatgacgactcggtccgcactagcctgaggtaa

SEQ ID NO: 7016 - DNA, 162 bp, synthetic construct
  misc_feature 1..162: note = Synthetic
  source 1..162: mol_type = other DNA
atgagactgcttgtttgcgcgaagcatgtgacggcctcttggatacacggcatttggagaatgagcagccatcaaatcatcacaagatgggcaggcgcggaaccctgtgccctcgtgctcgcacacgcgtgctgcgactcggtccgcactagcctgaggtaa

SEQ ID NO: 7017 - DNA, 72 bp, synthetic construct
  misc_feature 1..72: note = Synthetic
  source 1..72: mol_type = other DNA
atggtaacttcgaaaccgttatttatagcagatatagggataggagtagcgactcggtccgcactagcctga

SEQ ID NO: 7018 - DNA, 168 bp, synthetic construct
  source 1..168: mol_type = other DNA
  misc_feature 1..168: note = Synthetic
atggctacacaacatacgcaatatccagacgcaaggttatcatcacctatagttttagatcagtgtgatcttgtcactcgtgcttgtggattgtattccgcatactccttaaatccccaactaaagaactgtagactacccgactcggtccgcactagcctgaggtaa

SEQ ID NO: 7019 - DNA, 78 bp, synthetic construct
  source 1..78: mol_type = other DNA
  misc_feature 1..78: note = Synthetic
ttgtattccgcatactccttaaatccccaactaaagaactgtagactacccgactcggtccgcactagcctgaggtaa

SEQ ID NO: 7020 - DNA, 21 bp, synthetic construct
  source 1..21: mol_type = other DNA
  misc_feature 1..21: note = Synthetic
atgccagtgtacaccagctaa

SEQ ID NO: 7021 - DNA, 51 bp, synthetic construct
  misc_feature 1..51: note = Synthetic
  source 1..51: mol_type = other DNA
atggggcatgggacggacggcgagtggtatttgaggaagaaactgagttga

SEQ ID NO: 7022 - DNA, 63 bp, synthetic construct
  misc_feature 1..63: note = Synthetic
  source 1..63: mol_type = other DNA
atggcttcgcttccatccgtgtccccaatatcgtacagtgccattccagatcgcgtggcttga

SEQ ID NO: 7023 - DNA, 18 bp, synthetic construct
  source 1..18: mol_type = other DNA
  misc_feature 1..18: note = Synthetic
atgcggcagtggacgtga

SEQ ID NO: 7024 - DNA, 168 bp, synthetic construct
  misc_feature 1..168: note = Synthetic
  source 1..168: mol_type = other DNA
atgaatagaggaagcttgaagaaggggcctccgggcccaacatccaaccgtccgtcggttggaccgcccgactcggcgggaaaacgagtcaaacaagtggccccaccaccaactaggggtcacatggagagaggactctccgactcggtccgcactagcctgaggtaa

SEQ ID NO: 7025 - DNA, 63 bp, synthetic construct
  misc_feature 1..63: note = Synthetic
  source 1..63: mol_type = other DNA
atcgagctaaattttaaatcaaaggagttgttcggaaaagtgaccttggttcgttgccaatag

SEQ ID NO: 7026 - DNA, 168 bp, synthetic construct
  source 1..168: mol_type = other DNA
  misc_feature 1..168: note = Synthetic
atgggtcaaatatcagtatatctaattaatagcgtgctattattgctggtatatcctgtgaattcgattgacaatacactcattgccccaatcggagttgccagcgcaaatgaatggcagcttgctgcatatacaacatccgactcggtccgcactagcctgaggtaa

SEQ ID NO: 7027 - DNA, 168 bp, synthetic construct
  misc_feature 1..168: note = Synthetic
  source 1..168: mol_type = other DNA
atgtccattctcatctcgcccagtaataacaccggttggggtctgcgcgcgcccagcaagatgtacggaggcgctcgccaacgctccacgcaacaccccgtgcgcgtgcgcgggcacttccgcgctccctggggcgccctcgactcggtccgcactagcctgaggtaa

SEQ ID NO: 7028 - DNA, 162 bp, synthetic construct
  misc_feature 1..162: note = Synthetic
  source 1..162: mol_type = other DNA
attctcatctcgcccagtaataacaccggttggggtctgcgcgcgcccagcaagatgtacggaggcgctcgccaacgctccacgcaacaccccgtgcgcgtgcgcgggcacttccgcgctccctggggcgccctcgactcggtccgcactagcctgaggtaa

SEQ ID NO: 7029 - DNA, 168 bp, synthetic construct
  source 1..168: mol_type = other DNA
  misc_feature 1..168: note = Synthetic
atgtccattctcatctcgcccagcaataacaccggctggggtcttactaggcccagcaccatgtacggaggagccaagaagcgctcccaacagcaccccgttcgcgtccgcggccactttcgcgctccctggggcgcttacgactcggtccgcactagcctgaggtaa

SEQ ID NO: 7030 - DNA, 144 bp, synthetic construct
  misc_feature 1..144: note = Synthetic
  source 1..144: mol_type = other DNA
atactgtccgtggcgctctcttcccactcactccagccggacttcaggcctgccatccagttcccgcgaagctggtcttcagccgcccaggtctttttctgctctgacatgacgttattcagcgccagcggattatcgccatag

SEQ ID NO: 7031 - DNA, 36 bp, synthetic construct
  misc_feature 1..36: note = Synthetic
  source 1..36: mol_type = other DNA
ctggtcttcagccgcccaggtctttttctgctctga

SEQ ID NO: 7032 - DNA, 222 bp, synthetic construct
  source 1..222: mol_type = other DNA
  misc_feature 1..222: note = Synthetic
gtggctgcactttttacctgcgacatactgtccgtggcgctctcttcccactcactccagccggacttcaggcctgccatccagttcccgcgaagctggtcttcagccgcccaggtctttttctgctctgacgccacgttattcagcgccagcggattatcgccatactgttccttcaggcgctgttccgtggccgactcggtccgcactagcctgaggtaa

SEQ ID NO: 7033 - DNA, 195 bp, synthetic construct
  source 1..195: mol_type = other DNA
  misc_feature 1..195: note = Synthetic
ctgtccgtggcgctctcttcccactcactccagccggacttcaggcctgccatccagttcccgcgaagctggtcttcagccgcccaggtctttttctgctctgacatgacgttattcagcgccagcggattatcgccatactgttccttcaggcgctgttccgtggccgactcggtccgcactagcctgaggtaa

SEQ ID NO: 7034 - DNA, 168 bp, synthetic construct
  source 1..168: mol_type = other DNA
  misc_feature 1..168: note = Synthetic
atgaccatgagactgcttgtttgcgcgaagcatgtgacggcctcttggatacacggcatttggagaatgagcagccatcaaatcatcacaagatgggcaggcgcggaaccctgtgccctcgtgctcgcacacgcgtgctgcgactcggtccgcactagcctgaggtaa

SEQ ID NO: 7035 - DNA, 33 bp, synthetic construct
  misc_feature 1..33: note = Synthetic
  source 1..33: mol_type = other DNA
atgagcatctcggcccagcgtactcctacatga

SEQ ID NO: 7036 - DNA, 51 bp, synthetic construct
  misc_feature 1..51: note = Synthetic
  source 1..51: mol_type = other DNA
atgaatagagtcttccttatgccacgaagaccacgcctcgccaccgagtag

SEQ ID NO: 7037 - DNA, 39 bp, synthetic construct
  source 1..39: mol_type = other DNA
  misc_feature 1..39: note = Synthetic
atgtcagcctcgacaacttgcataaatgctttcttgtag

SEQ ID NO: 7038 - DNA, 54 bp, synthetic construct
  misc_feature 1..54: note = Synthetic
  source 1..54: mol_type = other DNA
atggtgctctgcctggcgaaatgctttagcaaaacgtcgccttccaggaggtag

SEQ ID NO: 7039 - DNA, 51 bp, synthetic construct
  misc_feature 1..51: note = Synthetic
  source 1..51: mol_type = other DNA
atgtaccagacgatttatacattaaaggctctgggtctactgcaaatttag

SEQ ID NO: 7040 - DNA, 123 bp, synthetic construct
  source 1..123: mol_type = other DNA
  misc_feature 1..123: note = Synthetic
atgcccaaatattcaataaaccttattggttacaacgagcacagggccacaataatggcatttgttggggtaaccaactatttgttactgttgttcgactcggtccgcactagcctgaggtaa

SEQ ID NO: 7041 - DNA, 15 bp, synthetic construct
  misc_feature 1..15: note = Synthetic
  source 1..15: mol_type = other DNA
atgacactgtactga

SEQ ID NO: 7042 - DNA, 39 bp, synthetic construct
  misc_feature 1..39: note = Synthetic
  source 1..39: mol_type = other DNA
atgccgtcctatcgcagagctctcgaggcggcggcgtaa

SEQ ID NO: 7043 - DNA, 54 bp, synthetic construct
  misc_feature 1..54: note = Synthetic
  source 1..54: mol_type = other DNA
aaggagatggagaaaaacttacaaatacaaacgactcggtccgcactagcctga

SEQ ID NO: 7044 - DNA, 54 bp, synthetic construct
  source 1..54: mol_type = other DNA
  misc_feature 1..54: note = Synthetic
aaggagatggagaaaaacttacaagcccaaacgactcggtccgcactagcctga

SEQ ID NO: 7045 - DNA, 24 bp, synthetic construct
  source 1..24: mol_type = other DNA
  misc_feature 1..24: note = Synthetic
atgccgcataaaaaaaaacaataa

SEQ ID NO: 7046 - DNA, 54 bp, synthetic construct
  source 1..54: mol_type = other DNA
  misc_feature 1..54: note = Synthetic
atgaagactttgacgacatggattcctccaacgttaaagttactggtcccctag

SEQ ID NO: 7047 - DNA, 207 bp, synthetic construct
  source 1..207: mol_type = other DNA
  misc_feature 1..207: note = Synthetic
atggattcctccaacgttaaagttactggtcccctagccgctaaagctagcgatccagattccaccttcgccaagcttaaggcgaagttttctgccctccgcaatccacagcctcctgaccccccggaggcaccgcggctggaaacaccccccatggccgcgcctcccctgggcagccccgactcggtccgcactagcctgaggtaa

SEQ ID NO: 7048 - DNA, 228 bp, synthetic construct
  misc_feature 1..228: note = Synthetic
  source 1..228: mol_type = other DNA
gtgaatgaagactttgacgacgccgattcctccaacgttaaagttactggtcccctagccgctaaagctagcgatccagattccaccttcgccaagcttaaggcgaagttttctgccctccgcaatccacagcctcctgaccccccggaggcaccgcggctggaaacaccccccatggccgcgcctcccctgggcagccccgactcggtccgcactagcctgaggtaa

SEQ ID NO: 7049 - DNA, 54 bp, synthetic construct
  source 1..54: mol_type = other DNA
  misc_feature 1..54: note = Synthetic
atgaagactttgacgacgccgattcctccaacgttaaagttactggtcccctag

SEQ ID NO: 7050 - DNA, 213 bp, synthetic construct
  source 1..213: mol_type = other DNA
  misc_feature 1..213: note = Synthetic
atggcgtctaacgacgctagtgttgccaacagcaacagcaaaaccattgctgccaacaacaccacgacccctaaacaagggggcgtgtttgcaaacatgaagattgggctcaagaaagttcttgaacccaaatctgagacacccacggtaagaccaaaagacgtgggtaaaccggggggcaccagtccaccgactcggtccgcactagcctga

SEQ ID NO: 7051 - DNA, 213 bp, synthetic construct
  source 1..213: mol_type = other DNA
  misc_feature 1..213: note = Synthetic
atggcgtctaacgacgcttccgctgccgctgctgctaacagcaacaacgacaccgcaaaatcttcaagtgacggaatgctttctagtatggctgtcacatttaaacgagccctcggggcacggcctaaacagcctcccccgagggaaataccacaaagacccccacgaccacccaccccagaactggtcacgactcggtccgcactagcctga

SEQ ID NO: 7052 - DNA, 219 bp, synthetic construct
  source 1..219: mol_type = other DNA
  misc_feature 1..219: note = Synthetic
atgatgatggcgtcaaaagacgtcgttcctactgctgctagcagtgaaaatgctaacaacaatagtagtattaagtctcgtctattggcgagactcaagggttcaggtggggctacgtccccacccaactcgataaagataaccaaccaagatatggctctggggctgattggacaggtcccagcgccaaaggccacgactcggtccgcactagcctga

SEQ ID NO: 7053 - DNA, 168 bp, synthetic construct
  misc_feature 1..168: note = Synthetic
  source 1..168: mol_type = other DNA
atgagcgggacgacggacggcaatgcgtttgaggggggagtgttcagcccatatctgacatctcgtcttccttcctgggcaggagttcgtcagaatgtagtgggctccaccgtggacggacggccggtcgcccctgcaaacgactcggtccgcactagcctgaggtaa

SEQ ID NO: 7054 - DNA, 42 bp, synthetic construct
  misc_feature 1..42: note = Synthetic
  source 1..42: mol_type = other DNA
atgggatgccaattaaatgataaaattccgcggacagcttag

SEQ ID NO: 7055 - DNA, 150 bp, synthetic construct
  misc_feature 1..150: note = Synthetic
  source 1..150: mol_type = other DNA
atgggttctccggaagatgatttgacagactttatagaaattgttaaatctgttctaagtgatgagaaaactgtcacatcaactaataataccggttgttggggttggtattggttaattattattttttttcgactcggtccgcactag

SEQ ID NO: 7056 - DNA, 105 bp, synthetic construct
  misc_feature 1..105: note = Synthetic
  source 1..105: mol_type = other DNA
atgagctcggggaatgggcttgcaccgctgacgcagatggaagacttaaggcagcagcagaagaagcaggcagctgagttgtgttctgttgagagtcagaggtaa

SEQ ID NO: 7057 - DNA, 222 bp, synthetic construct
  misc_feature 1..222: note = Synthetic
  source 1..222: mol_type = other DNA
gtggctgcactttttacctgcgacatactgtccgtggcgctctcttcccactcactccagccggacttcaggcctgccatccagttcccgcgaagctggtcttcagccgcccaggtctttttctgctctgacatgacgttattcagcgccagcggattatcgccatactgttccttcaggcgctgttccgtggccgactcggtccgcactagcctgaggtaa

SEQ ID NO: 7058 - DNA, 60 bp, synthetic construct
  misc_feature 1..60: note = Synthetic
  source 1..60: mol_type = other DNA
attttggtcagactggagacgcagactcagtacctgacgactcggtccgcactagcctga

SEQ ID NO: 7059 - DNA, 21 bp, synthetic construct
  misc_feature 1..21: note = Synthetic
  source 1..21: mol_type = other DNA
atgcagcgtactcctacatga

SEQ ID NO: 7060 - DNA, 216 bp, synthetic construct
  source 1..216: mol_type = other DNA
  misc_feature 1..216: note = Synthetic
ttgaggccagagacgagctgcgacaggccctcgagccatttgaggaacgccgatgtgaatatggctgcggagttgagcccgacgaactcctccagcagtggcgagttgagtgtctccccagaaccccctcgagagacccaggcctttttggggaaggtgactgtcattgattacttcacctttcagcacgactcggtccgcactagcctgaggtaa

SEQ ID NO: 7061 - DNA, 216 bp, synthetic construct
  misc_feature 1..216: note = Synthetic
  source 1..216: mol_type = other DNA
atgatggcgtcaaaagacgtcgttcctactgctgctagcagtgaaaatgctaacaacaatagtagtattaagtctcgtctattggcgagactcaagggttcaggtggggctacgtccccacccaactcgataaagataaccaaccaagatatggctctggggctgattggacaggtcccagcgccaaaggccacgactcggtccgcactagcctga

SEQ ID NO: 7062 - DNA, 18 bp, synthetic construct
  misc_feature 1..18: note = Synthetic
  source 1..18: mol_type = other DNA
ttgaccgtaatgggatag

SEQ ID NO: 7063 - DNA, 15 bp, synthetic construct
  misc_feature 1..15: note = Synthetic
  source 1..15: mol_type = other DNA
atgggcgcatcgtaa

SEQ ID NO: 7064 - DNA, 87 bp, synthetic construct
  misc_feature 1..87: note = Synthetic
  source 1..87: mol_type = other DNA
atcggcctcaggaagatcgcactccagccagctttccggcaccgcttctggtgccggaaaccaggcaaacgactcggtccgcactag

SEQ ID NO: 7065 - DNA, 168 bp, synthetic construct
  source 1..168: mol_type = other DNA
  misc_feature 1..168: note = Synthetic
atgattgcaaaatgtaccttgtgttggacagtatttgttcacgcgctaatcattttaatgatacttttattaattcttcgttctctaattggatttaacaacgatctttggtcgcaatcacaactagcttttacttgtctcgactcggtccgcactagcctgaggtaa

SEQ ID NO: 7066 - DNA, 204 bp, synthetic construct
  source 1..204: mol_type = other DNA
  misc_feature 1..204: note = Synthetic
atggattccaacacgataacctcgtttcaggacattttacagaggatgtcaaaaatgcaattggaatcctcatcggtggacttgaatggaatgataactcaattcgagcgtctgaaaatatacagagattcgcttggggaatccatgatgagaatgggggaccttcactccctccaaaacagaaaccgactcggtccgcactag

SEQ ID NO: 7067 - DNA, 204 bp, synthetic construct
  misc_feature 1..204: note = Synthetic
  source 1..204: mol_type = other DNA
atggattccaacacgataacctcgtttcaggtagattgttatctatggcacataagaaagctactcagtatgagagacatgtgtgatgccccctttgatgacaggctccgaagagaccaaaaggcattaaagggaagaggcagcacacttggactcgatttaagagtggctacaatggaggggaaacgactcggtccgcactag

SEQ ID NO: 7068 - DNA, 213 bp, synthetic construct
  source 1..213: mol_type = other DNA
  misc_feature 1..213: note = Synthetic
ctgtcaatctgttccactacgctcctgactttggcatccgatgtcatgttgaggatgaacccggggctgggctcgtccatatcagtgcacccttccgagctgtccatctccctctttgagatcctgcaaggcaagtattcttatgtcagaggtcagactctacactgcagcctgcgaaacccgggcgactcggtccgcactagcctgaggtaa

SEQ ID NO: 7069 - DNA, 213 bp, synthetic construct
  source 1..213: mol_type = other DNA
  misc_feature 1..213: note = Synthetic
ctgtcaatctgttccactacgctcctgactttggcatccgatgtcgccttgaggatgaacccggggctgggctcgtccatatcagtgcacccttccgagctgtccatctccctctttgagatcctgcaaggcaagtattcttatgtcagaggtcagactctacactgcagcctgcgaaacccgggcgactcggtccgcactagcctgaggtaa

SEQ ID NO: 7070 - DNA, 219 bp, synthetic construct
  source 1..219: mol_type = other DNA
  misc_feature 1..219: note = Synthetic
atggctaattgccgtccgttgcctattgggcagttgcccaacaggatttttgacaccccacgactcaccccagggtgggtgtgggcgtgcacgagtgaagccacgtttaagttggaatggcttcaggatccggtggtcattcgacccccggacgtgtttgtggcgcaaggggtggtggatgatttcttccgcgactcggtccgcactagcctgaggtaa

SEQ ID NO: 7071 - DNA, 201 bp, synthetic construct
  source 1..201: mol_type = other DNA
  misc_feature 1..201: note = Synthetic
aagacattgccttttgcacagtgtgccgagagcatgctgtctctgtccctgcatacacttcctgctagaatgcgtgtggtgactcgccgtgtgatcaagagcacaggccgcacgtcttctcggacctttttgcgccgagtctcacttgtccccgcagacacttgcgcctgcgacgactcggtccgcactagcctgaggtaa

SEQ ID NO: 7072 - DNA, 153 bp, synthetic construct
  misc_feature 1..153: note = Synthetic
  source 1..153: mol_type = other DNA
ctgcatacacttcctgctagaatgcgtgtggtgactcgccgtgtgatcaagagcacaggccgcacgtcttctcggacctttttgcgccgagtctcacttgtccccgcagacacttgcgcctgcgacgactcggtccgcactagcctgaggtaa

SEQ ID NO: 7073 - DNA, 30 bp, synthetic construct
  misc_feature 1..30: note = Synthetic
  source 1..30: mol_type = other DNA
atggaattaatgtttttgatgctttgttaa

SEQ ID NO: 7074 - DNA, 216 bp, synthetic construct
  source 1..216: mol_type = other DNA
  misc_feature 1..216: note = Synthetic
ttgaggccagagacgagctgcgacaggccctcgagccatttgaggaacatggatgtgaatatggctgcggagttgagcccgacgaactcctccagcagtggcgagttgagtgtctccccagaaccccctcgagagacccaggcctttttggggaaggtgactgtcattgattacttcacctttcagcacgactcggtccgcactagcctgaggtaa

SEQ ID NO: 7075 - DNA, 27 bp, synthetic construct
  misc_feature 1..27: note = Synthetic
  source 1..27: mol_type = other DNA
atgtcaaaatcttgccgatgctcctga

SEQ ID NO: 7076 - DNA, 60 bp, synthetic construct
  misc_feature 1..60: note = Synthetic
  source 1..60: mol_type = other DNA
ctggtggcctggtcagccgagttcacagacgagatgaagataatcttggcatccttctga

SEQ ID NO: 7077 - DNA, 228 bp, synthetic construct
  misc_feature 1..228: note = Synthetic
  source 1..228: mol_type = other DNA
gtgatcgtggccgctaattgccgtccgttgcctattgggcagttgcccaacaggatttttgacaccccacgactcaccccagggtgggtgtgggcgtgcacgagtgaagccacgtttaagttggaatggcttcaggatccggtggtcattcgacccccggacgtgtttgtggcgcaaggggtggtggatgatttcttccgcgactcggtccgcactagcctgaggtaa

SEQ ID NO: 7078 - DNA, 174 bp, synthetic construct
  misc_feature 1..174: note = Synthetic
  source 1..174: mol_type = other DNA
ttggggatggcctcgtgctcaccgccgcggagagtgtcgccggacctgctcgtcagcagcgagctacgcagacggaatatctggaggagagttacgtgtgtcacaggagagcgcgggtctccggcggtaacgacggcggtgtcgtccgactcggtccgcactagcctgaggtaa

SEQ ID NO: 7079 - DNA, 141 bp, synthetic construct
  misc_feature 1..141: note = Synthetic
  source 1..141: mol_type = other DNA
gtgtcgccggacctgctcgtcagcagcgagctacgcagacggaatatctggaggagagttacgtgtgtcacaggagagcgcgggtctccggcggtaacgacggcggtgtcgtccgactcggtccgcactagcctgaggtaa

SEQ ID NO: 7080 - DNA, 132 bp, synthetic construct
  misc_feature 1..132: note = Synthetic
  source 1..132: mol_type = other DNA
atgcgtcatcgccattgctccccaaatacaaaaccaatttcagccagtgcctcgtccattttttcgatgaactccggcacgatctcgtcaaaactcgccatgtacttttcatcccgctcaatcacgacataa

SEQ ID NO: 7081 - DNA, 60 bp, synthetic construct
  source 1..60: mol_type = other DNA
  misc_feature 1..60: note = Synthetic
atgcaggccttcacgcttcatacgcgggtcatagttgcgactcggtccgcactagcctga

SEQ ID NO: 7082 - DNA, 207 bp, synthetic construct
  source 1..207: mol_type = other DNA
  misc_feature 1..207: note = Synthetic
atagccgattccaacacgataacctcgtttcaggacattttacagaggatgtcaaaaatgcaattggaatcctcatcggtggacttgaatggaatgataactcaattcgagcgtctgaaaatatacagagattcgcttggggaatccatgatgagaatgggggaccttcactccctccaaaacagaaaccgactcggtccgcactag

SEQ ID NO: 7083 - DNA, 207 bp, synthetic construct
  source 1..207: mol_type = other DNA
  misc_feature 1..207: note = Synthetic
atagccgattccaacacgataacctcgtttcaggtagattgttatctatggcacataagaaagctactcagtatgagagacatgtgtgatgccccctttgatgacaggctccgaagagaccaaaaggcattaaagggaagaggcagcacacttggactcgatttaagagtggctacaatggaggggaaacgactcggtccgcactag

SEQ ID NO: 7084 - DNA, 219 bp, synthetic construct
  source 1..219: mol_type = other DNA
  misc_feature 1..219: note = Synthetic
atgaccaatgaagaaaaattgattgctgaaattgatagcgcgggcctttcggctgaaatgctggaatccatgccaagccctgaaatgttcccgcttatccttgttaatttgcaagggcgcattgccgaactggaagcgcgggaaactgaaatgctggcccgcgttgatacgctgattgcccgccttgcgcacgactcggtccgcactagcctgaggtaa

SEQ ID NO: 7085 - DNA, 189 bp, synthetic construct
  misc_feature 1..189: note = Synthetic
  source 1..189: mol_type = other DNA
attgatagcgcgggcctttcggctgaaatgctggaatccatgccaagccctgaaatgttcccgcttatccttgttaatttgcaagggcgcattgccgaactggaagcgcgggaaactgaaatgctggcccgcgttgatacgctgattgcccgccttgcgcacgactcggtccgcactagcctgaggtaa

SEQ ID NO: 7086 - DNA, 186 bp, synthetic construct
  misc_feature 1..186: note = Synthetic
  source 1..186: mol_type = other DNA
acggagtcgtctacgaacacggcagccgggtctcggctgtgctgcgcgaggcgcgctccggacgcgagtccgcgttcgtgttctccgcagtgctgctggacggcgtccccgccgagaagaaggacgagaaaaaggacgagggcgggaaggctgcggagaaggacgactcggtccgcactagcctga

SEQ ID NO: 7087 - DNA, 30 bp, synthetic construct
  misc_feature 1..30: note = Synthetic
  source 1..30: mol_type = other DNA
gtgaaaaggcgcgcggaagtgacgttgtga

SEQ ID NO: 7088 - DNA, 180 bp, synthetic construct
  misc_feature 1..180: note = Synthetic
  source 1..180: mol_type = other DNA
ataaagttaatcgccgttcttcctgttcttccctcccccgccgtcaccgaaacccaacaaaattgcatcatctggctgggtttggcccattccaccgtggttgatgtaatcagagccatcagggcggatgggattttcatcacccaagaggccgactcggtccgcactagcctgaggtaa

SEQ ID NO: 7089 - DNA, 18 bp, synthetic construct
  source 1..18: mol_type = other DNA
  misc_feature 1..18: note = Synthetic
atgcaggagctgatatga

SEQ ID NO: 7090 - DNA, 177 bp, synthetic construct
  source 1..177: mol_type = other DNA
  misc_feature 1..177: note = Synthetic
acgatcgggatggtgctgaacgacccgctgggcgtcacgcccactatcaggtacaccagcttggcgttgcacagcgggcaggtgttgcgcaattgcatccaggttttcatgcacgggatgcagaagcggtgcatgcacgggaaggtgtccgactcggtccgcactagcctgaggtaa

SEQ ID NO: 7091 - DNA, 75 bp, synthetic construct
  source 1..75: mol_type = other DNA
  misc_feature 1..75: note = Synthetic
gtgggggtgtcacgatacccgagccgcgcgcgctgcagagcacgctcaggctcgactcggtccgcactagcctga

SEQ ID NO: 7092 - DNA, 75 bp, synthetic construct
  source 1..75: mol_type = other DNA
  misc_feature 1..75: note = Synthetic
ctgggtaccgagtcggacgacgaggagaccacggtttgggaaaagcgccggatggagtcggatacagacttttaa

SEQ ID NO: 7093 - DNA, 66 bp, synthetic construct
  misc_feature 1..66: note = Synthetic
  source 1..66: mol_type = other DNA
gtgaagatggctgactatcctgttctgtcctggaaaaactttcagcgtcgtaggtggactttgtag

SEQ ID NO: 7094 - DNA, 168 bp, synthetic construct
  source 1..168: mol_type = other DNA
  misc_feature 1..168: note = Synthetic
atggagaagcgagaagttaataaagctctgtatgatcttcaacgtagtactatggtgtacagttccgacgatactcctcctcgttggtctacgacaatggatgctgatacacggcctacagattctgatgctgatgctatcgactcggtccgcactagcctgaggtaa

SEQ ID NO: 7095 - DNA, 165 bp, synthetic construct
  source 1..165: mol_type = other DNA
  misc_feature 1..165: note = Synthetic
atgccgagaagcgagaagttaataaagctctgtatgatcttcaacgtagtactatggtgtacagttccgacgatactcctcctcgttggtctacgacaatggatgctgatacacggcctacagattctgatgctgatgctatcgactcggtccgcactagcctga

SEQ ID NO: 7096 - DNA, 39 bp, synthetic construct
  misc_feature 1..39: note = Synthetic
  source 1..39: mol_type = other DNA
ctgccgaaaagaaagaagacgctttttaccccgctatga

SEQ ID NO: 7097 - DNA, 51 bp, synthetic construct
  misc_feature 1..51: note = Synthetic
  source 1..51: mol_type = other DNA
atgccacaaggaccctcccagacggatacgactcggtccgcactagcctga

SEQ ID NO: 7098 - DNA, 135 bp, synthetic construct
  misc_feature 1..135: note = Synthetic
  source 1..135: mol_type = other DNA
ttgcacttgatggcgtcaagcgcgttgaaggttgaagaactggcgcttgatgaaaaggaagcggaagcattggccggggcagtgcaggaagtggcaagccattacgatattacgcctcgactcggtccgcactag

SEQ ID NO: 7099 - DNA, 168 bp, synthetic construct
  misc_feature 1..168: note = Synthetic
  source 1..168: mol_type = other DNA
atggttcttcctgttcttccctctccctccgtcaccgaaacccaacaaaattgcatcatctggctgggtctggcccattccaccgtggccgatgtgatcagagccatcagagcggatgggattttcatcacccaagaggccgactcggtccgcactagcctgaggtaa

SEQ ID NO: 7100 - DNA, 48 bp, synthetic construct
  misc_feature 1..48: note = Synthetic
  source 1..48: mol_type = other DNA
atgggattttcatcacccaagaggccgactcggtccgcactagcctga

SEQ ID NO: 7101 - DNA, 180 bp, synthetic construct
  source 1..180: mol_type = other DNA
  misc_feature 1..180: note = Synthetic
ataaagttaatcgccgttcttcctgttcttccctctccctccgtcaccgaaacccaacaaaattgcatcatctggctgggtctggcccattccaccgtggccgatgtgatcagagccatcagagcggatgggattttcatcacccaagaggccgactcggtccgcactagcctgaggtaa

SEQ ID NO: 7102 - DNA, 168 bp, synthetic construct
  misc_feature 1..168: note = Synthetic
  source 1..168: mol_type = other DNA
atggttcttcctgttcttccctcccccgccgtcaccgaaacccaacaaaattgcatcatctggctgggtttggcccattccaccgtggttgatgtaatcagagccatcagggcggatgggattttcatcacccaagaggccgactcggtccgcactagcctgaggtaa

SEQ ID NO: 7103 - DNA, 168 bp, synthetic construct
  source 1..168: mol_type = other DNA
  misc_feature 1..168: note = Synthetic
atgtaccacaacggactacatctacatttgatccggaggcagcatatgtggcatttgaagctagatacggacaagtgctcaatgctggtgttgttagagtcttcttcctcaaccaaaagaaggccaaagatgtcttacgtcgactcggtccgcactagcctgaggtaa

SEQ ID NO: 7104 - DNA, 171 bp, synthetic construct
  source 1..171: mol_type = other DNA
  misc_feature 1..171: note = Synthetic
acggcctaccacaacggactacatctacatttgatccggaggcagcatatgtggcatttgaagctagatacggacaagtgctcaatgctggtgttgttagagtcttcttcctcaaccaaaagaaggccaaagatgtcttacgtcgactcggtccgcactagcctgaggtaa

SEQ ID NO: 7105 - DNA, 123 bp, synthetic construct
  source 1..123: mol_type = other DNA
  misc_feature 1..123: note = Synthetic
attggaacaaaatatattttcaaggtgatcatgataattggcatagagcagctggaaaagttgatattaatggactctattttgaggatgcaaaccgactcggtccgcactagcctgaggtaa

SEQ ID NO: 7106 - DNA, 225 bp, synthetic construct
  source 1..225: mol_type = other DNA
  misc_feature 1..225: note = Synthetic
ctgatatgcggcgtgctgctgctgacggccgcctgcgtcttcgccttcgtggatttcagcaagaacaccagcaacatcaccgactacgtgtggcgcgcgctgtgcgtaacctgcttcatagtgggcgccgtgctgctgctcgggctgttcgtgttcagcatgtacaggaagtgctccggcagcgtcccgtacgcccgcgactcggtccgcactagcctgaggtaa

SEQ ID NO: 7107 - DNA, 225 bp, synthetic construct
  misc_feature 1..225: note = Synthetic
  source 1..225: mol_type = other DNA
ctgcagaagctgcgcgtgtacacggacttggtggacgcgcggctgcgcgagatgcggcacaagaccaacctcgtggacgcggtgtcgcgtctcgtgtgtccgtgcgcgctgccgccggaggtggtgcgcggcatcctcgtgcacgtgccgacagacagcctgcggcacacgttgaccctcggcgtggcacaggcctccgactcggtccgcactagcctgaggtaa

SEQ ID NO: 7108 - DNA, 168 bp, synthetic construct
  misc_feature 1..168: note = Synthetic
  source 1..168: mol_type = other DNA
atgagaatgctgccggatttttttaccgggaactgggatgacatgttccaggggttgctggagactgaatatgtgtttgatttccctgaaccttctgaggcttctgaagaaatgtcgcttcatgatctttttgatgtggacgactcggtccgcactagcctgaggtaa

SEQ ID NO: 7109 - DNA, 90 bp, synthetic construct
  source 1..90: mol_type = other DNA
  misc_feature 1..90: note = Synthetic
atgttgccgctgcctccttgcagatatggccctcacttgtcgccttcgcgttcccatcactggttaccgaggaagaaactcgcgccgtag

SEQ ID NO: 7110 - DNA, 90 bp, synthetic construct
  source 1..90: mol_type = other DNA
  misc_feature 1..90: note = Synthetic
atgttgccgctgcctccttgcagatgccgccctcacttgtcgccttcgcgttcccatcactggttaccgaggaagaaactcgcgccgtag

SEQ ID NO: 7111 - DNA, 165 bp, synthetic construct
  source 1..165: mol_type = other DNA
  misc_feature 1..165: note = Synthetic
atggatctggagccacaggaaagcttaaccgcccccaccgctcccgccattggcgctacggctgtcatggagaaggacaaaagtctactcataccccaagacgcaccggttgagcagaacttgggctacgagactcccgactcggtccgcactagcctgaggtaa

SEQ ID NO: 7112 - DNA, 87 bp, synthetic construct
  source 1..87: mol_type = other DNA
  misc_feature 1..87: note = Synthetic
aggacaaaagtctactcataccccaagacgcaccggttgagcagaacttgggctacgagactcccgactcggtccgcactagcctga

SEQ ID NO: 7113 - DNA, 108 bp, synthetic construct
  source 1..108: mol_type = other DNA
  misc_feature 1..108: note = Synthetic
attcgtgcgcataaaaggacgttggtaactgtgttcgctagctcatttgtgttagatgagcggcaaatgactcatctttctgggatttatatgggaatattctggtaa

SEQ ID NO: 7114 - DNA, 15 bp, synthetic construct
  misc_feature 1..15: note = Synthetic
  source 1..15: mol_type = other DNA
atgtatcaattttag

SEQ ID NO: 7115 - DNA, 168 bp, synthetic construct
  misc_feature 1..168: note = Synthetic
  source 1..168: mol_type = other DNA
atgtcgcagggcgccatgcgtgccgttgttcccattatcccattccttttggttcttgtcggtgtatcgggggttcccaccaacgtctcctccaccacccaaccccaactccagaccaccggtcgtccctcgcatgaagccgactcggtccgcactagcctgaggtaa

SEQ ID NO: 7116 - DNA, 81 bp, synthetic construct
  source 1..81: mol_type = other DNA
  misc_feature 1..81: note = Synthetic
acgtctcctccaccacccaaccccaactccagaccaccggtcgtccctcgcatgaagccgactcggtccgcactagcctga

SEQ ID NO: 7117 - DNA, 171 bp, synthetic construct
  misc_feature 1..171: note = Synthetic
  source 1..171: mol_type = other DNA
atcgcctcgcagggcgccatgcgtgccgttgttcccattatcccattccttttggttcttgtcggtgtatcgggggttcccaccaacgtctcctccaccacccaaccccaactccagaccaccggtcgtccctcgcatgaagccgactcggtccgcactagcctgaggtaa

SEQ ID NO: 7118 - DNA, 24 bp, synthetic construct
  source 1..24: mol_type = other DNA
  misc_feature 1..24: note = Synthetic
atgccgagtcatatgcggaagtga

SEQ ID NO: 7119 - DNA, 33 bp, synthetic construct
  misc_feature 1..33: note = Synthetic
  source 1..33: mol_type = other DNA
atgttgccgagcaagcgcacttgcggcgcgtga

SEQ ID NO: 7120 - DNA, 48 bp, synthetic construct
  source 1..48: mol_type = other DNA
  misc_feature 1..48: note = Synthetic
ctgattatccgcaagaacctcgactcggtccgcactagcctgaggtaa

SEQ ID NO: 7121 - DNA, 150 bp, synthetic construct
  source 1..150: mol_type = other DNA
  misc_feature 1..150: note = Synthetic
attcagaccaccgtgaccaccgtcagcgagcgcatccgcaacgagctcgagcagagcgcgagcgctagcgcgaccgccgactgcgacgtcaccatcgggagtctgattatccgcaagaacctcgactcggtccgcactagcctgaggtaa

SEQ ID NO: 7122 - DNA, 51 bp, synthetic construct
  misc_feature 1..51: note = Synthetic
  source 1..51: mol_type = other DNA
ttgccgatggattcaatacaagaacctcggtatccacgagccgcgtattaa

SEQ ID NO: 7123 - DNA, 57 bp, synthetic construct
  source 1..57: mol_type = other DNA
  misc_feature 1..57: note = Synthetic
atgacaaggacctacctgcttacattttggactggcccggaggtcccaggaaagtag

SEQ ID NO: 7124 - DNA, 48 bp, synthetic construct
  misc_feature 1..48: note = Synthetic
  source 1..48: mol_type = other DNA
atgatgcgcgagctctggtctagattcttagttgacgggaccgtgtag

SEQ ID NO: 7125 - DNA, 90 bp, synthetic construct
  source 1..90: mol_type = other DNA
  misc_feature 1..90: note = Synthetic
atgctctgcaacagtgtcaaagctccctctaccttgctgaccaaccctcaagtgttctccctgtccaaacacccaagcttattgggttag

SEQ ID NO: 7126 - DNA, 90 bp, synthetic construct
  misc_feature 1..90: note = Synthetic
  source 1..90: mol_type = other DNA
atgctctgcaacagtgtcaaagctccctctaccttgctgagccaccctcaagtgttctccctgtccaaacacccaagcttattgggttag

SEQ ID NO: 7127 - DNA, 168 bp, synthetic construct
  source 1..168: mol_type = other DNA
  misc_feature 1..168: note = Synthetic
atgctcattgagtcaaccggaatggttagcttacaccgccaaaatgctggcgtagtaggtcaagactctgagactatcgaactcgcacctgaatacgctgaggctatcgcaacccgtgcaggtgcgctggctggcatctctccgacgactcggtccgcactagcctga

SEQ ID NO: 7128 - DNA, 66 bp, synthetic construct
  misc_feature 1..66: note = Synthetic
  source 1..66: mol_type = other DNA
ctgtcgaattatttgctaagcgcagtattcggccccaccccgagcttaagctctttagaaatttga

SEQ ID NO: 7129 - DNA, 81 bp, synthetic construct
  source 1..81: mol_type = other DNA
  misc_feature 1..81: note = Synthetic
atgctaaggatagtgtgttttgcagttcgacgtatagcctctgcaaatacacagatttcgactcggtccgcactagcctga

SEQ ID NO: 7130 - DNA, 192 bp, synthetic construct
  misc_feature 1..192: note = Synthetic
  source 1..192: mol_type = other DNA
atgacgagtttccggatctacaagatcctccagatgaggcctaagcaaaggtgtagaagtgtgtccccctccattccacccactgatatacgcccgacaataaagttgatgatattgaattccacacctactcgtgtttgtgattttatttcatattccatgagagagacgactcggtccgcactagcctga

SEQ ID NO: 7131 - DNA, 180 bp, synthetic construct
  source 1..180: mol_type = other DNA
  misc_feature 1..180: note = Synthetic
acgagggtgtctagagcttcaaatgcgggtgtgatgggttaccccgggcctcgacccaggacgctcaacctaggtgtaattccaatgcgcatggatacctctaagtgtttaagcacggtacgttcgcgcaatccagctgtgcattcccttcacagtatgcaccgactcggtccgcactag

SEQ ID NO: 7132 - DNA, 42 bp, synthetic construct
  misc_feature 1..42: note = Synthetic
  source 1..42: mol_type = other DNA
gtgcaactggtaattaaaataaaaagtaatattcatatgtag

SEQ ID NO: 7133 - DNA, 24 bp, synthetic construct
  source 1..24: mol_type = other DNA
  misc_feature 1..24: note = Synthetic
atgaaaagtaatattcatgtgtag

SEQ ID NO: 7134 - DNA, 36 bp, synthetic construct
  source 1..36: mol_type = other DNA
  misc_feature 1..36: note = Synthetic
ctggtaattaaaatgaaaagtaatattcatgtgtag

SEQ ID NO: 7135 - DNA, 186 bp, synthetic construct
  misc_feature 1..186: note = Synthetic
  source 1..186: mol_type = other DNA
atagttaaattactaagcatgaggactctacttattagatatattctttggagaaatgacaacgatcaaacctattataatgatgattttaaaaagcttatgttgttggatgaattggtagatgacggcgatgtatgtacattgattaagaacatgagcgactcggtccgcactagcctgaggtaa

SEQ ID NO: 7136 - DNA, 66 bp, synthetic construct
  misc_feature 1..66: note = Synthetic
  source 1..66: mol_type = other DNA
atgacaacgatcaaacctattataatgatgattttaaaaagcttatgttgttggatgaattggtag

SEQ ID NO: 7137 - DNA, 24 bp, synthetic construct
  misc_feature 1..24: note = Synthetic
  source 1..24: mol_type = other DNA
atgacggcgatgtatgtacattga

SEQ ID NO: 7138 - DNA, 174 bp, synthetic construct
  source 1..174: mol_type = other DNA
  misc_feature 1..174: note = Synthetic
atgtggcgctcctcaattatgttaatcccaacaccggccgggttctgtttgaggccaagctgtatgctaatggctttctcaccgtcaaccttggcgcctcggaccaggcgatcctgcccgtggacgggatatttaaatttgtttcttgggtttcttcgactcggtccgcactag

SEQ ID NO: 7139 - DNA, 81 bp, synthetic construct
  misc_feature 1..81: note = Synthetic
  source 1..81: mol_type = other DNA
atgcccattcttaagggatcttccggaggtccgctgctgtgccccatgggacaccgcgcgactcggtccgcactagcctga

SEQ ID NO: 7140 - DNA, 204 bp, synthetic construct
  source 1..204: mol_type = other DNA
  misc_feature 1..204: note = Synthetic
atcaactttttgaaatctaccgtgcgcctcgccatcatggacgcgcgcgcggtggccaaacggccgcgcgacccggccgacgaggacaatgaactagtgacggcgctcaaagccaaacgcgaggtaaatactatatcggttcgctatctctaccacgccgatcaccaggcgctcaccgactcggtccgcactagcctgaggtaa

SEQ ID NO: 7141 - DNA, 153 bp, synthetic construct
  misc_feature 1..153: note = Synthetic
  source 1..153: mol_type = other DNA
atttcattaccttgggtggcgttcatctggctagccctccttggcgcggttgggggtgcccgcgttcaggggcccatgcggggctctgctgccctcacctgcgccatcacgccccgtgctgacatcgactcggtccgcactagcctgaggtaa

SEQ ID NO: 7142 - DNA, 198 bp, synthetic construct
  misc_feature 1..198: note = Synthetic
  source 1..198: mol_type = other DNA
acgaagacgctcgcaagtctgttgtttacgatgcagcgcgacagacggtatcgctacagattggcaccatacaacaagtaccaactaccgccctgtgaggaacagtcaaaagctacgttgagtacttcggaaaattctttatggcctgagtgtaatagtctgactttacacgactcggtccgcactagcctgaggtaa

SEQ ID NO: 7143 - DNA, 198 bp, synthetic construct
  misc_feature 1..198: note = Synthetic
  source 1..198: mol_type = other DNA
acgaagacgctcgcaagtctgttgtttacggcccagcgcgacagacggtatcgctacagattggcaccatacaacaagtaccaactaccgccctgtgaggaacagtcaaaagctacgttgagtacttcggaaaattctttatggcctgagtgtaatagtctgactttacacgactcggtccgcactagcctgaggtaa

SEQ ID NO: 7144 - DNA, 192 bp, synthetic construct
  misc_feature 1..192: note = Synthetic
  source 1..192: mol_type = other DNA
gtgatattgatcttcattctattcaagcaatgcaagcaaatcccattgcgtgaagggacaactggctctcgctgctttgctaatggagaattagtcaaaacagtaaatgctactaatgtgccagcagaagtctgcgtgaaagatgatatatcaataattaagtctaacgcgactcggtccgcactagcctga

SEQ ID NO: 7145 - DNA, 45 bp, synthetic construct
  source 1..45: mol_type = other DNA
  misc_feature 1..45: note = Synthetic
ctgttaatccatataatccgccttcaggaccacaacaagatttag

SEQ ID NO: 7146 - DNA, 168 bp, synthetic construct
  source 1..168: mol_type = other DNA
  misc_feature 1..168: note = Synthetic
atgaacatgtctagacaaggtattttccagactgttgggagtggtcttgaccacatcctgtctttggcagacattgaggaagagcaaatgattcaatcagttgataggactgcagtgactggtgcttcttattttacttccgactcggtccgcactagcctgaggtaa

SEQ ID NO: 7147 - DNA, 162 bp, synthetic construct
  misc_feature 1..162: note = Synthetic
  source 1..162: mol_type = other DNA
atgtctagacaaggtattttccagactgttgggagtggtcttgaccacatcctgtctttggcagacattgaggaagagcaaatgattcaatcagttgataggactgcagtgactggtgcttcttattttacttccgactcggtccgcactagcctgaggtaa

SEQ ID NO: 7148 - DNA, 102 bp, synthetic construct
  source 1..102: mol_type = other DNA
  misc_feature 1..102: note = Synthetic
gtgggaccttgctcgctgcccggcgaactggtggagcgcgtgctcgcaaccgtgccactggccgacttgagccgctcgtgcgaccgccgcgcgcccgagtga

SEQ ID NO: 7149 - DNA, 48 bp, synthetic construct
  misc_feature 1..48: note = Synthetic
  source 1..48: mol_type = other DNA
gtgtacgcgcaactggtaattaaaataaaaagtaatattcatatgtag

SEQ ID NO: 7150 - DNA, 36 bp, synthetic construct
  source 1..36: mol_type = other DNA
  misc_feature 1..36: note = Synthetic
ctggtaattaaaataaaaagtaatattcatatgtag

SEQ ID NO: 7151 - DNA, 33 bp, synthetic construct
  source 1..33: mol_type = other DNA
  misc_feature 1..33: note = Synthetic
atgatgttgttgatgtggttaaagccccattaa

SEQ ID NO: 7152 - DNA, 87 bp, synthetic construct
  source 1..87: mol_type = other DNA
  misc_feature 1..87: note = Synthetic
ttgttcgtgaccgatatgcacgggcaaaacggcaggaggttgttagcgcgacctcctgccacccgctttcacgaaggtcatgtgtaa

SEQ ID NO: 7153 - DNA, 30 bp, synthetic construct
  misc_feature 1..30: note = Synthetic
  source 1..30: mol_type = other DNA
atgcggattctttcgggagatagtaattag

SEQ ID NO: 7154 - DNA, 18 bp, synthetic construct
  misc_feature 1..18: note = Synthetic
  source 1..18: mol_type = other DNA
atgccgattccttactag

SEQ ID NO: 7155 - DNA, 63 bp, synthetic construct
  source 1..63: mol_type = other DNA
  misc_feature 1..63: note = Synthetic
gtgtacctgattttcacatttgtgactgctacctgcgactcggtccgcactagcctgaggtaa

SEQ ID NO: 7156 - DNA, 48 bp, synthetic construct
  misc_feature 1..48: note = Synthetic
  source 1..48: mol_type = other DNA
atgcctgccagtcattttttcttcttcgacttttgccgcagtcagtga

SEQ ID NO: 7157 - DNA, 213 bp, synthetic construct
  source 1..213: mol_type = other DNA
  misc_feature 1..213: note = Synthetic
ctgcggaaacctaacattgattcaggtacagggagaaggcgcatgagactcgaaagcgtagctaaatttcattcgccaaaaagcccgatgatgagcgactcaccacgggccacggcttctgactctctttccggtactgatgtgatggctgctatggggatggcgcaatcacaagccggattcggtatggctgcacgactcggtccgcactag

SEQ ID NO: 7158 - DNA, 75 bp, synthetic construct
  misc_feature 1..75: note = Synthetic
  source 1..75: mol_type = other DNA
atgacgttgcaagttagtgggatatcacgtaccgtgagaaagaggaagttacgcctgttgggattgcggaagtga

SEQ ID NO: 7159 - DNA, 75 bp, synthetic construct
  source 1..75: mol_type = other DNA
  misc_feature 1..75: note = Synthetic
gtggaatgtatcgaggacttgcttaacgagtctgggcaacctttggacttgagctgtaaacgccccaggccataa

SEQ ID NO: 7160 - DNA, 228 bp, synthetic construct
  misc_feature 1..228: note = Synthetic
  source 1..228: mol_type = other DNA
gtgggcgttacagcaccttgcctcttcacgatcaagacatttctcctccggggcgcaagcatggtcttcgcgctggtttgcgcgagctgcgggcgcgaccttagcgaggtgcgctatcgcttgctaattgaaaggcagaaactctccgacgtgctgcgcaacctcactcacatgtgctgccggctcaagctggcaacgcacgactcggtccgcactagcctgaggtaa

SEQ ID NO: 7161 - DNA, 120 bp, synthetic construct
  misc_feature 1..120: note = Synthetic
  source 1..120: mol_type = other DNA
gtgcgctatcgcttgctaattgaaaggcagaaactctccgacgtgctgcgcaacctcactcacatgtgctgccggctcaagctggcaacgcacgactcggtccgcactagcctgaggtaa

SEQ ID NO: 7162 - DNA, 168 bp, synthetic construct
  source 1..168: mol_type = other DNA
  misc_feature 1..168: note = Synthetic
atggcgatcagaacggggttttgtaatccctttttaacccaagcatcagggattaaatataacccaagaaccgggcgcggtagtaacagagaatttcttcatagttacaaaactaccatgtcatcgtttcaatttttggccgactcggtccgcactagcctgaggtaa

SEQ ID NO: 7163 - DNA, 129 bp, synthetic construct
  source 1..129: mol_type = other DNA
  misc_feature 1..129: note = Synthetic
atgatagaacgcgtaaatcttatgatggtagttaccaaagttttaatgccggcgaacgtgatttgcccacacctacccgggactggtgttctatttcccaacgcatcgactcggtccgcactagcctga

SEQ ID NO: 7164 - DNA, 150 bp, synthetic construct
  source 1..150: mol_type = other DNA
  misc_feature 1..150: note = Synthetic
ttgcgcgttccttttccagcgatgatagaacgcgtaaatcttatgatggtagttaccaaagttttaatgccggcgaacgtgatttgcccacacctacccgggactggtgttctatttcccaacgcatcgactcggtccgcactagcctga

SEQ ID NO: 7165 - DNA, 96 bp, synthetic construct
  source 1..96: mol_type = other DNA
  misc_feature 1..96: note = Synthetic
atttgtattgtggataaattgtatatggccaagtgtggtgatcaattttaccgcctggttgttgataacgactcggtccgcactagcctgaggtaa

SEQ ID NO: 7166 - DNA, 174 bp, synthetic construct
  misc_feature 1..174: note = Synthetic
  source 1..174: mol_type = other DNA
ttgtgtgttgagcggccctgcatgccgccgacatcagtatgccaggcgacactcttgctgcctattggcaatgatggcgtagagcctcctaagggccctctgagatcaagaggaaggaacagaccgcaccgccttccagccaggtcctacatatcctttctgtggttggcctga

SEQ ID NO: 7167 - DNA, 15 bp, synthetic construct
  misc_feature 1..15: note = Synthetic
  source 1..15: mol_type = other DNA
atcatactgacgtga

SEQ ID NO: 7168 - DNA, 210 bp, synthetic construct
  misc_feature 1..210: note = Synthetic
  source 1..210: mol_type = other DNA
gtgagaactctgttccaacaaatgagggatgtgcttgggacatttgataccgcacagataataaaacttcttcccttcgcagccgctccaccaaagcaaagtagaatgcagttctcctcatttactgtgaatgtgaggggatcaggaatgagaatacttgtaaggggcaattctcctgtattcaactacaaccgactcggtccgcactag

SEQ ID NO: 7169 - DNA, 51 bp, synthetic construct
  misc_feature 1..51: note = Synthetic
  source 1..51: mol_type = other DNA
atgacgtttccagaaatccaaggcataacgactcggtccgcactagcctga

SEQ ID NO: 7170 - DNA, 207 bp, synthetic construct
  source 1..207: mol_type = other DNA
  misc_feature 1..207: note = Synthetic
acggcggaagccatcgggcactccccgcacatcgcgcggcaggcctacatggcgctgacagtgctggagctggcgcgcgacgccagcgtcttcgagcacatccgcacgctcagccgcgacgagttcctggccttcatcgtggactacgtgaagcgccgcgcacgggcgcggtgccccgacgactcggtccgcactagcctgaggtaa

SEQ ID NO: 7171 - DNA, 213 bp, synthetic construct
  misc_feature 1..213: note = Synthetic
  source 1..213: mol_type = other DNA
ctgcggaaacctaacattgattcaggtacagggagaaggcgcgccagactcgaaagcgtagctaaatttcattcgccaaaaagcccgatgatgagcgactcaccacgggccacggcttctgactctctttccggtactgatgtgatggctgctatggggatggcgcaatcacaagccggattcggtatggctgcacgactcggtccgcactag

SEQ ID NO: 7172 - DNA, 84 bp, synthetic construct
  misc_feature 1..84: note = Synthetic
  source 1..84: mol_type = other DNA
atgagctttctttgggaaatatttcgaatctttcgaatgatgacactgagctcaattgctccctcagctcctcatagtcgatga

SEQ ID NO: 7173 - DNA, 90 bp, synthetic construct
  source 1..90: mol_type = other DNA
  misc_feature 1..90: note = Synthetic
ttggtgtttctacaatgtaggaccatgatctcactggaagcagccggtcgcattctgggtttcccaacgactcggtccgcactagcctga

SEQ ID NO: 7174 - DNA, 90 bp, synthetic construct
  misc_feature 1..90: note = Synthetic
  source 1..90: mol_type = other DNA
ttggtgtttctacaatgtaggaccatgatctcactggaagcagtgggtcgcattctgggtttcccaacgactcggtccgcactagcctga

SEQ ID NO: 7175 - DNA, 84 bp, synthetic construct
  misc_feature 1..84: note = Synthetic
  source 1..84: mol_type = other DNA
atgagctttctttgggaagcctttcgaatctttcgaatgatgacactgagctcaattgctccctcagctcctcatagtcgatga

SEQ ID NO: 7176 - DNA, 15 bp, synthetic construct
  misc_feature 1..15: note = Synthetic
  source 1..15: mol_type = other DNA
atggacgcttgctag

SEQ ID NO: 7177 - DNA, 201 bp, synthetic construct
  source 1..201: mol_type = other DNA
  misc_feature 1..201: note = Synthetic
gtggttgttgataacgacactgttggcgtgttagatcagtgctggaggtttccctgtgcgggcaagaaagtcgagtttaacgacaagcccaaagtcaggaagataccctccacccgtaagattaagatcaccttcgcactggatgcgacctttgatagtgttctttcgaaggcgtgttcgactcggtccgcactagcctga

SEQ ID NO: 7178 - DNA, 24 bp, synthetic construct
  source 1..24: mol_type = other DNA
  misc_feature 1..24: note = Synthetic
ataacgacactgttggcgtgttag

SEQ ID NO: 7179 - DNA, 201 bp, synthetic construct
  misc_feature 1..201: note = Synthetic
  source 1..201: mol_type = other DNA
gtggttgttgataacgacactgttggcgtgttagatcagtgctggaggtttccctgtgcgggcaagaaagtcgagtttaacgacaagcccaaagtcaggaagataccctccacccgtaagattaagatcaccttcgcactggatgcgacctttggccgtgttctttcgaaggcgtgttcgactcggtccgcactagcctga

SEQ ID NO: 7180 - DNA, 165 bp, synthetic construct
  misc_feature 1..165: note = Synthetic
  source 1..165: mol_type = other DNA
atgattgctttaattcaaatgaagaatatgaagtgcactttgaaagtcgaggaaacaactgaaaatcaagaattggaaggcgtttcattcgatgaactagttgcattgagagaggagaatgccaaactgaaacaagacgactcggtccgcactagcctgaggtaa

SEQ ID NO: 7181 - DNA, 195 bp, synthetic construct
  misc_feature 1..195: note = Synthetic
  source 1..195: mol_type = other DNA
gtgtcactgtccatctccctgtcttttcgcgccgccggtcccccccaaaccatgtctctagatgccgccagccaccaaccggcggcacggcggctcttggattcggcattggtgcgccgcgtcttggcctgcatgatcatcgtcatcatgatcgccattagcatctggatcctgacctacgtgctgtttctctaa

SEQ ID NO: 7182 - DNA, 33 bp, synthetic construct
  source 1..33: mol_type = other DNA
  misc_feature 1..33: note = Synthetic
attttgatgactgtaataaagagcagtaaataa

SEQ ID NO: 7183 - DNA, 63 bp, synthetic construct
  misc_feature 1..63: note = Synthetic
  source 1..63: mol_type = other DNA
atcaacagaagcaagataacgctcgaggtcttgtgcttcccgactcggtccgcactagcctga

SEQ ID NO: 7184 - DNA, 36 bp, synthetic construct
  misc_feature 1..36: note = Synthetic
  source 1..36: mol_type = other DNA
atgattttgatgactgtaataaagagcagtaaataa

SEQ ID NO: 7185 - DNA, 156 bp, synthetic construct
  source 1..156: mol_type = other DNA
  misc_feature 1..156: note = Synthetic
ttgttgaccaccctccagattggttggaatcgatcggcgacggctttcgtgaatttctcggccttgaggcgggtcccccgaaacccaaggccaatcaacagaagcaagataacgctcgaggtcttgtgcttcccgactcggtccgcactagcctga

SEQ ID NO: 7186 - DNA, 165 bp, synthetic construct
  source 1..165: mol_type = other DNA
  misc_feature 1..165: note = Synthetic
aagattgtgggtcagggtaaaaaggtgaacaccgatataccctttaggacgtggagaaagtttgccgcccgttggcacatcccgtacgaaagttgggaggaagggcaggtggtgctgctggaaaaacttgacaaacacgactcggtccgcactagcctgaggtaa

SEQ ID NO: 7187 - DNA, 192 bp, synthetic construct
  misc_feature 1..192: note = Synthetic
  source 1..192: mol_type = other DNA
attctggttcttttcatctgcaaggccaagattgtgggtcagggtaaaaaggtgaacaccgatataccctttaggacgtggagaaagtttgccgcccgttggcacatcccgtacgaaagttgggaggaagggcaggtggtgctgctggaaaaacttgacaaacacgactcggtccgcactagcctgaggtaa

SEQ ID NO: 7188 - DNA, 189 bp, synthetic construct
  misc_feature 1..189: note = Synthetic
  source 1..189: mol_type = other DNA
atctacgggacggcgctcttcggcaaggtctgcatgatgcggctgcgcgtctcgctggctgagcagatcgccggcctcatgtgcccgtgcgccctgccgccggagatcgtgacctccatcctgtgcttcctgccgtacgagtcgctgctggacctgcgccgcgactcggtccgcactagcctgaggtaa

SEQ ID NO: 7189 - DNA, 15 bp, synthetic construct
  misc_feature 1..15: note = Synthetic
  source 1..15: mol_type = other DNA
atgtatctggtctag

SEQ ID NO: 7190 - DNA, 18 bp, synthetic construct
  misc_feature 1..18: note = Synthetic
  source 1..18: mol_type = other DNA
atgtccctgaaattctga

SEQ ID NO: 7191 - DNA, 96 bp, synthetic construct
  source 1..96: mol_type = other DNA
  misc_feature 1..96: note = Synthetic
atgttcgacttgccggagtctacaagtattgagtcgcgaagcaaggatcagagggtgtcttttctagacaaggtcgcgggtgcgcaaccaagctga

SEQ ID NO: 7192 - DNA, 144 bp, synthetic construct
  source 1..144: mol_type = other DNA
  misc_feature 1..144: note = Synthetic
attacgaatagccggtgtacccccgcaacacctcccccagtcgtcggaatgtttaagttctggcaacccgtaaatacgtttagtcgtaaggtcgtccctggaatagactcgccaacgacaccacgacgggtcccagagcggtag

SEQ ID NO: 7193 - DNA, 63 bp, synthetic construct
  source 1..63: mol_type = other DNA
  misc_feature 1..63: note = Synthetic
ttgacatccattcaaatggtttgcctgctttcgctcgactcggtccgcactagcctgaggtaa

SEQ ID NO: 7194 - DNA, 48 bp, synthetic construct
  source 1..48: mol_type = other DNA
  misc_feature 1..48: note = Synthetic
atggtttgcctgctttcgctcgactcggtccgcactagcctgaggtaa

SEQ ID NO: 7195 - DNA, 114 bp, synthetic construct
  misc_feature 1..114: note = Synthetic
  source 1..114: mol_type = other DNA
atggccgtggtacatttggcttggtttcattgctgggcttgttgccttagctctatgcgtcttcttcatactgtgctgcactggttgtggcacaaactgtatgggaaaacttaa

SEQ ID NO: 7196 - DNA, 219 bp, synthetic construct
  misc_feature 1..219: note = Synthetic
  source 1..219: mol_type = other DNA
ttggcctccgtggcgaggtacgggaaaggtcgttgctccaaggtcgcctccatggcagcgctcgagggccccctactactgccaccgagcgcctccctgacgacgagtccgcagaccacgtgttatcaagcgacttgggaatcacagctggaaatattctgctgtctggccaccaactcgcacctgcaggccgactcggtccgcactagcctgaggtaa

SEQ ID NO: 7197 - DNA, 219 bp, synthetic construct
  misc_feature 1..219: note = Synthetic
  source 1..219: mol_type = other DNA
ttggcctccgtggcgaggtacgggaaaggtcgttgctccaaggtcgcctccgccgcagcgctcgagggccccctactactgccaccgagcgcctccctgacgacgagtccgcagaccacgtgtgatcaagcgacttgggaatcacagctggaaatattctgctgtctggccaccaactcgcacctgcaggccgactcggtccgcactagcctgaggtaa

SEQ ID NO: 7198 - DNA, 219 bp, synthetic construct
  source 1..219: mol_type = other DNA
  misc_feature 1..219: note = Synthetic
ttggcctccgtggcgaggtacgggaaaggtcgttgctccaaggtcgcctccgccgcagcgctcgagggccccctactactgccaccgagcgcctccctgacgacgagtccgcagaccacgtgttatcaagcgacttgggaatcacagctggaaatattctgctgtctggccaccaactcgcacctgcaggccgactcggtccgcactagcctgaggtaa

SEQ ID NO: 7199 - DNA, 45 bp, synthetic construct
  source 1..45: mol_type = other DNA
  misc_feature 1..45: note = Synthetic
ctgtcctccttctcgactgactccatgatctttttctgcctatag

SEQ ID NO: 7200 - DNA, 168 bp, synthetic construct
  source 1..168: mol_type = other DNA
  misc_feature 1..168: note = Synthetic
atggccagtcgggaagaggagcagcgcgaaaccacccccgagcgcggacgcggtgcggcgcgacgtccaccaaccatggaggacgtgtcgtccccgtcgccgtcgccgccgcctccccgcgcgcccccaaaaaagcggctcgactcggtccgcactagcctgaggtaa

SEQ ID NO: 7201 - DNA, 30 bp, synthetic construct
  misc_feature 1..30: note = Synthetic
  source 1..30: mol_type = other DNA
atgcaattaatcgcagtagccatcccttga

SEQ ID NO: 7202 - DNA, 177 bp, synthetic construct
  misc_feature 1..177: note = Synthetic
  source 1..177: mol_type = other DNA
atggctttaaatgcctggctcatggagataataaaagatgggccggcaataaagctcgattttatgcccgagtgtatgagaagatggcccaatataggagcctatcgtttgttaatgtgtcttatgcctatggaggtaatgcaaagcccgcctccatttgcaaagacaatactttaa

SEQ ID NO: 7203 - DNA, 168 bp, synthetic construct
  source 1..168: mol_type = other DNA
  misc_feature 1..168: note = Synthetic
atggaaatggataagcgtatgaaatctctcgcaatgaccgctttctttggggagctaagcacattagatattatggcattgataatgtctatatttaaacgccatccaaacaataccattttttcagtggataaggatggcgactcggtccgcactagcctgaggtaa

SEQ ID NO: 7204 - DNA, 168 bp, synthetic construct
  misc_feature 1..168: note = Synthetic
  source 1..168: mol_type = other DNA
atggacatggataagcgtatgaaatctctcgcaatgaccgctttcttcggagagctaaacacattagatattatggcattgataatgtctatatttaaacgccatccaaacaataccattttttcagtggataaggatggcgactcggtccgcactagcctgaggtaa

SEQ ID NO: 7205 - DNA, 150 bp, synthetic construct
  misc_feature 1..150: note = Synthetic
  source 1..150: mol_type = other DNA
atgaaatctctcgcaatgaccgctttcttcggagagctaaacacattagatattatggcattgataatgtctatatttaaacgccatccaaacaataccattttttcagtggataaggatggcgactcggtccgcactagcctgaggtaa

SEQ ID NO: 7206 - DNA, 24 bp, synthetic construct
  source 1..24: mol_type = other DNA
  misc_feature 1..24: note = Synthetic
atgtctttatgcttttatagatag

SEQ ID NO: 7207 - DNA, 150 bp, synthetic construct
  misc_feature 1..150: note = Synthetic
  source 1..150: mol_type = other DNA
atagattccatgatgttcatacattgtgttgtttttccagatttgtccaatccttcaaaaacgattaatgccccacgagacatttttgtaaacctaacatattttttacaatttatgcgtatcgactcggtccgcactagcctgaggtaa

SEQ ID NO: 7208 - DNA, 219 bp, synthetic construct
  source 1..219: mol_type = other DNA
  misc_feature 1..219: note = Synthetic
ttggcctccgtggcgaggtacgggaaaggtcgttgctccaaggtcgcctccatggcagcgctcgagggccccctactactgccaccgagcgcctccctgacgacgagtccgcagaccacgtgtgatcaagcgacttgggaatcacagctggaaatattctgctgtctggccaccaactcgcacctgcaggccgactcggtccgcactagcctgaggtaa

SEQ ID NO: 7209 - DNA, 168 bp, synthetic construct
  source 1..168: mol_type = other DNA
  misc_feature 1..168: note = Synthetic
atgcacagagcatcagcaaattcgccgttgaactcggtttcaggatccatgatgtggcgaaaccaatcttctggcagacgcccctccaagcgtctttctgataacgaagccaccttatctacaatcaactctattttgggcgactcggtccgcactagcctgaggtaa

SEQ ID NO: 7210 - DNA, 117 bp, synthetic construct
  misc_feature 1..117: note = Synthetic
  source 1..117: mol_type = other DNA
atgtggcgaaaccaatcttctggcagacgcccctccaagcgtctttctgataacgaagccaccttatctacaatcaactctattttgggcgactcggtccgcactagcctgaggtaa

SEQ ID NO: 7211 - DNA, 60 bp, synthetic construct
  misc_feature 1..60: note = Synthetic
  source 1..60: mol_type = other DNA
atgcccaggctcttttacatggacttgacttctccgaagtcagtaatgttcaacggttga

SEQ ID NO: 7212 - DNA, 168 bp, synthetic construct
  misc_feature 1..168: note = Synthetic
  source 1..168: mol_type = other DNA
atggccggcggcagtcaggacgtgcgccggttcatggagcgagaggccactccgccccggggccacgggtcggcgcgctatccgccggagcaggagaggagcccctcgcctccacctcctctgcccaccaagcgccgaaacgactcggtccgcactagcctgaggtaa

SEQ ID NO: 7213 - DNA, 147 bp, synthetic construct
  source 1..147: mol_type = other DNA
  misc_feature 1..147: note = Synthetic
gtgcgccggttcatggagcgagaggccactccgccccggggccacgggtcggcgcgctatccgccggagcaggagaggagcccctcgcctccacctcctctgcccaccaagcgccgaaacgactcggtccgcactagcctgaggtaa

SEQ ID NO: 7214 - DNA, 72 bp, synthetic construct
  misc_feature 1..72: note = Synthetic
  source 1..72: mol_type = other DNA
atggcaattgacagaagctacatgttcgccccgctcgtgttgtccgactcggtccgcactagcctgaggtaa

SEQ ID NO: 7215 - DNA, 12 bp, synthetic construct
  misc_feature 1..12: note = Synthetic
  source 1..12: mol_type = other DNA
atgtgcaaataa

SEQ ID NO: 7216 - DNA, 198 bp, synthetic construct
  source 1..198: mol_type = other DNA
  misc_feature 1..198: note = Synthetic
ctgacacacctggtcctgtatatttttagaatggaagacatcaattttgcgtccctggctccgcggcacggcacgcggccgttcatgggcacctggaacgagatcggcaccagccagctgaacgggggcgccttcaattggagcagtgtctggagcgggcttaaaaatttcgactcggtccgcactagcctgaggtaa

SEQ ID NO: 7217 - DNA, 198 bp, synthetic construct
  misc_feature 1..198: note = Synthetic
  source 1..198: mol_type = other DNA
ctgacacacctggtcctgtatatttttagagccgaagacatcaattttgcgtccctggctccgcggcacggcacgcggccgttcatgggcacctggaacgagatcggcaccagccagctgaacgggggcgccttcaattggagcagtgtctggagcgggcttaaaaatttcgactcggtccgcactagcctgaggtaa

SEQ ID NO: 7218 - DNA, 102 bp, synthetic construct
  misc_feature 1..102: note = Synthetic
  source 1..102: mol_type = other DNA
attcctctggctccggccaacccaaccccaagccgagtgacagcgatcatgaagcgagaaggtcagagcttcactcggacgcctcccatctcggacctctga

SEQ ID NO: 7219 - DNA, 126 bp, synthetic construct
  misc_feature 1..126: note = Synthetic
  source 1..126: mol_type = other DNA
gtgagagtgacgccggtcagagacattcctctggctccggccaacccaaccccaagccgagtgacagcgatcatgaagcgagaaggtcagagcttcactcggacgcctcccatctcggacctctga

SEQ ID NO: 7220 - DNA, 177 bp, synthetic construct
  source 1..177: mol_type = other DNA
  misc_feature 1..177: note = Synthetic
atggctttaaatgcctggctcatggagataataaaagatggatgggcaataaagctcgattttatgcccgagtgtatgagaagatggcccaatataggagcctatcgtttgttaatgtgtcttatgcctatggaggtaatgcaaagcccgcctccatttgcaaagacaatactttaa

SEQ ID NO: 7221 - DNA, 159 bp, synthetic construct
  misc_feature 1..159: note = Synthetic
  source 1..159: mol_type = other DNA
atgtcatttatttacgtttacgatctcgtattacaaaccacggagaggatgacaccgttcggccccatgagttatttttattcttccggtaggaggcatgaagcctctggtgatgctcatctgcttcggtgtgatattattgcagcttggggtgactaa

SEQ ID NO: 7222 - DNA, 102 bp, synthetic construct
  source 1..102: mol_type = other DNA
  misc_feature 1..102: note = Synthetic
gtgatgctcatctgcttcggtgtgatattattgcagcttggggtgactaaagtgtgtcagcataatgaagtgcaactggcgactcggtccgcactagcctga

SEQ ID NO: 7223 - DNA, 159 bp, synthetic construct
  misc_feature 1..159: note = Synthetic
  source 1..159: mol_type = other DNA
atgtcatttatttacgtttacgatctcgtattacaaaccgaggagaggatgacaccgttcggccccatgagttatttttattcttccggtaggaggcatgaagcctctggtgatgctcatctgcttcggtgtgatattattgcagcttggggtgactaa

SEQ ID NO: 7224 - DNA, 159 bp, synthetic construct
  source 1..159: mol_type = other DNA
  misc_feature 1..159: note = Synthetic
atgtcatttatttacgtttacgatctcgtattacaaaccgccgagaggatgacaccgttcggccccatgagttatttttattcttccggtaggaggcatgaagcctctggtgatgctcatctgcttcggtgtgatattattgcagcttggggtgactaa

SEQ ID NO: 7225 - DNA, 204 bp, synthetic construct
  source 1..204: mol_type = other DNA
  misc_feature 1..204: note = Synthetic
atggacacaatggattacgatggcaagttcgcagaatatatggaaactgaatttctaaattacaaagctgttgttgaattacagaaatccaaactaaataaattatttccaggaaaacgacaaatcttgattgtaaacgatccaacacatgagttcgacatccacgaaacaggctggttaactgaccgactcggtccgcactag

SEQ ID NO: 7226 - DNA, 195 bp, synthetic construct
  misc_feature 1..195: note = Synthetic
  source 1..195: mol_type = other DNA
atggattacgatggcaagttcgcagaatatatggaaactgaatttctaaattacaaagctgttgttgaattacagaaatccaaactaaataaattatttccaggaaaacgacaaatcttgattgtaaacgatccaacacatgagttcgacatccacgaaacaggctggttaactgaccgactcggtccgcactag

SEQ ID NO: 7227 - DNA, 198 bp, synthetic construct
  misc_feature 1..198: note = Synthetic
  source 1..198: mol_type = other DNA
acgacaaggtacgcaagagaatccactacaatgcaaaccgagattcaatccagctcgctccgccatcatccatatcgcagggcccgtttaccacgatctgatgaggaaaccagggcttcactgactgaacaacatcccctgttgcccgattgtgatcatgcagattatcacgactcggtccgcactagcctgaggtaa

SEQ ID NO: 7228 - DNA, 159 bp, synthetic construct
  source 1..159: mol_type = other DNA
  misc_feature 1..159: note = Synthetic
atgtcatttatttacgtttacgatctcgtattacaaaccgcggagaggatgacaccgttcggccccatgagttatttttattcttccggtaggaggcatgaagcctctggtgatgctcatctgcttcggtgtgatattattgcagcttggggtgactaa

SEQ ID NO: 7229 - DNA, 159 bp, synthetic construct
  source 1..159: mol_type = other DNA
  misc_feature 1..159: note = Synthetic
atgtcatttatttacgtttacgatctcgtattacaaaccgcggagaggatgacaccgttgggccccatgagttatttttattcttccggtaggaggcatgaagcctctggtgatgctcatctgcttcggtgtgatattattgcagcttggggtgactaa

SEQ ID NO: 7230 - DNA, 159 bp, synthetic construct
  source 1..159: mol_type = other DNA
  misc_feature 1..159: note = Synthetic
atgtcatttatttacgtttacgatctcgtattacaaaccgcggagaggatgacactgttcggccccatgagttatttttattcttccggtaggaggcatgaagcctctggtgatgctcatctgcttcggtgtgatattattgcagcttggggtgactaa

SEQ ID NO: 7231 - DNA, 159 bp, synthetic construct
  source 1..159: mol_type = other DNA
  misc_feature 1..159: note = Synthetic
atgtcatttatttacgtttacgatctcgtattacaaaccgcggagaggatgacatcgttcggccccatgagttatttttattcttccggtaggaggcatgaagcctctggtgatgctcatctgcttcggtgtgatattattgcagcttggggtgactaa

SEQ ID NO: 7232 - DNA, 159 bp, synthetic construct
  source 1..159: mol_type = other DNA
  misc_feature 1..159: note = Synthetic
atgtcatttatttacgtttacgatctcgtattacaaaccgcggacaggatgacaccgttcggccccatgagttatttttattcttccggtaggaggcatgaagcctctggtgatgctcatctgcttcggtgtgatattattgcagcttggggtgactaa

SEQ ID NO: 7233 - DNA, 159 bp, synthetic construct
  misc_feature 1..159: note = Synthetic
  source 1..159: mol_type = other DNA
atgtcatttatttacgtttacgatctcgtattacaaaccgcggagagaatgacaccgttcggccccatgagttatttttattcttccggtaggaggcatgaagcctctggtgatgctcatctgcttcggtgtgatattattgcagcttggggtgactaa

SEQ ID NO: 7234 - DNA, 159 bp, synthetic construct
  misc_feature 1..159: note = Synthetic
  source 1..159: mol_type = other DNA
atgtcatttatttacgtttacgatctcgtattacaaaccgcggagaggaggacaccgttcggccccatgagttatttttattcttccggtaggaggcatgaagcctctggtgatgctcatctgcttcggtgtgatattattgcagcttggggtgactaa

SEQ ID NO: 7235 - DNA, 159 bp, synthetic construct
  misc_feature 1..159: note = Synthetic
  source 1..159: mol_type = other DNA
atgtcatttatttacgtttacgatctcgtattacaaaccgcggagaggatgacaccgtacggccccatgagttatttttattcttccggtaggaggcatgaagcctctggtgatgctcatctgcttcggtgtgatattattgcagcttggggtgactaa

SEQ ID NO: 7236 - DNA, 30 bp, synthetic construct
  misc_feature 1..30: note = Synthetic
  source 1..30: mol_type = other DNA
ttggggttgattatgtgtgggacggtgtaa

SEQ ID NO: 7237 - DNA, 195 bp, synthetic construct
  misc_feature 1..195: note = Synthetic
  source 1..195: mol_type = other DNA
atggatatcctgtcacccaattgtggttcggttcagaaaaattgttttcaagtctacaaatctcaagatgtgtacagagtgcgattctgtgtggaaggaaaggttcacgacatacccttgcctggtgttagtacccgtcgggatattattggcactgtcaagtatttcgactcggtccgcactagcctgaggtaa

SEQ ID NO: 7238 - DNA, 123 bp, synthetic construct
  misc_feature 1..123: note = Synthetic
  source 1..123: mol_type = other DNA
atgtgtacagagtgcgattctgtgtggaaggaaaggttcacgacatacccttgcctggtgttagtacccgtcgggatattattggcactgtcaagtatttcgactcggtccgcactagcctga

SEQ ID NO: 7239 - DNA, 120 bp, synthetic construct
  source 1..120: mol_type = other DNA
  misc_feature 1..120: note = Synthetic
atggctgaaaagaaaagaataaacaacgcagtcggattaatgcaggaatacgcaattaaactcagtgaatcggcaccttcatatgaagacgtcggctcgactcggtccgcactagcctga

SEQ ID NO: 7240 - DNA, 132 bp, synthetic construct
  misc_feature 1..132: note = Synthetic
  source 1..132: mol_type = other DNA
atggcttaccaatcccgtcgcattaaacggcggcatggacacgagcgcagctcgtcgattcgctcgcactactcggactgcagcccaaggactgaggcgtggggtagaggaggcacttcgatccggcaatga

SEQ ID NO: 7241 - DNA, 42 bp, synthetic construct
  misc_feature 1..42: note = Synthetic
  source 1..42: mol_type = other DNA
ttgaccgtattgaacatgaactcgcgactcggtccgcactag

SEQ ID NO: 7242 - DNA, 51 bp, synthetic construct
  source 1..51: mol_type = other DNA
  misc_feature 1..51: note = Synthetic
ttgataaagtcagtcacgtatatttcgagtggacgtactccgagttggtga

SEQ ID NO: 7243 - DNA, 117 bp, synthetic construct
  source 1..117: mol_type = other DNA
  misc_feature 1..117: note = Synthetic
atggcatcgctcagtggtcgcgtagtgtcgagccagtgggctgaaaccagacttttaccattcatcatgctttacgtgacgaaattaacagctgttggcatcgtagggccgggttag

SEQ ID NO: 7244 - DNA, 207 bp, synthetic construct
  source 1..207: mol_type = other DNA
  misc_feature 1..207: note = Synthetic
atgtcgacaattggcgttctactaagattgagttctctaaacgaattcatcacattttgcaaagagacggaattagatggtatgcttcaagatgctcttactcatcgggtgaatggtggacggatgcttatctcacgaccagctctgggttcagggctgttcaaagtacaagatgtatttactccgactcggtccgcactagcctga

SEQ ID NO: 7245 - DNA, 195 bp, synthetic construct
  misc_feature 1..195: note = Synthetic
  source 1..195: mol_type = other DNA
acgaggtacgcaagagggtgcactacaatgagcaccgaggaacaatcgaccttgctccgccatcatccatatcgcagggcccgtttatcacgatatgataaggagaccagggcctctttgactgaacaacaccctctattgcccgattgtgatcatgcagattatcacgactcggtccgcactagcctgaggtaa

SEQ ID NO: 7246 - DNA, 36 bp, synthetic construct
  misc_feature 1..36: note = Synthetic
  source 1..36: mol_type = other DNA
atgcagattatcacgactcggtccgcactagcctga

SEQ ID NO: 7247 - DNA, 195 bp, synthetic construct
  misc_feature 1..195: note = Synthetic
  source 1..195: mol_type = other DNA
acgaggtacgcaagagggtgcactacagccagcaccgaggaacaatcgaccttgctccgccatcatccatatcgcagggcccgtttatcacgatatgataaggagaccagggcctctttgactgaacaacaccctctattgcccgattgtgatcatgcagattatcacgactcggtccgcactagcctgaggtaa

SEQ ID NO: 7248 - DNA, 54 bp, synthetic construct
  misc_feature 1..54: note = Synthetic
  source 1..54: mol_type = other DNA
atggtcacaccgagcctctgcgtgctcctccatcgaggacgacttcaactatga

SEQ ID NO: 7249 - DNA, 108 bp, synthetic construct
  misc_feature 1..108: note = Synthetic
  source 1..108: mol_type = other DNA
atcgaggacgacttcaactatgacagctcggtggcgtctgccagcgtgcacatacgaatggcatttctaagaaaagtctacggtatccttgtctacaatttcctttaa

SEQ ID NO: 7250 - DNA, 159 bp, synthetic construct
  misc_feature 1..159: note = Synthetic
  source 1..159: mol_type = other DNA
atgtcatttatttacgtttacgatctcgtattacaaaccgcggagaggatgactccgttcggccccatgagttatttttattcttccggtaggaggcatgaagcctctggtgatgctcatctgcttcggtgtgatattattgcagcttggggtgactaa

SEQ ID NO: 7251 - DNA, 159 bp, synthetic construct
  source 1..159: mol_type = other DNA
  misc_feature 1..159: note = Synthetic
atgtcatttatttacgtttacgatctcgtattacaaaccgcggagaggatgagaccgttcggccccatgagttatttttattcttccggtaggaggcatgaagcctctggtgatgctcatctgcttcggtgtgatattattgcagcttggggtgactaa

SEQ ID NO: 7252 - DNA, 159 bp, synthetic construct
  misc_feature 1..159: note = Synthetic
  source 1..159: mol_type = other DNA
atgtcatttatttacgtttacgatctcgtattacaaaccgcggagaggattacaccgttcggccccatgagttatttttattcttccggtaggaggcatgaagcctctggtgatgctcatctgcttcggtgtgatattattgcagcttggggtgactaa

SEQ ID NO: 7253 - DNA, 159 bp, synthetic construct
  misc_feature 1..159: note = Synthetic
  source 1..159: mol_type = other DNA
atgtcatttatttacgtttacgatctcgtattacaaaccgcggagaggttgacaccgttcggccccatgagttatttttattcttccggtaggaggcatgaagcctctggtgatgctcatctgcttcggtgtgatattattgcagcttggggtgactaa

SEQ ID NO: 7254 - DNA, 159 bp, synthetic construct
  misc_feature 1..159: note = Synthetic
  source 1..159: mol_type = other DNA
atgtcatttatttacgtttacgatctcgtattacaaaccgcggagatgatgacaccgttcggccccatgagttatttttattcttccggtaggaggcatgaagcctctggtgatgctcatctgcttcggtgtgatattattgcagcttggggtgactaa

SEQ ID NO: 7255 - DNA, 159 bp, synthetic construct
  source 1..159: mol_type = other DNA
  misc_feature 1..159: note = Synthetic
atgtcatttatttacgtttacgatctcgtattacaaaccgcggagcggatgacaccgttcggccccatgagttatttttattcttccggtaggaggcatgaagcctctggtgatgctcatctgcttcggtgtgatattattgcagcttggggtgactaa

SEQ ID NO: 7256 - DNA, 159 bp, synthetic construct
  source 1..159: mol_type = other DNA
  misc_feature 1..159: note = Synthetic
atgtcatttatttacgtttacgatctcgtattacaaaccgcggggaggatgacaccgttcggccccatgagttatttttattcttccggtaggaggcatgaagcctctggtgatgctcatctgcttcggtgtgatattattgcagcttggggtgactaa

SEQ ID NO: 7257 - DNA, 159 bp, synthetic construct
  misc_feature 1..159: note = Synthetic
  source 1..159: mol_type = other DNA
atgtcatttatttacgtttacgatctcgtattacaaactgcggagaggatgacaccgttcggccccatgagttatttttattcttccggtaggaggcatgaagcctctggtgatgctcatctgcttcggtgtgatattattgcagcttggggtgactaa

SEQ ID NO: 7258 - DNA, 159 bp, synthetic construct
  source 1..159: mol_type = other DNA
  misc_feature 1..159: note = Synthetic
atgtcatttatttacgtttacgatctcgtattacaaagcgcggagaggatgacaccgttcggccccatgagttatttttattcttccggtaggaggcatgaagcctctggtgatgctcatctgcttcggtgtgatattattgcagcttggggtgactaa

SEQ ID NO: 7259 - DNA, 159 bp, synthetic construct
  source 1..159: mol_type = other DNA
  misc_feature 1..159: note = Synthetic
atgtcatttatttacgtttacgatctcgtattacaagccgcggagaggatgacaccgttcggccccatgagttatttttattcttccggtaggaggcatgaagcctctggtgatgctcatctgcttcggtgtgatattattgcagcttggggtgactaa

SEQ ID NO: 7260 - DNA, 18 bp, synthetic construct
  source 1..18: mol_type = other DNA
  misc_feature 1..18: note = Synthetic
atgtgcagtaccccttaa

SEQ ID NO: 7261 - DNA, 21 bp, synthetic construct
  source 1..21: mol_type = other DNA
  misc_feature 1..21: note = Synthetic
ctggcgtgtgacgtggtgtaa

SEQ ID NO: 7262 - DNA, 72 bp, synthetic construct
  source 1..72: mol_type = other DNA
  misc_feature 1..72: note = Synthetic
atgacccccagaactgggtgcttgtctttcagcctttcaagatcattaagatttggatacttgactgtgtaa

SEQ ID NO: 7263 - DNA, 72 bp, synthetic construct
  misc_feature 1..72: note = Synthetic
  source 1..72: mol_type = other DNA
atgacccccagaactgggtgcttgtctttcagcctttcaagatcattgccatttggatacttgactgtgtaa

SEQ ID NO: 7264 - DNA, 90 bp, synthetic construct
  misc_feature 1..90: note = Synthetic
  source 1..90: mol_type = other DNA
atgatcctgattacatacccctatctgaagatgggcacccaccaaaaagaatcttccaaccttgaatttccacccttgattggggaatag

SEQ ID NO: 7265 - DNA, 54 bp, synthetic construct
  source 1..54: mol_type = other DNA
  misc_feature 1..54: note = Synthetic
acgcgtacggaaagcctggatactttttcagttattttcccagactataaatga

SEQ ID NO: 7266 - DNA, 168 bp, synthetic construct
  misc_feature 1..168: note = Synthetic
  source 1..168: mol_type = other DNA
atgattctcaaggagccgttcatcgtggacaccgtgcagggccgcttcttggtgctcaagtacgtgaagctgtgcggagtgaagacggtcgagtgcaagggcgcgaccgcgtcctgcgtcctgaaggtggagaagccagacgactcggtccgcactagcctgaggtaa

SEQ ID NO: 7267 - DNA, 111 bp, synthetic construct
  misc_feature 1..111: note = Synthetic
  source 1..111: mol_type = other DNA
acggaaagcctggatactttttcagttattttcccagactataagccattctcaaggagccgttcatcgtggacaccgtgcagggccgcttcttggtgctcaagtacgtga

SEQ ID NO: 7268 - DNA, 165 bp, synthetic construct
  source 1..165: mol_type = other DNA
  misc_feature 1..165: note = Synthetic
attctcaaggagccgttcatcgtggacaccgtgcagggccgcttcttggtgctcaagtacgtgaagctgtgcggagtgaagacggtcgagtgcaagggcgcgaccgcgtcctgcgtcctgaaggtggagaagccagacgactcggtccgcactagcctgaggtaa

SEQ ID NO: 7269 - DNA, 54 bp, synthetic construct
  source 1..54: mol_type = other DNA
  misc_feature 1..54: note = Synthetic
atgcaccgctccaaaaatcaagacttagaccttaacgctgcacatgaacgctaa

SEQ ID NO: 7270 - DNA, 12 bp, synthetic construct
  misc_feature 1..12: note = Synthetic
  source 1..12: mol_type = other DNA
atgatgctgtag

SEQ ID NO: 7271 - DNA, 183 bp, synthetic construct
  source 1..183: mol_type = other DNA
  misc_feature 1..183: note = Synthetic
acgcatgagagagctatggatgtccacattgacaaccaagtgttgagtggcctcgggacccccctcctcgtgcacctatttgttcccgacacggttatggcagagctttgccccaatcgcgtgccaaactgcgagggggcctggtgccagactctcgactcggtccgcactagcctgaggtaa

SEQ ID NO: 7272 - DNA, 183 bp, synthetic construct
  source 1..183: mol_type = other DNA
  misc_feature 1..183: note = Synthetic
acgcatgagagagctgccgatgtccacattgacaaccaagtgttgagtggcctcgggacccccctcctcgtgcacctatttgttcccgacacggttatggcagagctttgccccaatcgcgtgccaaactgcgagggggcctggtgccagactctcgactcggtccgcactagcctgaggtaa

SEQ ID NO: 7273 - DNA, 204 bp, synthetic construct
  source 1..204: mol_type = other DNA
  misc_feature 1..204: note = Synthetic
atgtcgaagcctcaaactattccgagaacgcgatcgcaggtcgttggattgacctccaagatcaaggatttcaccaagagtgtagagaagacaaccctcctgactcaagctgagttgaagaaacaacatcgtcatctgctttctcaacaacccgaactgtttagtggattggtcaaattgtcgactcggtccgcactagcctga

SEQ ID NO: 7274 - DNA, 144 bp, synthetic construct
  misc_feature 1..144: note = Synthetic
  source 1..144: mol_type = other DNA
atcaaggatttcaccaagagtgtagagaagacaaccctcctgactcaagctgagttgaagaaacaacatcgtcatctgctttctcaacaacccgaactgtttagtggattggtcaaattgtcgactcggtccgcactagcctga

SEQ ID NO: 7275 - DNA, 102 bp, synthetic construct
  misc_feature 1..102: note = Synthetic
  source 1..102: mol_type = other DNA
acggcactggttttcggaaatcatacccaaacattaacgaacgtttgtactatgcacttggcgatgcttatgaagctggcgactcggtccgcactagcctga

SEQ ID NO: 7276 - DNA, 213 bp, synthetic construct
  misc_feature 1..213: note = Synthetic
  source 1..213: mol_type = other DNA
atgagctcgcgtaaccgtagatctaacatgaagaagaacaagcaaaacgcagcaaagaaagaagagaatgtcgttgaagattcaggctctgtcagccattcccgactcatgtcggttatggggaaagaggcttttgattcattgatggcagcgctagctatcagagaagttccacgtaatacagacgactcggtccgcactagcctgaggtaa

SEQ ID NO: 7277 - DNA, 186 bp, synthetic construct
  source 1..186: mol_type = other DNA
  misc_feature 1..186: note = Synthetic
atgaagaagaacaagcaaaacgcagcaaagaaagaagagaatgtcgttgaagattcaggctctgtcagccattcccgactcatgtcggttatggggaaagaggcttttgattcattgatggcagcgctagctatcagagaagttccacgtaatacagacgactcggtccgcactagcctgaggtaa

SEQ ID NO: 7278 - DNA, 198 bp, synthetic construct
  source 1..198: mol_type = other DNA
  misc_feature 1..198: note = Synthetic
gtgtttgtttttgaagagcttcgaagtttaaacccgaaaatgaagggaggaagaatcaatgccgtagccactttcactggctccggctgtagtaacagacatcctttttgtttgcataggattgtagcgataacagtagtaatcataaccgtatcgattggtttagtcgacgactcggtccgcactagcctgaggtaa

SEQ ID NO: 7279 - DNA, 201 bp, synthetic construct
  misc_feature 1..201: note = Synthetic
  source 1..201: mol_type = other DNA
attggaaaggtgtctgccgcgaatgcttctaagatgcaaggtaaacaagcaacaatcaaagatattacattagatatgaaaaaaattgctttgccctgtaacctattgtgtggagaagagagtttgtcaccagattcagaggaggagcatccagtatataaagttgacagctgcgactcggtccgcactagcctgaggtaa

SEQ ID NO: 7280 - DNA, 147 bp, synthetic construct
  misc_feature 1..147: note = Synthetic
  source 1..147: mol_type = other DNA
atcaaagatattacattagatatgaaaaaaattgctttgccctgtaacctattgtgtggagaagagagtttgtcaccagattcagaggaggagcatccagtatataaagttgacagctgcgactcggtccgcactagcctgaggtaa

SEQ ID NO: 7281 - DNA, 42 bp, synthetic construct
  source 1..42: mol_type = other DNA
  misc_feature 1..42: note = Synthetic
aggcccaaggtaaacaagcaacaatcaaagatattacattag

SEQ ID NO: 7282 - DNA, 33 bp, synthetic construct
  source 1..33: mol_type = other DNA
  misc_feature 1..33: note = Synthetic
atggaacaattgttgcaaactgtcgaagtctaa

SEQ ID NO: 7283 - DNA, 24 bp, synthetic construct
  misc_feature 1..24: note = Synthetic
  source 1..24: mol_type = other DNA
atgcagtcacgaccattgatctaa

SEQ ID NO: 7284 - DNA, 138 bp, synthetic construct
  misc_feature 1..138: note = Synthetic
  source 1..138: mol_type = other DNA
gtgatccgttcaatcatcaagtcaagtcatctcggggaggatcgcaaggattacctgatgagtctcttgaatgacattcagggctccaaggatcttgctcagttccatcagatgctggtcaaaattctaaagaactag

SEQ ID NO: 7285 - DNA, 168 bp, synthetic construct
  source 1..168: mol_type = other DNA
  misc_feature 1..168: note = Synthetic
atggagcgaaaccactggaacgaaaaatcctcgggcgcaaagcgctcgcgcgagagggacttgaccttgtcgacgatccgttcgatcttggcggccgacgagaggttgaggatcaaggcgtcgtcgtacttgggcgtgggcgactcggtccgcactagcctgaggtaa

SEQ ID NO: 7286 - DNA, 177 bp, synthetic construct
  misc_feature 1..177: note = Synthetic
  source 1..177: mol_type = other DNA
acgcgactggccgagcgaaaccactggaacgaaaaatcctcgggcgcaaagcgctcgcgcgagagggacttgaccttgtcgacgatccgttcgatcttggcggccgacgagaggttgaggatcaaggcgtcgtcgtacttgggcgtgggcgactcggtccgcactagcctgaggtaa

SEQ ID NO: 7287 - DNA, 54 bp, synthetic construct
  misc_feature 1..54: note = Synthetic
  source 1..54: mol_type = other DNA
aagtacggactggcgtcgctcgcattcttcgccgccgtcgggcagccagcgtaa

SEQ ID NO: 7288 - DNA, 168 bp, synthetic construct
  misc_feature 1..168: note = Synthetic
  source 1..168: mol_type = other DNA
atgaaacacaaagtatattctgaagggttggaaattagtactgattttaactcaataatcagtcaattatctacatccgatatggatatagaaatcgatgaagataatatcacggaacttcttaatatattgactgagctcgactcggtccgcactagcctgaggtaa

SEQ ID NO: 7289 - DNA, 201 bp, synthetic construct
  misc_feature 1..201: note = Synthetic
  source 1..201: mol_type = other DNA
atctaccaacttaaatacgctaccgatattaccgccaaacacaaagtatattctgaagggttggaaattagtactgattttaactcaataatcagtcaattatctacatccgatatggatatagaaatcgatgaagataatatcacggaacttcttaatatattgactgagctcgactcggtccgcactagcctgaggtaa

SEQ ID NO: 7290 - DNA, 33 bp, synthetic construct
  source 1..33: mol_type = other DNA
  misc_feature 1..33: note = Synthetic
atgaagaacattaagaagatctttctttcgtag

SEQ ID NO: 7291 - DNA, 177 bp, synthetic construct
  source 1..177: mol_type = other DNA
  misc_feature 1..177: note = Synthetic
gtgacgacaatgacgatggacgagcagcagtcgcaggctgtggcgccggtctacgtgggcggctttctcgcccgctacgaccagtctccggacgaggccgaattgctgttgccgcgggacgtagtggagcactggttgcacgcgcagggcgactcggtccgcactagcctgaggtaa

SEQ ID NO: 7292 - DNA, 180 bp, synthetic construct
  source 1..180: mol_type = other DNA
  misc_feature 1..180: note = Synthetic
acggtgacgacagccacgatggacgagcagcagtcgcaggctgtggcgccggtctacgtgggcggctttctcgcccgctacgaccagtctccggacgaggccgaattgctgttgccgcgggacgtagtggagcactggttgcacgcgcagggcgactcggtccgcactagcctgaggtaa

SEQ ID NO: 7293 - DNA, 225 bp, synthetic construct
  source 1..225: mol_type = other DNA
  misc_feature 1..225: note = Synthetic
ctgcagttgctggggggagaattccacagacatcgtcgatttatgtgtcggaagatggcgcgcgatgctctgcacggacagcgtccgcggatgcgtctggaggcggcgatagcttccagcaaactcccgcgttcctcgccgcggacgcgcgccactgcttttgttgtgttggcaacggtggcgcgcgctcctctcgccgactcggtccgcactagcctgaggtaa

SEQ ID NO: 7294 - DNA, 168 bp, synthetic construct
  misc_feature 1..168: note = Synthetic
  source 1..168: mol_type = other DNA
atgtcgcaccctctgagtgctgcggttcccgccgctacggctcctccaggtgctaccgtggcaggtgcgtcgccggctgtgtcgtctctagcgtggcctcacgacggagtttatttacccaaagacgcttttttctcgctcgactcggtccgcactagcctgaggtaa

SEQ ID NO: 7295 - DNA, 63 bp, synthetic construct
  source 1..63: mol_type = other DNA
  misc_feature 1..63: note = Synthetic
acgacggagtttatttacccaaagacgcttttttctcgctcgactcggtccgcactagcctga

SEQ ID NO: 7296 - DNA, 27 bp, synthetic construct
  source 1..27: mol_type = other DNA
  misc_feature 1..27: note = Synthetic
ataattcagccaggcctaagacagtag

SEQ ID NO: 7297 - DNA, 114 bp, synthetic construct
  misc_feature 1..114: note = Synthetic
  source 1..114: mol_type = other DNA
atgccaagcggccttacaatttctcatacccgtttaacgacctttgcaatgaaatacaagcgctcgaaactggaactgattttactccaattttcattgctgccattgttgtaa

SEQ ID NO: 7298 - DNA, 198 bp, synthetic construct
  misc_feature 1..198: note = Synthetic
  source 1..198: mol_type = other DNA
atcgaagctttactagatacaggagcagacatgacagtccttccaatagccttgttctcaagtaatactcccctcaaagacacatccgtattaggggcaggaggccaaacccaagatcactttaagctcacctcccttcctgtgctaatacgcctccctttccggacaaccgactcggtccgcactagcctgaggtaa

SEQ ID NO: 7299 - DNA, 198 bp, synthetic construct
  misc_feature 1..198: note = Synthetic
  source 1..198: mol_type = other DNA
atcgaagctttactagatacaggagcagacgccacagtccttccaatagccttgttctcaagtaatactcccctcaaagacacatccgtattaggggcaggaggccaaacccaagatcactttaagctcacctcccttcctgtgctaatacgcctccctttccggacaaccgactcggtccgcactagcctgaggtaa

SEQ ID NO: 7300 - DNA, 180 bp, synthetic construct
  misc_feature 1..180: note = Synthetic
  source 1..180: mol_type = other DNA
atttggtgttttatgatgtcgcatcaacaggtgcaaatggatttgatcctgatgcagggtatatggacttctgtgttaaaaatgcagaattactcaaccttgctgcagttaggatcttcttcctcaatgccgcaaaggccaaggctgctctccgactcggtccgcactagcctgaggtaa

SEQ ID NO: 7301 - DNA, 165 bp, synthetic construct
  source 1..165: mol_type = other DNA
  misc_feature 1..165: note = Synthetic
atgtcgcatcaacaggtgcaaatggatttgatcctgatgcagggtatatggacttctgtgttaaaaatgcagaattactcaaccttgctgcagttaggatcttcttcctcaatgccgcaaaggccaaggctgctctccgactcggtccgcactagcctgaggtaa

SEQ ID NO: 7302 - DNA, 168 bp, synthetic construct
  misc_feature 1..168: note = Synthetic
  source 1..168: mol_type = other DNA
atgagaccattaaacacgcttttgaccgtgattcttatcatactcatcagctatttggtgattgttcattctagtgatgcggttgagaggccaaggactgagggaattaggggcgacctcattccaggtgcgggtatcttcgactcggtccgcactagcctgaggtaa

SEQ ID NO: 7303 - DNA, 168 bp, synthetic construct
  source 1..168: mol_type = other DNA
  misc_feature 1..168: note = Synthetic
atggcgaataaacccaagaagcccggaagacgggctatcgatatagtgagacgtgcgttgcctcgcgtctcgggaccgaaaaaggtcttaaagaaggcaacacaaacagtcatggaaagcttggctggcatacgggcaaccgactcggtccgcactagcctgaggtaa

SEQ ID NO: 7304 - DNA, 174 bp, synthetic construct
  misc_feature 1..174: note = Synthetic
  source 1..174: mol_type = other DNA
ataccggccgcgaataaacccaagaagcccggaagacgggctatcgatatagtgagacgtgcgttgcctcgcgtctcgggaccgaaaaaggtcttaaagaaggcaacacaaacagtcatggaaagcttggctggcatacgggcaaccgactcggtccgcactagcctgaggtaa

SEQ ID NO: 7305 - DNA, 168 bp, synthetic construct
  source 1..168: mol_type = other DNA
  misc_feature 1..168: note = Synthetic
atggctgatgaggctttgtatgtgtatttagagggaccgggggcgacgttgcctgaacagcagcagagaaataattatattttttattctcctgtgccttttactttgtatccgcgaggggtggctttgctatacttacgcgactcggtccgcactagcctgaggtaa

SEQ ID NO: 7306 - DNA, 219 bp, synthetic construct
  source 1..219: mol_type = other DNA
  misc_feature 1..219: note = Synthetic
atggcaatcgttattcttctagccctggtggcattaacagcccaagcaccattgtcaaataggtgctttgaaggcggtgtcttggtcgaagaaagaaatatggatcatggaatagctgaattatgcgttaaagatgacataagtatgatcaaaacgacttccctccaaaagcggaacgagagcatttttaccgactcggtccgcactagcctgaggtaa

SEQ ID NO: 7307 - DNA, 138 bp, synthetic construct
  misc_feature 1..138: note = Synthetic
  source 1..138: mol_type = other DNA
ttggtcgaagaaagaaatatggatcatggaatagctgaattatgcgttaaagatgacataagtatgatcaaaacgacttccctccaaaagcggaacgagagcatttttaccgactcggtccgcactagcctgaggtaa

SEQ ID NO: 7308 - DNA, 75 bp, synthetic construct
  source 1..75: mol_type = other DNA
  misc_feature 1..75: note = Synthetic
atttcttcaggcttaaccatgcattccgattgcagcttgcatccattgcatcgcttgaattgtccacaccattga

SEQ ID NO: 7309 - DNA, 48 bp, synthetic construct
  source 1..48: mol_type = other DNA
  misc_feature 1..48: note = Synthetic
atagtcgtagtcatacggatagtcccgactcggtccgcactagcctga

SEQ ID NO: 7310 - DNA, 75 bp, synthetic construct
  source 1..75: mol_type = other DNA
  misc_feature 1..75: note = Synthetic
atttcttcaggcttaaccgcccattccgattgcagcttgcatccattgcatcgcttgaattgtccacaccattga

SEQ ID NO: 7311 - DNA, 60 bp, synthetic construct
  misc_feature 1..60: note = Synthetic
  source 1..60: mol_type = other DNA
attcttcaactattgttacgggtttattgccaactcacgactcggtccgcactagcctga

SEQ ID NO: 7312 - DNA, 189 bp, synthetic construct
  misc_feature 1..189: note = Synthetic
  source 1..189: mol_type = other DNA
acgtataacaccactgacaagatgaacattatccgcaagatagtaaagagctgcaaggacgaggaagaacataagcctaatccggtgtcagctcctccagacgatgacgatctgtggctcccccctccggagtatgttcctctggcggagataaccggcaacgactcggtccgcactagcctgaggtaa

SEQ ID NO: 7313 - DNA, 189 bp, synthetic construct
  misc_feature 1..189: note = Synthetic
  source 1..189: mol_type = other DNA
acgtataacaccactgacaaggccaacattatccgcaagatagtaaagagctgcaaggacgaggaagaacataagcctaatccggtgtcagctcctccagacgatgacgatctgtggctcccccctccggagtatgttcctctggcggagataaccggcaacgactcggtccgcactagcctgaggtaa

SEQ ID NO: 7314 - DNA, 153 bp, synthetic construct
  misc_feature 1..153: note = Synthetic
  source 1..153: mol_type = other DNA
gtgaactgctgcagtaccgtgtccgagggcctttctcgactggagcgccacgcggaaacactgcgcaagactatgctggcgctagtccgcaagattaacgtccagaccgggcgcgtgcctgcaggctacagagacgacatggtatacgagtaa

SEQ ID NO: 7315 - DNA, 168 bp, synthetic construct
  misc_feature 1..168: note = Synthetic
  source 1..168: mol_type = other DNA
atggcaacaagaggagcaagcaagtctcgggtcacgacccggggcgtcaatatggtgacggccaaggccaagagtctggccgtcaaaataaaaaacaaaacaaaacaaaacacaagaggactgcgggggttcctcttgttcgactcggtccgcactagcctgaggtaa

SEQ ID NO: 7316 - DNA, 177 bp, synthetic construct
  misc_feature 1..177: note = Synthetic
  source 1..177: mol_type = other DNA
ttgcttctcgccgcaacaagaggagcaagcaagtctcgggtcacgacccggggcgtcaatatggtgacggccaaggccaagagtctggccgtcaaaataaaaaacaaaacaaaacaaaacacaagaggactgcgggggttcctcttgttcgactcggtccgcactagcctgaggtaa

SEQ ID NO: 7317 - DNA, 24 bp, synthetic construct
  source 1..24: mol_type = other DNA
  misc_feature 1..24: note = Synthetic
acgaagctgtgcgcgagcttttaa

SEQ ID NO: 7318 - DNA, 165 bp, synthetic construct
  misc_feature 1..165: note = Synthetic
  source 1..165: mol_type = other DNA
atgcaacgcgacagatggtttcgctgcagactgagttcgtaccaaacccaccgtcttccacctccctctgaggattctgtgcctattgccacaatggaaaggactcctggacttttagagtgtgaacatttgaatatcgactcggtccgcactagcctgaggtaa

SEQ ID NO: 7319 - DNA, 57 bp, synthetic construct
  misc_feature 1..57: note = Synthetic
  source 1..57: mol_type = other DNA
gtgcgggttttcctagtgatggaggagatactttttttccacgtgcttctgtactaa

SEQ ID NO: 7320 - DNA, 213 bp, synthetic construct
  misc_feature 1..213: note = Synthetic
  source 1..213: mol_type = other DNA
acgccttccctctttttcaccgcagctaagagagagaaagagagtatgtcagtcaagggcgtggagatgccagaaatgacgtgggacttggacgttggaaataaatggcggcgtcgaaaggtcctgagtcgcattcaccggttctgggaatgtcgactacgggtgtggtggctgagtgacgccggcgactcggtccgcactagcctgaggtaa

SEQ ID NO: 7321 - DNA, 213 bp, synthetic construct
  source 1..213: mol_type = other DNA
  misc_feature 1..213: note = Synthetic
acgccttccctctttttcaccgcagctaagagagagaaagagagtgcctcagtcaagggcgtggagatgccagaaatgacgtgggacttggacgttggaaataaatggcggcgtcgaaaggtcctgagtcgcattcaccggttctgggaatgtcgactacgggtgtggtggctgagtgacgccggcgactcggtccgcactagcctgaggtaa

SEQ ID NO: 7322 - DNA, 108 bp, synthetic construct
  source 1..108: mol_type = other DNA
  misc_feature 1..108: note = Synthetic
atgttttacaacgtgtgcgttatgccatctatgttttataactggaaacaccgccaaagagaaactatcacgttccatgttactcatattactaaattcatcttgtga

SEQ ID NO: 7323 - DNA, 39 bp, synthetic construct
  source 1..39: mol_type = other DNA
  misc_feature 1..39: note = Synthetic
atggaggagatactttttttccacgtgcttctgtactaa

SEQ ID NO: 7324 - DNA, 204 bp, synthetic construct
  misc_feature 1..204: note = Synthetic
  source 1..204: mol_type = other DNA
gtgacgctagcagagggagaaggtgctggtgccttactattgattcagaaataccaagttaagaccttatttttcaacacgctagctactgagtccagtatagagtcagaaatagtatcaggaatgactactcctaggatgcttctacctgttatgtcaaaattccataatgaccaaattgagattcgactcggtccgcactag

SEQ ID NO: 7325 - DNA, 24 bp, synthetic construct
  source 1..24: mol_type = other DNA
  misc_feature 1..24: note = Synthetic
attgattcagaaataccaagttaa

SEQ ID NO: 7326 - DNA, 45 bp, synthetic construct
  source 1..45: mol_type = other DNA
  misc_feature 1..45: note = Synthetic
atgaccaaattgagattcgactcggtccgcactagcctgaggtaa

SEQ ID NO: 7327 - DNA, 126 bp, synthetic construct
  source 1..126: mol_type = other DNA
  misc_feature 1..126: note = Synthetic
acgctagctactgagtccagtatagagtcagaaatagtatcaggaatgactactcctagggcccttctacctgttatgtcaaaattccataatgaccaaattgagattcgactcggtccgcactag

SEQ ID NO: 7328 - DNA, 57 bp, synthetic construct
  source 1..57: mol_type = other DNA
  misc_feature 1..57: note = Synthetic
acgtcggggtccctacttacacctggggggagaacgagactgatgtcttccttttga

SEQ ID NO: 7329 - DNA, 171 bp, synthetic construct
  source 1..171: mol_type = other DNA
  misc_feature 1..171: note = Synthetic
atgtttgagcgtcaacttaaagctggtgaggttgcggataacgctgccgccaagcctctcatcactaccctactccctaagatgattgcacgcatcaacgactggtttgaggaagtgaaagctaagcgcggcaagcgcccgacagcctcgactcggtccgcactagcctga

SEQ ID NO: 7330 - DNA, 195 bp, synthetic construct
  source 1..195: mol_type = other DNA
  misc_feature 1..195: note = Synthetic
atgggtgaagcacgcttccgcaagatgtttgagcgtcaacttaaagctggtgaggttgcggataacgctgccgccaagcctctcatcactaccctactccctaagatgattgcacgcatcaacgactggtttgaggaagtgaaagctaagcgcggcaagcgcccgacagcctcgactcggtccgcactagcctga

SEQ ID NO: 7331 - DNA, 105 bp, synthetic construct
  source 1..105: mol_type = other DNA
  misc_feature 1..105: note = Synthetic
gtgaagcacgcttccgcaagatgtttgagcgtcaacttaaagctggtgaggttgcggataacgctgccgccaagcctctcatcactaccctactccctaagatga

SEQ ID NO: 7332 - DNA, 189 bp, synthetic construct
  misc_feature 1..189: note = Synthetic
  source 1..189: mol_type = other DNA
ttgggcgcctgcgcgacgcgtgtgcaggcgcttacgcagagctatttctccgcatctaaatggacgtgtccggagccaagcaacggcggcgcaagcgcaagccgcgtaccaccgtggaggagccgcccgcggactcgtgcaccacgtgctccgtgtgccagtcgcgcctcgcattcttctccgatgtga

SEQ ID NO: 7333 - DNA, 168 bp, synthetic construct
  source 1..168: mol_type = other DNA
  misc_feature 1..168: note = Synthetic
atggacgtgtccggagccaagcaacggcggcgcaagcgcaagccgcgtaccaccgtggaggagccgcccgcggactcgtgcaccacgtgctccgtgtgccagtcgcgcctcgcattcttctccgatgtgagcaagctgcacgactcggtccgcactagcctgaggtaa

SEQ ID NO: 7334 - DNA, 189 bp, synthetic construct
  misc_feature 1..189: note = Synthetic
  source 1..189: mol_type = other DNA
ttgggcgcctgcgcgacgcgtgtgcaggcgcttacgcagagctatttctccgcatctaagccgacgtgtccggagccaagcaacggcggcgcaagcgcaagccgcgtaccaccgtggaggagccgcccgcggactcgtgcaccacgtgctccgtgtgccagtcgcgcctcgcattcttctccgatgtga

SEQ ID NO: 7335 - DNA, 162 bp, synthetic construct
  misc_feature 1..162: note = Synthetic
  source 1..162: mol_type = other DNA
gtgtccggagccaagcaacggcggcgcaagcgcaagccgcgtaccaccgtggaggagccgcccgcggactcgtgcaccacgtgctccgtgtgccagtcgcgcctcgcattcttctccgatgtgagcaagctgcacgactcggtccgcactagcctgaggtaa

SEQ ID NO: 7336 - DNA, 18 bp, synthetic construct
  misc_feature 1..18: note = Synthetic
  source 1..18: mol_type = other DNA
ataattagattaccctga

SEQ ID NO: 7337 - DNA, 180 bp, synthetic construct
  misc_feature 1..180: note = Synthetic
  source 1..180: mol_type = other DNA
ctgatgtcagattataatcctgatgtcctccagcagcttgtcaaggatggaatcaagactatcgagcttttacagcagagtccggaagactttcagaagacgtacggcagaagtgccatccaggagccgtcgacaagagccagaatccaaagttgggagtcccgactcggtccgcactag

SEQ ID NO: 7338 - DNA, 168 bp, synthetic construct
  source 1..168: mol_type = other DNA
  misc_feature 1..168: note = Synthetic
atgtcctccagcagcttgtcaaggatggaatcaagactatcgagcttttacagcagagtccggaagactttcagaagacgtacggcagaagtgccatccaggagccgtcgacaagagccagaatccaaagttgggagtcccgactcggtccgcactagcctgaggtaa

SEQ ID NO: 7339 - DNA, 180 bp, synthetic construct
  misc_feature 1..180: note = Synthetic
  source 1..180: mol_type = other DNA
ctgatgtcagattataatcctggcctcctccagcagcttgtcaaggatggaatcaagactatcgagcttttacagcagagtccggaagactttcagaagacgtacggcagaagtgccatccaggagccgtcgacaagagccagaatccaaagttgggagtcccgactcggtccgcactag

SEQ ID NO: 7340 - DNA, 171 bp, synthetic construct
  misc_feature 1..171: note = Synthetic
  source 1..171: mol_type = other DNA
ctggcctcctccagcagcttgtcaaggatggaatcaagactatcgagcttttacagcagagtccggaagactttcagaagacgtacggcagaagtgccatccaggagccgtcgacaagagccagaatccaaagttgggagtcccgactcggtccgcactagcctgaggtaa

SEQ ID NO: 7341 - DNA, 159 bp, synthetic construct
  misc_feature 1..159: note = Synthetic
  source 1..159: mol_type = other DNA
agggcctttctcagagaaatcccaagagccatgtttcctgcggcgctgctacaagcggtgcagctactgcgtgcgattgcccctgggcttctggccgtgtacgcattcacgctgattctgcttgcggcacacatgctagcgggcaagcgcttcccttag

SEQ ID NO: 7342 - DNA, 54 bp, synthetic construct
  source 1..54: mol_type = other DNA
  misc_feature 1..54: note = Synthetic
aaggtggccaaacagtacaagtatattttgatggcaacaaagacaattgtatga

SEQ ID NO: 7343 - DNA, 33 bp, synthetic construct
  misc_feature 1..33: note = Synthetic
  source 1..33: mol_type = other DNA
atgtgcgactcggtccgcactagcctgaggtaa

SEQ ID NO: 7344 - DNA, 21 bp, synthetic construct
  source 1..21: mol_type = other DNA
  misc_feature 1..21: note = Synthetic
atgccatctccaggaatatga

SEQ ID NO: 7345 - DNA, 51 bp, synthetic construct
  misc_feature 1..51: note = Synthetic
  source 1..51: mol_type = other DNA
atgaagattaagaaaaagcatcctttaccgactcggtccgcactagcctga

SEQ ID NO: 7346 - DNA, 168 bp, synthetic construct
  misc_feature 1..168: note = Synthetic
  source 1..168: mol_type = other DNA
atgcccattaaggttagacagtggaggctggccgtgtcctgcacgctggcgtgctcagacgtgtgctacatctgcaacaagcgctcgccggaaggatgcataaacgcggcctgtcccggcgcgtgtccgttccaagtcatcgactcggtccgcactagcctgaggtaa

SEQ ID NO: 7347 - DNA, 18 bp, synthetic construct
  misc_feature 1..18: note = Synthetic
  source 1..18: mol_type = other DNA
atggtcgtgttcaactag

SEQ ID NO: 7348 - DNA, 144 bp, synthetic construct
  source 1..144: mol_type = other DNA
  misc_feature 1..144: note = Synthetic
atgtgtttctcaaaagatcttgaggtgtttgaaaacgggggaaacctgcgtttgggtgcgctaagccccggactgggacgtagccggcgtccggcacctatatttttctatttttttacaaaatatatgatgaaccaagaataa

SEQ ID NO: 7349 - DNA, 60 bp, synthetic construct
  source 1..60: mol_type = other DNA
  misc_feature 1..60: note = Synthetic
atcacgtcggggtccctacttacacctggggggagaacgagactgatgtcttccttttga

SEQ ID NO: 7350 - DNA, 168 bp, synthetic construct
  misc_feature 1..168: note = Synthetic
  source 1..168: mol_type = other DNA
atgacggcgcccaagtgtgtcaccaccacgacctatctggtcaagaccaaggagcagccctggtggcccgacaacgccatcaggagatggtggatcagcgttgccatcgtcatcttcatcggagtctgtctggtggccctcgactcggtccgcactagcctgaggtaa

SEQ ID NO: 7351 - DNA, 156 bp, synthetic construct
  source 1..156: mol_type = other DNA
  misc_feature 1..156: note = Synthetic
aagtgtgtcaccaccacgacctatctggtcaagaccaaggagcagccctggtggcccgacaacgccatcaggagatggtggatcagcgttgccatcgtcatcttcatcggagtctgtctggtggccctcgactcggtccgcactagcctgaggtaa

SEQ ID NO: 7352 - DNA, 48 bp, synthetic construct
  source 1..48: mol_type = other DNA
  misc_feature 1..48: note = Synthetic
atgtcggctcgcatgaaaactcagtctcagccacaggtggatccgtga

SEQ ID NO: 7353 - DNA, 180 bp, synthetic construct
  misc_feature 1..180: note = Synthetic
  source 1..180: mol_type = other DNA
ctgtttgacaccatgggcgcacaggtcagcaagcaaaatgtcggctcgcatgaaaactcagtctcagccacaggtggatccgtgattaagtatttcaacatcaattactacaaggattctgctagctctggcttgactaaacaagatttttccgactcggtccgcactagcctgaggtaa

SEQ ID NO: 7354 - DNA, 180 bp, synthetic construct
  misc_feature 1..180: note = Synthetic
  source 1..180: mol_type = other DNA
ctgtttgacaccgccggcgcacaggtcagcaagcaaaatgtcggctcgcatgaaaactcagtctcagccacaggtggatccgtgattaagtatttcaacatcaattactacaaggattctgctagctctggcttgactaaacaagatttttccgactcggtccgcactagcctgaggtaa

SEQ ID NO: 7355 - DNA, 204 bp, synthetic construct
  source 1..204: mol_type = other DNA
  misc_feature 1..204: note = Synthetic
ctggccatttccttctcctataggcagaaaaagatcatggagtcagtcgagaaggaggacagcctaaccgccccctttgagttcgccaccaccgcctccaccgatgccgccaacgcgcctaccaccttccccgtcgaggcacccccgcttgaggaggaggaagtgattatcgagcacgactcggtccgcactagcctgaggtaa

SEQ ID NO: 7356 - DNA, 63 bp, synthetic construct
  misc_feature 1..63: note = Synthetic
  source 1..63: mol_type = other DNA
atgccgccaacgcgcctaccaccttccccgtcgaggcacccccgcttgaggaggaggaagtga

SEQ ID NO: 7357 - DNA, 204 bp, synthetic construct
  misc_feature 1..204: note = Synthetic
  source 1..204: mol_type = other DNA
ctggccatttccttctcctataggcagaaaaagatcgccgagtcagtcgagaaggaggacagcctaaccgccccctttgagttcgccaccaccgcctccaccgatgccgccaacgcgcctaccaccttccccgtcgaggcacccccgcttgaggaggaggaagtgattatcgagcacgactcggtccgcactagcctgaggtaa

SEQ ID NO: 7358 - DNA, 192 bp, synthetic construct
  source 1..192: mol_type = other DNA
  misc_feature 1..192: note = Synthetic
ctgtttcttagcacgaagatctcgatgtctaagaaaccaggagggcccggcaagagccgggctgtcaatatgctaaaacgcggaatgccccgcgtgttgtccttgattggactgaagagggctatgttgagcctgatcgacggcaaggggccaatacgatttgtcgactcggtccgcactagcctgaggtaa

SEQ ID NO: 7359 - DNA, 180 bp, synthetic construct
  source 1..180: mol_type = other DNA
  misc_feature 1..180: note = Synthetic
acgaagatctcggcctctaagaaaccaggagggcccggcaagagccgggctgtcaatatgctaaaacgcggaatgccccgcgtgttgtccttgattggactgaagagggctatgttgagcctgatcgacggcaaggggccaatacgatttgtcgactcggtccgcactagcctgaggtaa

SEQ ID NO: 7360 - DNA, 192 bp, synthetic construct
  source 1..192: mol_type = other DNA
  misc_feature 1..192: note = Synthetic
ctgtttcttggcacgaagatctcggcctctaagaaaccaggagggcccggtaaaaaccgggctgtcaatatgctaaaacgcggtatgccccgcggattgtccttgataggactaaagagggctatgctgagtctgattgacgggaagggcccaatacgtttcgtcgactcggtccgcactagcctgaggtaa

SEQ ID NO: 7361 - DNA, 168 bp, synthetic construct
  misc_feature 1..168: note = Synthetic
  source 1..168: mol_type = other DNA
atggagttattggaccacgacatttataagggacccgttcgagaacgggtcacgtataccattcccaaccatccctatctctcgctgaccgttcaccattccagggaacttgatgttgatctgaaagacataacggaggacgactcggtccgcactagcctgaggtaa

SEQ ID NO: 7362 - DNA, 171 bp, synthetic construct
  source 1..171: mol_type = other DNA
  misc_feature 1..171: note = Synthetic
gtggccgagttattggaccacgacatttataagggacccgttcgagaacgggtcacgtataccattcccaaccatccctatctctcgctgaccgttcaccattccagggaacttgatgttgatctgaaagacataacggaggacgactcggtccgcactagcctgaggtaa

SEQ ID NO: 7363 - DNA, 57 bp, synthetic construct
  source 1..57: mol_type = other DNA
  misc_feature 1..57: note = Synthetic
atggccctcagggttccggcaaacatctcgatcactctggattggcgattagtatga

SEQ ID NO: 7364 - DNA, 168 bp, synthetic construct
  source 1..168: mol_type = other DNA
  misc_feature 1..168: note = Synthetic
atgtatttgttacgaccggtttttatttcggtggtggttcctgagcccctgatgttttatttaaataatatggacatttctgtggtagattttttaaagacaaacatgtcggagtttttgctgcacattttgcattgtgtcgactcggtccgcactagcctgaggtaa

SEQ ID NO: 7365 - DNA, 144 bp, synthetic construct
  misc_feature 1..144: note = Synthetic
  source 1..144: mol_type = other DNA
atttcggtggtggttcctgagcccctgatgttttatttaaataatatggacatttctgtggtagattttttaaagacaaacatgtcggagtttttgctgcacattttgcattgtgtcgactcggtccgcactagcctgaggtaa

SEQ ID NO: 7366 - DNA, 159 bp, synthetic construct
  source 1..159: mol_type = other DNA
  misc_feature 1..159: note = Synthetic
gtggccctctgccctttcaccaccgaggtgctggcaggcgtcacggtcatgccggttgccgctgttaccgtgctgcgatcttctgccatcgacggacgtcccacattggtgactttcaccgtgcgggtgatcgactcggtccgcactagcctgaggtaa

SEQ ID NO: 7367 - DNA, 174 bp, synthetic construct
  misc_feature 1..174: note = Synthetic
  source 1..174: mol_type = other DNA
atgtgtaagtggccagtagttgtttgtggcaattattttgctttcaagcagtcaaataataattgctatataaatgtggcatgtttaatgctgcaacacttgagtttaaagtttcctaagtggcaatggcaagaggcttggaacgagttccgctctcgactcggtccgcactag

SEQ ID NO: 7368 - DNA, 45 bp, synthetic construct
  source 1..45: mol_type = other DNA
  misc_feature 1..45: note = Synthetic
attacgagtacttcaccaaagccgaaaatactcagaagactgtga

SEQ ID NO: 7369 - DNA, 201 bp, synthetic construct
  source 1..201: mol_type = other DNA
  misc_feature 1..201: note = Synthetic
ttggacaccttttcaagagagtattcaatgaccgaatgttctccagatcttcaaaaattttcatttaaaatggcaattgcttctcttaataagcttagaggatttaaaaaaagagtaaatgtttttgaaacaaaaattgtaatggataacgatgataatgttttaggtatgctgtttagtgaccgactcggtccgcactag

SEQ ID NO: 7370 - DNA, 18 bp, synthetic construct
  source 1..18: mol_type = other DNA
  misc_feature 1..18: note = Synthetic
atgaagcgattatattga

SEQ ID NO: 7371 - DNA, 51 bp, synthetic construct
  misc_feature 1..51: note = Synthetic
  source 1..51: mol_type = other DNA
atggaagtggtagcagttataagacaatcactattagctgctaaggtttga

SEQ ID NO: 7372 - DNA, 219 bp, synthetic construct
  source 1..219: mol_type = other DNA
  misc_feature 1..219: note = Synthetic
attgaatgccagattaacttaccatctgtaaaaatgaaaactggggcaaatatgtcacgaaggaatccttgcaaatttgaaattcgaggtcattgcttaaatggtaagaggtgtcattttagtcataattattttgaatggccaccccatgcactgcttgtaagacaaaactttatgttaaacagaatactcgactcggtccgcactagcctgaggtaa

SEQ ID NO: 7373 - DNA, 219 bp, synthetic construct
  source 1..219: mol_type = other DNA
  misc_feature 1..219: note = Synthetic
attgaatgccagattaacttaccatctgtaaaaatgaaaactggggcaaatgcctcacgaaggaatccttgcaaatttgaaattcgaggtcattgcttaaatggtaagaggtgtcattttagtcataattattttgaatggccaccccatgcactgcttgtaagacaaaactttatgttaaacagaatactcgactcggtccgcactagcctgaggtaa

SEQ ID NO: 7374 - DNA, 156 bp, synthetic construct
  misc_feature 1..156: note = Synthetic
  source 1..156: mol_type = other DNA
gtgctctgccctttcaccaccgaggtgctggcaggcgtcacggtcatgccggttgccgctgttaccgtgctgcgatcttctgccatcgacggacgtcccacattggtgactttcaccgtgcgggtgatcgactcggtccgcactagcctgaggtaa

SEQ ID NO: 7375 - DNA, 15 bp, synthetic construct
  source 1..15: mol_type = other DNA
  misc_feature 1..15: note = Synthetic
atgaagaagtattga

SEQ ID NO: 7376 - DNA, 87 bp, synthetic construct
  source 1..87: mol_type = other DNA
  misc_feature 1..87: note = Synthetic
acgataatgtacatatttgtacccacactaacgtgtcacatattaatcacactagttggtattacgactcggtccgcactagcctga

SEQ ID NO: 7377 - DNA, 54 bp, synthetic construct
  source 1..54: mol_type = other DNA
  misc_feature 1..54: note = Synthetic
ttgcaaaaatcaatgggtcgttggaccattaataggaaaaggtggattcggtag

SEQ ID NO: 7378 - DNA, 180 bp, synthetic construct
  misc_feature 1..180: note = Synthetic
  source 1..180: mol_type = other DNA
ataaaacacgatatggatgccaacgtagtatcatcttctactattgcgacgtatatagacgctttagcgaagaatgcttcggaattagaacagaggtctaccgcatacgaaataaataatgaattggaactagtatttattaagccgccattcgactcggtccgcactagcctgaggtaa

SEQ ID NO: 7379 - DNA, 21 bp, synthetic construct
  source 1..21: mol_type = other DNA
  misc_feature 1..21: note = Synthetic
acgatgccgatgccaacatag

SEQ ID NO: 7380 - DNA, 15 bp, synthetic construct
  misc_feature 1..15: note = Synthetic
  source 1..15: mol_type = other DNA
atgcttcggaattag

SEQ ID NO: 7381 - DNA, 180 bp, synthetic construct
  misc_feature 1..180: note = Synthetic
  source 1..180: mol_type = other DNA
acgggccgccaatcgctgaatgacggcaatgtgcggcaggttagattgacggtacaacgagatgtccttagaaagcaccgacgaaagcaccaggtcctcaacacgcacacggtgcaggtacagatcgtcgcgggcctgcaccaggcggcgcaagatacgccacgactcggtccgcactag

SEQ ID NO: 7382 - DNA, 27 bp, synthetic construct
  source 1..27: mol_type = other DNA
  misc_feature 1..27: note = Synthetic
acggcaatgtgcggcaggttagattga

SEQ ID NO: 7383 - DNA, 129 bp, synthetic construct
  source 1..129: mol_type = other DNA
  misc_feature 1..129: note = Synthetic
atgtccttagaaagcaccgacgaaagcaccaggtcctcaacacgcacacggtgcaggtacagatcgtcgcgggcctgcaccaggcggcgcaagatacgccacgactcggtccgcactagcctgaggtaa

SEQ ID NO: 7384 - DNA, 180 bp, synthetic construct
  misc_feature 1..180: note = Synthetic
  source 1..180: mol_type = other DNA
acgggccgccaatcgcttaacgacggcaatgtgcggcaggttagattgacggtacaacgagatgtccttagaaagcaccgacgaaagcaccaggtcctcaacacgcacacggtgcaggtacagatcgtcgcgggcctgcaccaggcggcgcaagatacgccacgactcggtccgcactag

SEQ ID NO: 7385 - DNA, 21 bp, synthetic construct
  source 1..21: mol_type = other DNA
  misc_feature 1..21: note = Synthetic
atgtgcggcaggttagattga

SEQ ID NO: 7386 - DNA, 180 bp, synthetic construct
  source 1..180: mol_type = other DNA
  misc_feature 1..180: note = Synthetic
acgggccgccaatcgcttaatcacggcaatgtgcggcaggttagattgacggtacaacgagatgtccttagaaagcaccgacgaaagcaccaggtcctcaacacgcacacggtgcaggtacagatcgtcgcgggcctgcaccaggcggcgcaagatacgccacgactcggtccgcactag

SEQ ID NO: 7387 - DNA, 180 bp, synthetic construct
  source 1..180: mol_type = other DNA
  misc_feature 1..180: note = Synthetic
acgggccgccaatcgcttaatgacggcaaagtgcggcaggttagattgacggtacaacgagatgtccttagaaagcaccgacgaaagcaccaggtcctcaacacgcacacggtgcaggtacagatcgtcgcgggcctgcaccaggcggcgcaagatacgccacgactcggtccgcactag

SEQ ID NO: 7388 - DNA, 27 bp, synthetic construct
  misc_feature 1..27: note = Synthetic
  source 1..27: mol_type = other DNA
acggcaaagtgcggcaggttagattga

SEQ ID NO: 7389 - DNA, 84 bp, synthetic construct
  misc_feature 1..84: note = Synthetic
  source 1..84: mol_type = other DNA
aagacccgatccccgaccgagggtagctcctcagaacgggccgccaatcgcttaatgacggcaatctgcggcaggttagattga

SEQ ID NO: 7390 - DNA, 180 bp, synthetic construct
  source 1..180: mol_type = other DNA
  misc_feature 1..180: note = Synthetic
acgggccgccaatcgcttaatgacggcaatctgcggcaggttagattgacggtacaacgagatgtccttagaaagcaccgacgaaagcaccaggtcctcaacacgcacacggtgcaggtacagatcgtcgcgggcctgcaccaggcggcgcaagatacgccacgactcggtccgcactag

SEQ ID NO: 7391 - DNA, 30 bp, synthetic construct
  misc_feature 1..30: note = Synthetic
  source 1..30: mol_type = other DNA
atgacggcaatgagcggcaggttagattga

SEQ ID NO: 7392 - DNA, 180 bp, synthetic construct
  source 1..180: mol_type = other DNA
  misc_feature 1..180: note = Synthetic
acgggccgccaatcgcttaatgacggcaatgtgcggcaggttagattgacggtacaacgagatgtccttagaaagcaccgacgaaagcaccaggtcctcaacacgcacacggtgcaggtacagatcgtcgcgggcctgcaccaggcggcgcaagatacgccacgactcggtccgcactag

SEQ ID NO: 7393 - DNA, 84 bp, synthetic construct
  source 1..84: mol_type = other DNA
  misc_feature 1..84: note = Synthetic
aagacccgatccccgaccgagggtagctcctcagaacgggccgccaatcgcttaatgacggcaatgtggggcaggttagattga

SEQ ID NO: 7394 - DNA, 180 bp, synthetic construct
  source 1..180: mol_type = other DNA
  misc_feature 1..180: note = Synthetic
acgggccgccaatcgcttaatgacggcagtgtgcggcaggttagattgacggtacaacgagatgtccttagaaagcaccgacgaaagcaccaggtcctcaacacgcacacggtgcaggtacagatcgtcgcgggcctgcaccaggcggcgcaagatacgccacgactcggtccgcactag

SEQ ID NO: 7395 - DNA, 27 bp, synthetic construct
  source 1..27: mol_type = other DNA
  misc_feature 1..27: note = Synthetic
acggcagtgtgcggcaggttagattga

SEQ ID NO: 7396 - DNA, 87 bp, synthetic construct
  misc_feature 1..87: note = Synthetic
  source 1..87: mol_type = other DNA
aggtctaccgcatacgaaataaataatgaattggaactagtatttattaagccgccattcgactcggtccgcactagcctgaggtaa

SEQ ID NO: 7397 - DNA, 177 bp, synthetic construct
  source 1..177: mol_type = other DNA
  misc_feature 1..177: note = Synthetic
aagtcaaacatggcctcgaatctttacaagagatcaaaaacaaccctccgtcttcccaagatgtcaatcttgccagggagatttacgaatccattagacaaacaggaacatcttcagtgcaaggaggagccattgcgggagataatattcgactcggtccgcactagcctgaggtaa

SEQ ID NO: 7398 - DNA, 180 bp, synthetic construct
  misc_feature 1..180: note = Synthetic
  source 1..180: mol_type = other DNA
acgggccgccaaacgcttaatgacggcaatgtgcggcaggttagattgacggtacaacgagatgtccttagaaagcaccgacgaaagcaccaggtcctcaacacgcacacggtgcaggtacagatcgtcgcgggcctgcaccaggcggcgcaagatacgccacgactcggtccgcactag

SEQ ID NO: 7399 - DNA, 180 bp, synthetic construct
  source 1..180: mol_type = other DNA
  misc_feature 1..180: note = Synthetic
acgggccgccaatcgattaatgacggcaatgtgcggcaggttagattgacggtacaacgagatgtccttagaaagcaccgacgaaagcaccaggtcctcaacacgcacacggtgcaggtacagatcgtcgcgggcctgcaccaggcggcgcaagatacgccacgactcggtccgcactag

SEQ ID NO: 7400 - DNA, 180 bp, synthetic construct
  source 1..180: mol_type = other DNA
  misc_feature 1..180: note = Synthetic
acgggccgccaatcgcgtaatgacggcaatgtgcggcaggttagattgacggtacaacgagatgtccttagaaagcaccgacgaaagcaccaggtcctcaacacgcacacggtgcaggtacagatcgtcgcgggcctgcaccaggcggcgcaagatacgccacgactcggtccgcactag

SEQ ID NO: 7401 - DNA, 39 bp, synthetic construct
  misc_feature 1..39: note = Synthetic
  source 1..39: mol_type = other DNA
atgttccccattctaccaaagaattatacttctctatag

SEQ ID NO: 7402 - DNA, 21 bp, synthetic construct
  misc_feature 1..21: note = Synthetic
  source 1..21: mol_type = other DNA
atgcaaaaaggttcatgctaa

SEQ ID NO: 7403 - DNA, 180 bp, synthetic construct
  source 1..180: mol_type = other DNA
  misc_feature 1..180: note = Synthetic
acgggccgccaatcgcttactgacggcaatgtgcggcaggttagattgacggtacaacgagatgtccttagaaagcaccgacgaaagcaccaggtcctcaacacgcacacggtgcaggtacagatcgtcgcgggcctgcaccaggcggcgcaagatacgccacgactcggtccgcactag

SEQ ID NO: 7404 - DNA, 180 bp, synthetic construct
  misc_feature 1..180: note = Synthetic
  source 1..180: mol_type = other DNA
acgggccgccaatcgcttgatgacggcaatgtgcggcaggttagattgacggtacaacgagatgtccttagaaagcaccgacgaaagcaccaggtcctcaacacgcacacggtgcaggtacagatcgtcgcgggcctgcaccaggcggcgcaagatacgccacgactcggtccgcactag

SEQ ID NO: 7405 - DNA, 180 bp, synthetic construct
  misc_feature 1..180: note = Synthetic
  source 1..180: mol_type = other DNA
acgggccgccaatctcttaatgacggcaatgtgcggcaggttagattgacggtacaacgagatgtccttagaaagcaccgacgaaagcaccaggtcctcaacacgcacacggtgcaggtacagatcgtcgcgggcctgcaccaggcggcgcaagatacgccacgactcggtccgcactag

SEQ ID NO: 7406 - DNA, 180 bp, synthetic construct
  source 1..180: mol_type = other DNA
  misc_feature 1..180: note = Synthetic
acgggccgccaatcgcttaatgacggccatgtgcggcaggttagattgacggtacaacgagatgtccttagaaagcaccgacgaaagcaccaggtcctcaacacgcacacggtgcaggtacagatcgtcgcgggcctgcaccaggcggcgcaagatacgccacgactcggtccgcactag

SEQ ID NO: 7407 - DNA, 180 bp, synthetic construct
  source 1..180: mol_type = other DNA
  misc_feature 1..180: note = Synthetic
acgggccgccaatcgcttaatgacggtaatgtgcggcaggttagattgacggtacaacgagatgtccttagaaagcaccgacgaaagcaccaggtcctcaacacgcacacggtgcaggtacagatcgtcgcgggcctgcaccaggcggcgcaagatacgccacgactcggtccgcactag

SEQ ID NO: 7408 - DNA, 180 bp, synthetic construct
  source 1..180: mol_type = other DNA
  misc_feature 1..180: note = Synthetic
acgggccgccaatcgcttaatgacgtcaatgtgcggcaggttagattgacggtacaacgagatgtccttagaaagcaccgacgaaagcaccaggtcctcaacacgcacacggtgcaggtacagatcgtcgcgggcctgcaccaggcggcgcaagatacgccacgactcggtccgcactag

SEQ ID NO: 7409 - DNA, 30 bp, synthetic construct
  misc_feature 1..30: note = Synthetic
  source 1..30: mol_type = other DNA
atgacgtcaatgtgcggcaggttagattga

SEQ ID NO: 7410 - DNA, 180 bp, synthetic construct
  source 1..180: mol_type = other DNA
  misc_feature 1..180: note = Synthetic
acgggccgccaatcgcttaatgactgcaatgtgcggcaggttagattgacggtacaacgagatgtccttagaaagcaccgacgaaagcaccaggtcctcaacacgcacacggtgcaggtacagatcgtcgcgggcctgcaccaggcggcgcaagatacgccacgactcggtccgcactag

SEQ ID NO: 7411 - DNA, 180 bp, synthetic construct
  misc_feature 1..180: note = Synthetic
  source 1..180: mol_type = other DNA
acgggccgccaatcgcttaatgagggcaatgtgcggcaggttagattgacggtacaacgagatgtccttagaaagcaccgacgaaagcaccaggtcctcaacacgcacacggtgcaggtacagatcgtcgcgggcctgcaccaggcggcgcaagatacgccacgactcggtccgcactag

SEQ ID NO: 7412 - DNA, 180 bp, synthetic construct
  source 1..180: mol_type = other DNA
  misc_feature 1..180: note = Synthetic
acgggccgccaatcgcttaatggccgcaatgtgcggcaggttagattgacggtacaacgagatgtccttagaaagcaccgacgaaagcaccaggtcctcaacacgcacacggtgcaggtacagatcgtcgcgggcctgcaccaggcggcgcaagatacgccacgactcggtccgcactag

SEQ ID NO: 7413 - DNA, 87 bp, synthetic construct
  misc_feature 1..87: note = Synthetic
  source 1..87: mol_type = other DNA
atgttaaagtctctcgttagaaagctactagagcgagactttttcaaccatggaggccacccccacacccgcggacttgttttctga

SEQ ID NO: 7414 - DNA, 51 bp, synthetic construct
  misc_feature 1..51: note = Synthetic
  source 1..51: mol_type = other DNA
atgacaaaattaaaaaagataaacgactcggtccgcactagcctgaggtaa

SEQ ID NO: 7415 - DNA, 192 bp, synthetic construct
  misc_feature 1..192: note = Synthetic
  source 1..192: mol_type = other DNA
acggatccgctgaacgcagacacaatggaacagcaaaaaggattttcgattccattttttgtcactgacgaaaactgcaactttgtgcctgaaatattacctcgtatacatactaaatttcttaaagatgtcttaattgccgattcctacaactctgttagttgcgactcggtccgcactagcctgaggtaa

SEQ ID NO: 7416 - DNA, 192 bp, synthetic construct
  source 1..192: mol_type = other DNA
  misc_feature 1..192: note = Synthetic
acggatccgctgaacgcagacacagccgaacagcaaaaaggattttcgattccattttttgtcactgacgaaaactgcaactttgtgcctgaaatattacctcgtatacatactaaatttcttaaagatgtcttaattgccgattcctacaactctgttagttgcgactcggtccgcactagcctgaggtaa

SEQ ID NO: 7417 - DNA, 198 bp, synthetic construct
  misc_feature 1..198: note = Synthetic
  source 1..198: mol_type = other DNA
ctggtcctgactattttatgcagaaagagcatggaagacatcaattttacgtcgctggctccgcggcacggctcgcggccgctcatgggcacctggaacgacatcggcaccagtcagctcaacgggggcgctttcaattgggggagcctttggagcggcattaaaaacttcgactcggtccgcactagcctgaggtaa

SEQ ID NO: 7418 - DNA, 15 bp, synthetic construct
  misc_feature 1..15: note = Synthetic
  source 1..15: mol_type = other DNA
ctgatgaaaaaataa

SEQ ID NO: 7419 - DNA, 69 bp, synthetic construct
  source 1..69: mol_type = other DNA
  misc_feature 1..69: note = Synthetic
atgttgccgtctaaacccgcttgcgaaagtactataaaaataatggtccatcgactcggtccgcactag

SEQ ID NO: 7420 - DNA, 24 bp, synthetic construct
  source 1..24: mol_type = other DNA
  misc_feature 1..24: note = Synthetic
atgcaggacatggaagagtgctga

SEQ ID NO: 7421 - DNA, 33 bp, synthetic construct
  misc_feature 1..33: note = Synthetic
  source 1..33: mol_type = other DNA
atgtcttatcctgttgtggaatcctatgactga

SEQ ID NO: 7422 - DNA, 21 bp, synthetic construct
  source 1..21: mol_type = other DNA
  misc_feature 1..21: note = Synthetic
atgttagatgtgctttgctaa

SEQ ID NO: 7423 - DNA, 27 bp, synthetic construct
  misc_feature 1..27: note = Synthetic
  source 1..27: mol_type = other DNA
atgcacacatttttgcggaacccctaa

SEQ ID NO: 7424 - DNA, 24 bp, synthetic construct
  source 1..24: mol_type = other DNA
  misc_feature 1..24: note = Synthetic
atagttattagaataagagtgtag

SEQ ID NO: 7425 - DNA, 186 bp, synthetic construct
  misc_feature 1..186: note = Synthetic
  source 1..186: mol_type = other DNA
acggcggacatttttaacatggcatctattttaaatacacttaggtttttggaaaaaacatcattttataattgtaacgattcaataactaaagaaaagattaagattaaacataagggaatgtcatttgtattttataagccaaagcattctaccgtcgactcggtccgcactagcctgaggtaa

SEQ ID NO: 7426 - DNA, 159 bp, synthetic construct
  misc_feature 1..159: note = Synthetic
  source 1..159: mol_type = other DNA
attttaaatacacttaggtttttggaaaaaacatcattttataattgtaacgattcaataactaaagaaaagattaagattaaacataagggaatgtcatttgtattttataagccaaagcattctaccgtcgactcggtccgcactagcctgaggtaa

SEQ ID NO: 7427 - DNA, 186 bp, synthetic construct
  source 1..186: mol_type = other DNA
  misc_feature 1..186: note = Synthetic
acggcggacatttttaacatggcatctattttaaatacacttaggtttttagaaaaaacatcattttataattgcaacgattcaataactaaagaaaagattaagattaaacataagggaatgtcatttgtattttataagccaaagcattctactgtcgactcggtccgcactagcctgaggtaa

SEQ ID NO: 7428 - DNA, 159 bp, synthetic construct
  misc_feature 1..159: note = Synthetic
  source 1..159: mol_type = other DNA
attttaaatacacttaggtttttagaaaaaacatcattttataattgcaacgattcaataactaaagaaaagattaagattaaacataagggaatgtcatttgtattttataagccaaagcattctactgtcgactcggtccgcactagcctgaggtaa

SEQ ID NO: 7429 - DNA, 102 bp, synthetic construct
  source 1..102: mol_type = other DNA
  misc_feature 1..102: note = Synthetic
ataactaaagaaaagattaagattaaacataagggaatgtcatttgtattttataagccaaagcattctaccgtcgactcggtccgcactagcctgaggtaa

SEQ ID NO: 7430 - DNA, 57 bp, synthetic construct
  misc_feature 1..57: note = Synthetic
  source 1..57: mol_type = other DNA
ataactgaaatgaaagaatcaaaaatatgcgataacatcacccacgatcatgattaa

SEQ ID NO: 7431 - DNA, 180 bp, synthetic construct
  source 1..180: mol_type = other DNA
  misc_feature 1..180: note = Synthetic
acgggccgccaattgcttaatgacggcaatgtgcggcaggttagattgacggtacaacgagatgtccttagaaagcaccgacgaaagcaccaggtcctcaacacgcacacggtgcaggtacagatcgtcgcgggcctgcaccaggcggcgcaagatacgccacgactcggtccgcactag

SEQ ID NO: 7432 - DNA, 180 bp, synthetic construct
  source 1..180: mol_type = other DNA
  misc_feature 1..180: note = Synthetic
acgggccgccactcgcttaatgacggcaatgtgcggcaggttagattgacggtacaacgagatgtccttagaaagcaccgacgaaagcaccaggtcctcaacacgcacacggtgcaggtacagatcgtcgcgggcctgcaccaggcggcgcaagatacgccacgactcggtccgcactag

SEQ ID NO: 7433 - DNA, 180 bp, synthetic construct
  misc_feature 1..180: note = Synthetic
  source 1..180: mol_type = other DNA
acgggccgcctatcgcttaatgacggcaatgtgcggcaggttagattgacggtacaacgagatgtccttagaaagcaccgacgaaagcaccaggtcctcaacacgcacacggtgcaggtacagatcgtcgcgggcctgcaccaggcggcgcaagatacgccacgactcggtccgcactag

SEQ ID NO: 7434 - DNA, 180 bp, synthetic construct
  source 1..180: mol_type = other DNA
  misc_feature 1..180: note = Synthetic
ataaaacacgatatggatgccaacgtagtatcatcttccactatcgcgacatatatagacgctttagcaaagaatgcttcggaattagaacagggttctaccgcatacgaaataaataatgaattggaactagtatttattaagccgccattcgactcggtccgcactagcctgaggtaa

SEQ ID NO: 7435 - DNA, 168 bp, synthetic construct
  misc_feature 1..168: note = Synthetic
  source 1..168: mol_type = other DNA
atggctaacgtactcaaagaaaagatgtacgatgaactactgagtgcgacctgtcgtatcttaaagttggggtctcatgactataggatgactgagcggaatttattgtcgaaaaatccgaaatttcctttgtgtgatatcgactcggtccgcactagcctgaggtaa

SEQ ID NO: 7436 - DNA, 144 bp, synthetic construct
  source 1..144: mol_type = other DNA
  misc_feature 1..144: note = Synthetic
atgtacgatgaactactgagtgcgacctgtcgtatcttaaagttggggtctcatgactataggataactgagcggaatctattgtcgaagaacccgaagtttcctttgtgtgatatcgactcggtccgcactagcctgaggtaa

SEQ ID NO: 7437 - DNA, 144 bp, synthetic construct
  source 1..144: mol_type = other DNA
  misc_feature 1..144: note = Synthetic
atgtacgatgaactactgagtgcgacctgtcgtatcttaaagttggggtctcatgactataggatgactgagcggaatttattgtcgaaaaatccgaaatttcctttgtgtgatatcgactcggtccgcactagcctgaggtaa

SEQ ID NO: 7438 - DNA, 45 bp, synthetic construct
  misc_feature 1..45: note = Synthetic
  source 1..45: mol_type = other DNA
atgtcaagaactcctagcaaaaaaaaatttttctcaagaacctag

SEQ ID NO: 7439 - DNA, 168 bp, synthetic construct
  source 1..168: mol_type = other DNA
  misc_feature 1..168: note = Synthetic
aaggccactgaaattaaaacagaattacagaaaattaaaacggttttcaccatgattaaccaaatcaattcccttacacaagaaaaaacgtttttcattgtggctgatgtttctgctgacaataggctggcaacttgtatatttacgactcggtccgcactagcctga

SEQ ID NO: 7440 - DNA, 30 bp, synthetic construct
  source 1..30: mol_type = other DNA
  misc_feature 1..30: note = Synthetic
atgtgcaagatgattttgtcactgtattaa

SEQ ID NO: 7441 - DNA, 102 bp, synthetic construct
  source 1..102: mol_type = other DNA
  misc_feature 1..102: note = Synthetic
ttgtacaaattcattgtggtcaactcacccgacatgcttcacatctcgcgactcggcctttttctgggccttttcgactcggtccgcactagcctgaggtaa

SEQ ID NO: 7442 - DNA, 90 bp, synthetic construct
  misc_feature 1..90: note = Synthetic
  source 1..90: mol_type = other DNA
attgtggtcaactcacccgacatgcttcacatctcgcgactcggcctttttctgggccttttcgactcggtccgcactagcctgaggtaa

SEQ ID NO: 7443 - DNA, 57 bp, synthetic construct
  misc_feature 1..57: note = Synthetic
  source 1..57: mol_type = other DNA
ataactgaaatgaaagaatcaaaaatatgcgataacatcacccacgatcgccattaa

SEQ ID NO: 7444 - DNA, 54 bp, synthetic construct
  source 1..54: mol_type = other DNA
  misc_feature 1..54: note = Synthetic
atagtttttatgtatagcggtatctcgccctatagttttattgattactactaa

SEQ ID NO: 7445 - DNA, 168 bp, synthetic construct
  source 1..168: mol_type = other DNA
  misc_feature 1..168: note = Synthetic
atggatacagacacagacgaatacacggatacggatacggatacggatacggattcagatacaaatactgcaaatgtagaagatatcatgaatgaaatagatagagagaaagaagaaatactaaaaaatgtagaaatggacgactcggtccgcactagcctgaggtaa

SEQ ID NO: 7446 - DNA, 81 bp, synthetic construct
  misc_feature 1..81: note = Synthetic
  source 1..81: mol_type = other DNA
atgaatgaaatagatagagagaaagaagaaatactaaaaaatgtagaaatggacgactcggtccgcactagcctgaggtaa

SEQ ID NO: 7447 - DNA, 12 bp, synthetic construct
  misc_feature 1..12: note = Synthetic
  source 1..12: mol_type = other DNA
gtggcagaatag

SEQ ID NO: 7448 - DNA, 168 bp, synthetic construct
  source 1..168: mol_type = other DNA
  misc_feature 1..168: note = Synthetic
atggccaggttcatcgctcagctcctcctgttggcctcctgcgtggccgccggccaggctgtcaccgctttcttgggtgagcgagtcaccctgacctcctactggaggagggtgagcctcggtccagagattgaggtcagcgactcggtccgcactagcctgaggtaa

SEQ ID NO: 7449 - DNA, 39 bp, synthetic construct
  misc_feature 1..39: note = Synthetic
  source 1..39: mol_type = other DNA
atgttactaatagaggaagacaaaaagttgtcaccctaa

SEQ ID NO: 7450 - DNA, 78 bp, synthetic construct
  misc_feature 1..78: note = Synthetic
  source 1..78: mol_type = other DNA
atgtcagagcagaaaaagacctgggcggctgaagaccagcttcgcgggaactggacgactcggtccgcactagcctga

SEQ ID NO: 7451 - DNA, 138 bp, synthetic construct
  misc_feature 1..138: note = Synthetic
  source 1..138: mol_type = other DNA
atctttgttcttaagactataggtgtcccgtcagtatgcagacaaaatgaagatccaagatttgtagaagcatttaaatgcgacgagttagaaagatatattaagaataacgactcggtccgcactagcctgaggtaa

SEQ ID NO: 7452 - DNA, 33 bp, synthetic construct
  misc_feature 1..33: note = Synthetic
  source 1..33: mol_type = other DNA
atgtccgaccttgaaaaaaggatttttgtgtga

SEQ ID NO: 7453 - DNA, 192 bp, synthetic construct
  source 1..192: mol_type = other DNA
  misc_feature 1..192: note = Synthetic
atgcctccgaccttgaaaaaaggatttttgtgtgacagtagtttttgcaaaaaagatcaccagttggagagtttaactgatagggaattactcctactaatcgcccgtaagacttgtggatcagtagaacaacaattaaatataactgcacccaaggactcgcgcttagcaaatcgactcggtccgcactag

SEQ ID NO: 7454 - DNA, 159 bp, synthetic construct
  misc_feature 1..159: note = Synthetic
  source 1..159: mol_type = other DNA
aagtttatgcaggtgtatgaatatgacagagagcaatatcttgatgagttcatcgaagacagatataacgatagttttatcgctagtccagaatactatagcgcggaaaaatatatgtgtagatatactatcgactcggtccgcactagcctgaggtaa

SEQ ID NO: 7455 - DNA, 21 bp, synthetic construct
  source 1..21: mol_type = other DNA
  misc_feature 1..21: note = Synthetic
atgttctcgcctaagagataa

SEQ ID NO: 7456 - DNA, 27 bp, synthetic construct
  misc_feature 1..27: note = Synthetic
  source 1..27: mol_type = other DNA
atgatgttgcccaagatcctctcttaa

SEQ ID NO: 7457 - DNA, 30 bp, synthetic construct
  source 1..30: mol_type = other DNA
  misc_feature 1..30: note = Synthetic
ctggcattgctactaacccatactaactaa

SEQ ID NO: 7458 - DNA, 60 bp, synthetic construct
  source 1..60: mol_type = other DNA
  misc_feature 1..60: note = Synthetic
gtgatggatatattaaagtcaaataaagcgaaaaataattattctttattgtcatcatga

SEQ ID NO: 7459 - DNA, 81 bp, synthetic construct
  misc_feature 1..81: note = Synthetic
  source 1..81: mol_type = other DNA
gtgatggatatattaaagtcaaataaagcgaaaaataattattctttattgtcatcgccaacggcgggcatattcagttga

SEQ ID NO: 7460 - DNA, 21 bp, synthetic construct
  source 1..21: mol_type = other DNA
  misc_feature 1..21: note = Synthetic
ttggcgcatttgttggattga

SEQ ID NO: 7461 - DNA, 42 bp, synthetic construct
  source 1..42: mol_type = other DNA
  misc_feature 1..42: note = Synthetic
atgatcctggttcaacttctacgaaatcgccgtcttcattaa

SEQ ID NO: 7462 - DNA, 36 bp, synthetic construct
  misc_feature 1..36: note = Synthetic
  source 1..36: mol_type = other DNA
atgtctcgaatactaggcttgtttttacggaagtag

SEQ ID NO: 7463 - DNA, 42 bp, synthetic construct
  misc_feature 1..42: note = Synthetic
  source 1..42: mol_type = other DNA
atgatcccggttcaacttctacgaaatctccgtcttcattaa

SEQ ID NO: 7464 - DNA, 192 bp, synthetic construct
  source 1..192: mol_type = other DNA
  misc_feature 1..192: note = Synthetic
atgcatgccaattatctgttttggagaaatagtacaatgtggaatggaggggcttacagtctctttgacatgagtaagttccctttgaaagcggctggtacggctgttgttagccttaaaccagaccaaataaatgacttagtcctctccttgattgagaagggcaagtcgactcggtccgcactagcctga

SEQ ID NO: 7465 - DNA, 102 bp, synthetic construct
  source 1..102: mol_type = other DNA
  misc_feature 1..102: note = Synthetic
atgccaattttctcgagaaatcattcaattgaccatagactgaaagcgttgttacctagttcttcagaagagatcgactcggtccgcactagcctgaggtaa

SEQ ID NO: 7466 - DNA, 162 bp, synthetic construct
  source 1..162: mol_type = other DNA
  misc_feature 1..162: note = Synthetic
acgtctaacccaatgaatgcggtagcggggcggctggttccttatgttgaagatatagcggttgatattttcctaacagggaaatttttcacgcttaacccgccgttgcgaattaccaataattactttgcggatgatgaagtacgactcggtccgcactag

SEQ ID NO: 7467 - DNA, 39 bp, synthetic construct
  misc_feature 1..39: note = Synthetic
  source 1..39: mol_type = other DNA
atgatgaagtacgactcggtccgcactagcctgaggtaa

SEQ ID NO: 7468 - DNA, 162 bp, synthetic construct
  source 1..162: mol_type = other DNA
  misc_feature 1..162: note = Synthetic
acgtctaacccaatgaatgcggtagcggggcggctggttccttatgttgaagatatagcggttgatattttcctaacagggaaatttttcacgcttaacccgccgttgcgaattaccagccattactttgcggatgatgaagtacgactcggtccgcactag

SEQ ID NO: 7469 - DNA, 15 bp, synthetic construct
  source 1..15: mol_type = other DNA
  misc_feature 1..15: note = Synthetic
atgctacccacatga

SEQ ID NO: 7470 - DNA, 168 bp, synthetic construct
  source 1..168: mol_type = other DNA
  misc_feature 1..168: note = Synthetic
atggcgcacgctaaaaaacgggtacgacgaaaacttttaacttcgacagacgaccccatattgtccaacacttttaccatgcgcccgacaagtaagattgcagacgctgaaatcatttcaagagaacatgattatatcgccgactcggtccgcactagcctgaggtaa

SEQ ID NO: 7471 - DNA, 111 bp, synthetic construct
  source 1..111: mol_type = other DNA
  misc_feature 1..111: note = Synthetic
atattgtccaacacttttaccatgcgcccgacaagtaagattgcagacgctgaaatcatttcaagagaacatgattatatcgccgactcggtccgcactagcctgaggtaa

SEQ ID NO: 7472 - DNA, 168 bp, synthetic construct
  misc_feature 1..168: note = Synthetic
  source 1..168: mol_type = other DNA
atggctaacgtactcaaagaaaagatgtacgatgaactactgagtgcgacctgtcgtatcttaaagttggggtctcatgactataggataactgagcggaatctattgtcgaagaacccgaagtttcctttgtgtgatatcgactcggtccgcactagcctgaggtaa

SEQ ID NO: 7473 - DNA, 168 bp, synthetic construct
  misc_feature 1..168: note = Synthetic
  source 1..168: mol_type = other DNA
atgtctccagtctacgtgaatctgttaggtagcgtgggcctgctggccttttggtactttagctaccgctggatccagcgaaaacgccttgaagatcctctcccgccttggttaagaaagaaaaaagcatgtgcgctcaccgactcggtccgcactagcctgaggtaa

SEQ ID NO: 7474 - DNA, 51 bp, synthetic construct
  misc_feature 1..51: note = Synthetic
  source 1..51: mol_type = other DNA
ttggttaagaaagaaaaaagcatgtgcgctcaccgactcggtccgcactag

SEQ ID NO: 7475 - DNA, 153 bp, synthetic construct
  source 1..153: mol_type = other DNA
  misc_feature 1..153: note = Synthetic
gtgaatctgttaggtagcgtgggcctgctggccttttggtactttagctaccgctggatccagcgaaaacgccttgaagatcctctcccgccttggttaagaaagaaaaaagcatgtgcgctcaccgactcggtccgcactagcctgaggtaa

SEQ ID NO: 7476 - DNA, 51 bp, synthetic construct
  source 1..51: mol_type = other DNA
  misc_feature 1..51: note = Synthetic
ttggaacgtcacaaattgttaggaggaatggcaccagagataacgggttga

SEQ ID NO: 7477 - DNA, 216 bp, synthetic construct
  source 1..216: mol_type = other DNA
  misc_feature 1..216: note = Synthetic
atattgactcaaattgtaaatttgtacaatccatttcgcttgcgaacaatggaaatgcttcaaaaaaggaaacatcagacaattgatgaaacttccttaaataatctcattgaaaatgagaaaaaaaagatcagaagtttgctagcttttggtgttcccaaagagtgtgtgctttcgcgaagttttaccgactcggtccgcactagcctgaggtaa

SEQ ID NO: 7478 - DNA, 162 bp, synthetic construct
  source 1..162: mol_type = other DNA
  misc_feature 1..162: note = Synthetic
atgcttcaaaaaaggaaacatcagacaattgatgaaacttccttaaataatctcattgaaaatgagaaaaaaaagatcagaagtttgctagcttttggtgttcccaaagagtgtgtgctttcgcgaagttttaccgactcggtccgcactagcctgaggtaa

SEQ ID NO: 7479 - DNA, 63 bp, synthetic construct
  source 1..63: mol_type = other DNA
  misc_feature 1..63: note = Synthetic
atgacttctgattcaaaaagtatcgaaaacaaacatcagacgactcggtccgcactagcctga

SEQ ID NO: 7480 - DNA, 78 bp, synthetic construct
  misc_feature 1..78: note = Synthetic
  source 1..78: mol_type = other DNA
ttgctttattctagtatgacttctgattcaaaaagtatcgaaaacaaacatcagacgactcggtccgcactagcctga

SEQ ID NO: 7481 - DNA, 150 bp, synthetic construct
  source 1..150: mol_type = other DNA
  misc_feature 1..150: note = Synthetic
atgagtctcacgaaccggctggcgacctatggggcatctatgcgtccaaacccacgagattttatatgccccggagcagttatatgtgtacaaacaggatcagctgttgtaactggcactcaaccggcgactcggtccgcactagcctga

SEQ ID NO: 7482 - DNA, 45 bp, synthetic construct
  misc_feature 1..45: note = Synthetic
  source 1..45: mol_type = other DNA
atggatcacacaatgaaactagacacaataaaacagacaccatga

SEQ ID NO: 7483 - DNA, 168 bp, synthetic construct
  misc_feature 1..168: note = Synthetic
  source 1..168: mol_type = other DNA
atggccaggttcatcgctcagctcctcctgttggcctcctgtgtggccgccggccaggctgtcaccgctttcttgggtgagcgagtcaccctgacctcctactggaggagggtgagcctcggtccagagattgaggtcagcgactcggtccgcactagcctgaggtaa

SEQ ID NO: 7484 - DNA, 138 bp, synthetic construct
  source 1..138: mol_type = other DNA
  misc_feature 1..138: note = Synthetic
atcgcaattatggcttatggttctcgctaccgaggttatcggcgtcgccgacgcatgttctctcgttcgcgtgccagacgtggtaatggtcgtcggtattcccgcgctcccgactcggtccgcactagcctgaggtaa

SEQ ID NO: 7485 - DNA, 69 bp, synthetic construct
  source 1..69: mol_type = other DNA
  misc_feature 1..69: note = Synthetic
atgttgaggactgcgcgaatgttacagactaacacgttctgggccgggagctggacgacggctcattga

SEQ ID NO: 7486 - DNA, 12 bp, synthetic construct
  misc_feature 1..12: note = Synthetic
  source 1..12: mol_type = other DNA
atggatttttga

SEQ ID NO: 7487 - DNA, 147 bp, synthetic construct
  misc_feature 1..147: note = Synthetic
  source 1..147: mol_type = other DNA
atggatataaagaatttgctgactgcatgtactattttttacattactacattggctacggcagatatacctactccgccaccaacgggtcatgtgacaagggagaatatcttgataagaggcacgactcggtccgcactagcctga

SEQ ID NO: 7488 - DNA, 168 bp, synthetic construct
  source 1..168: mol_type = other DNA
  misc_feature 1..168: note = Synthetic
atggtagctgcatttctacttctcctctgtctacccatcattttcgtctcttcaactttcgccgcagtttcccacctggaaccagagtgcctaccgccttttgacgtgtatctgattctcacctttgtttgttgtatatccgactcggtccgcactagcctgaggtaa

SEQ ID NO: 7489 - DNA, 186 bp, synthetic construct
  source 1..186: mol_type = other DNA
  misc_feature 1..186: note = Synthetic
gtgattttgttttccagcgccgtagctgcatttctacttctcctctgtctacccatcattttcgtctcttcaactttcgccgcagtttcccacctggaaccagagtgcctaccgccttttgacgtgtatctgattctcacctttgtttgttgtatatccgactcggtccgcactagcctgaggtaa

SEQ ID NO: 7490 - DNA, 45 bp, synthetic construct
  source 1..45: mol_type = other DNA
  misc_feature 1..45: note = Synthetic
attaaaagaatgaaaaacaaggaccaatatggaaatatccgatga

SEQ ID NO: 7491 - DNA, 75 bp, synthetic construct
  source 1..75: mol_type = other DNA
  misc_feature 1..75: note = Synthetic
ttggatcatgtgtactcaaccggccatacattaaggatgactatacagcacacgactcggtccgcactagcctga

SEQ ID NO: 7492 - DNA, 45 bp, synthetic construct
  source 1..45: mol_type = other DNA
  misc_feature 1..45: note = Synthetic
attaaaagaatgaaaaacaaggaccaatgccgaaatatccgatga

SEQ ID NO: 7493 - DNA, 168 bp, synthetic construct
  misc_feature 1..168: note = Synthetic
  source 1..168: mol_type = other DNA
atgggtaacaaaaatattaaaccatctaaggaaaatagactgtccatcttgtacaaggataggatggattcatttaagagaggatcttgggcaacatcatcatttagagaaaagtcacatgcaaccatccaaagatttttcgactcggtccgcactagcctgaggtaa

SEQ ID NO: 7494 - DNA, 60 bp, synthetic construct
  misc_feature 1..60: note = Synthetic
  source 1..60: mol_type = other DNA
ctggaaataaatatatggtcatccaagacgattaggtctacctttatagatcgccggtaa

SEQ ID NO: 7495 - DNA, 153 bp, synthetic construct
  source 1..153: mol_type = other DNA
  misc_feature 1..153: note = Synthetic
attaaaccatctaaggaaaatagactgtccatcttgtacaaggataggatggattcatttaagagaggatcttgggcaacatcatcatttagagaaaagtcacatgcaaccatccaaagatttttcgactcggtccgcactagcctgaggtaa

SEQ ID NO: 7496 - DNA, 15 bp, synthetic construct
  source 1..15: mol_type = other DNA
  misc_feature 1..15: note = Synthetic
atactccgaccttaa

SEQ ID NO: 7497 - DNA, 48 bp, synthetic construct
  source 1..48: mol_type = other DNA
  misc_feature 1..48: note = Synthetic
ttgagcatcctggccagaagcacgtcgggcgtcatccccgagtcatag

SEQ ID NO: 7498 - DNA, 123 bp, synthetic construct
  misc_feature 1..123: note = Synthetic
  source 1..123: mol_type = other DNA
atagtagaaaaccagggccacgcactggtccacaaacacgctcaggttcacggccgccatttccacgtcgttttggatcgccggtgccgcctggaacagacactgcgactcggtccgcactag

SEQ ID NO: 7499 - DNA, 48 bp, synthetic construct
  source 1..48: mol_type = other DNA
  misc_feature 1..48: note = Synthetic
gtgagcatcctggccagaagcacgtcgggcgtcatccccgagtcatag

SEQ ID NO: 7500 - DNA, 39 bp, synthetic construct
  misc_feature 1..39: note = Synthetic
  source 1..39: mol_type = other DNA
ctggccagaagcacgtcgggcgtcatccccgagtcatag

SEQ ID NO: 7501 - DNA, 48 bp, synthetic construct
  source 1..48: mol_type = other DNA
  misc_feature 1..48: note = Synthetic
ttgaccatcctggccagaagcacgtcgggcgtcatccccgagtcatag

SEQ ID NO: 7502 - DNA, 168 bp, synthetic construct
  source 1..168: mol_type = other DNA
  misc_feature 1..168: note = Synthetic
atggagtcgcgcggtcgccgttgtcccgaaatgatatccgtactgggtcccatttcggggcacgtgctgaaagccgtgtttagtcgcggcgatacgccggtgctgccgcacgagacgcgactcctgcagacgggtatccacgactcggtccgcactagcctgaggtaa

SEQ ID NO: 7503 - DNA, 45 bp, synthetic construct
  misc_feature 1..45: note = Synthetic
  source 1..45: mol_type = other DNA
atgtcgcattccaacaaaaggtattacaagaatataaaaaaatga

SEQ ID NO: 7504 - DNA, 24 bp, synthetic construct
  source 1..24: mol_type = other DNA
  misc_feature 1..24: note = Synthetic
atgggttacatcagttataaataa

SEQ ID NO: 7505 - DNA, 36 bp, synthetic construct
  source 1..36: mol_type = other DNA
  misc_feature 1..36: note = Synthetic
atgcacttctcaacgactcggtccgcactagcctga

SEQ ID NO: 7506 - DNA, 48 bp, synthetic construct
  source 1..48: mol_type = other DNA
  misc_feature 1..48: note = Synthetic
atgtacaaaactactaaatgcgcttctcaacgactcggtccgcactag

SEQ ID NO: 7507 - DNA, 114 bp, synthetic construct
  source 1..114: mol_type = other DNA
  misc_feature 1..114: note = Synthetic
attaataatgacaataatattgaaaaaaatttttcggaagtgtttgttgatacaatgagcgtatttatgtcactggcacattgtgtcgactcggtccgcactagcctgaggtaa

SEQ ID NO: 7508 - DNA, 18 bp, synthetic construct
  source 1..18: mol_type = other DNA
  misc_feature 1..18: note = Synthetic
atgaaaaaatataaatga

SEQ ID NO: 7509 - DNA, 168 bp, synthetic construct
  source 1..168: mol_type = other DNA
  misc_feature 1..168: note = Synthetic
atggaaaatgtattcattagtagtagttactcatcaaatgaacaaacatcaatggcggtagccgctactgatatccgagagttactatcacaatatgtggatgataataccagcgtggaagacttaatagaatgggccatcgactcggtccgcactagcctgaggtaa

SEQ ID NO: 7510 - DNA, 66 bp, synthetic construct
  source 1..66: mol_type = other DNA
  misc_feature 1..66: note = Synthetic
atgggaaatttcaggagcagagtttacatcttccaagtcacatacagcgaatggaatatcgattag

SEQ ID NO: 7511 - DNA, 87 bp, synthetic construct
  source 1..87: mol_type = other DNA
  misc_feature 1..87: note = Synthetic
aggattagagaagataaaacgtggaaagaatctacgcatctaaacgatttagtaaacttgactacgactcggtccgcactagcctga

SEQ ID NO: 7512 - DNA, 75 bp, synthetic construct
  misc_feature 1..75: note = Synthetic
  source 1..75: mol_type = other DNA
atctcagatatgggaaatttcaggagcagagtttacatcttccaagtcccataccgcaaatggaatatccattag

SEQ ID NO: 7513 - DNA, 15 bp, synthetic construct
  source 1..15: mol_type = other DNA
  misc_feature 1..15: note = Synthetic
atggaaaaaggataa

SEQ ID NO: 7514 - DNA, 39 bp, synthetic construct
  misc_feature 1..39: note = Synthetic
  source 1..39: mol_type = other DNA
atggccagaagcacgtcgggcgtcatccccgagtcatag

SEQ ID NO: 7515 - DNA, 48 bp, synthetic construct
  misc_feature 1..48: note = Synthetic
  source 1..48: mol_type = other DNA
ttgagcatccgggccagaagcacgtcgggcgtcatccccgagtcatag

SEQ ID NO: 7516 - DNA, 42 bp, synthetic construct
  misc_feature 1..42: note = Synthetic
  source 1..42: mol_type = other DNA
atcctcgccagaagcacgtcgggcgtcatccccgagtcatag

SEQ ID NO: 7517 - DNA, 168 bp, synthetic construct
  source 1..168: mol_type = other DNA
  misc_feature 1..168: note = Synthetic
atggatatctttagggaaatcgcatcttctatgaaaggaaagaatgtattcatttctccagcgtcaatctcgtcagtattgacaatactgtattatggagctaatggatccactgctgaacagctatcaaaatatgtagacgactcggtccgcactagcctgaggtaa

SEQ ID NO: 7518 - DNA, 45 bp, synthetic construct
  source 1..45: mol_type = other DNA
  misc_feature 1..45: note = Synthetic
atggagctaatggatccactgctgaacagctatcaaaatatgtag

SEQ ID NO: 7519 - DNA, 180 bp, synthetic construct
  source 1..180: mol_type = other DNA
  misc_feature 1..180: note = Synthetic
atatcgattactgccgatatctttagggaaatcgcatcttctatgaaaggaaagaatgtattcatttctccagcgtcaatctcgtcagtattgacaatactgtattatggagctaatggatccactgctgaacagctatcaaaatatgtagacgactcggtccgcactagcctgaggtaa

SEQ ID NO: 7520 - DNA, 21 bp, synthetic construct
  source 1..21: mol_type = other DNA
  misc_feature 1..21: note = Synthetic
atgttctcgtctaagagatga

SEQ ID NO: 7521 - DNA, 30 bp, synthetic construct
  misc_feature 1..30: note = Synthetic
  source 1..30: mol_type = other DNA
atgaccacgactcggtccgcactagcctga

SEQ ID NO: 7522 - DNA, 72 bp, synthetic construct
  misc_feature 1..72: note = Synthetic
  source 1..72: mol_type = other DNA
atgataagtatcacaaacaccttggctaattgcatatctttgaccgggccttgcgtaccacgccgggactag

SEQ ID NO: 7523 - DNA, 99 bp, synthetic construct
  source 1..99: mol_type = other DNA
  misc_feature 1..99: note = Synthetic
ttgcgtaccacgccgggactaggctcgctgtctaccccgcaagctagaacgaaccccgtaatcaaggccctggtccgtcctcgactcggtccgcactag

SEQ ID NO: 7524 - DNA, 204 bp, synthetic construct
  source 1..204: mol_type = other DNA
  misc_feature 1..204: note = Synthetic
attaagaaaaacttagggaccaggattattgcagagatggagtccatctcaatcaaccagatcctataccctgaagtgcacctggatagtcctatagtcactaataagttagtagctatactggagtactctcgggtaacccatgggtacattctggaggatcagacattgacaaacgactcggtccgcactagcctgaggtaa

SEQ ID NO: 7525 - DNA, 30 bp, synthetic construct
  source 1..30: mol_type = other DNA
  misc_feature 1..30: note = Synthetic
atgggtacattctggaggatcagacattga

SEQ ID NO: 7526 - DNA, 204 bp, synthetic construct
  source 1..204: mol_type = other DNA
  misc_feature 1..204: note = Synthetic
attaagaaaaacttagggaccaggattattgcagaggccgagtccatctcaatcaaccagatcctataccctgaagtgcacctggatagtcctatagtcactaataagttagtagctatactggagtactctcgggtaacccatgggtacattctggaggatcagacattgacaaacgactcggtccgcactagcctgaggtaa

SEQ ID NO: 7527 - DNA, 210 bp, synthetic construct
  misc_feature 1..210: note = Synthetic
  source 1..210: mol_type = other DNA
atgaactgtgatttaatgaaacagtatatagaatttgtggcggatagattattgttggaattgggatgcgataaatactattgttcaaaaaatccttttgattttatggaaaatatttcattagaaggaaaaacaaatttctttgaaaagagagttagtgaatatcaaaaaatgtcagttatgtcaaataaacgactcggtccgcactag

SEQ ID NO: 7528 - DNA, 24 bp, synthetic construct
  source 1..24: mol_type = other DNA
  misc_feature 1..24: note = Synthetic
gtggttggagtagggtactcgtga

SEQ ID NO: 7529 - DNA, 78 bp, synthetic construct
  source 1..78: mol_type = other DNA
  misc_feature 1..78: note = Synthetic
atggtagtaataaaggatctaaaacttatacatctggtggcagtggaatgtggggaggaggatcgtccagtggtgtaa

SEQ ID NO: 7530 - DNA, 168 bp, synthetic construct
  misc_feature 1..168: note = Synthetic
  source 1..168: mol_type = other DNA
atgtcttctaaagggggtagtagtggcggcatgtggagtgtctttatccatggacatgatggtagtaataaaggatctaaaacttatacatctggtggcagtggaatgtggggaggaggatcgtccagtggtgtaaaaagcgactcggtccgcactagcctgaggtaa

SEQ ID NO: 7531 - DNA, 141 bp, synthetic construct
  source 1..141: mol_type = other DNA
  misc_feature 1..141: note = Synthetic
atgcactatacgttgttgataaggctcttgcacaacatggttatatactctttgaacaacgtatgcggccaaaaaacggaaaaaggggtcctcggaggaggaccccaaacactacctagatacatggattgggatgcttag

SEQ ID NO: 7532 - DNA, 141 bp, synthetic construct
  misc_feature 1..141: note = Synthetic
  source 1..141: mol_type = other DNA
atgcactatacgttgttgataaggctcttgcacaacatggttatatactctttgagccacgtatgcggccaaaaaacggaaaaaggggtcctcggaggaggaccccaaacactacctagatacatggattgggatgcttag

SEQ ID NO: 7533 - DNA, 120 bp, synthetic construct
  misc_feature 1..120: note = Synthetic
  source 1..120: mol_type = other DNA
ttgactttctcagagatttcaccagtgttctcatcggtcacggtaactacttcgttatcggtcccattgattgcgtctgcttgtagaatctcgttgactttcttagcaacaatcccgtag

SEQ ID NO: 7534 - DNA, 129 bp, synthetic construct
  misc_feature 1..129: note = Synthetic
  source 1..129: mol_type = other DNA
gtgcccagcttgactttctcagagatttcaccagtgttctcatcggtcacggtaactacttcgttatcggtcccattgattgcgtctgcttgtagaatctcgttgactttcttagcaacaatcccgtag

SEQ ID NO: 7535 - DNA, 192 bp, synthetic construct
  source 1..192: mol_type = other DNA
  misc_feature 1..192: note = Synthetic
aagccagccgacttctccagttacggagcgagcccctcttttgttttgttttttgccagatgcatcccgtactgcggcagatgcgcccccaccctccaccgcaacagcagccccctcctacgcaacagccggcgcttctgcctccgccccagcagcagcaacttccagccactaccgccgcggccgccgtga

SEQ ID NO: 7536 - DNA, 168 bp, synthetic construct
  source 1..168: mol_type = other DNA
  misc_feature 1..168: note = Synthetic
atgcatcccgtactgcggcagatgcgcccccaccctccaccgcaacagcagccccctcctacgcaacagccggcgcttctgcctccgccccagcagcagcaacttccagccactaccgccgcggccgccgtgagcggggccgactcggtccgcactagcctgaggtaa

SEQ ID NO: 7537 - DNA, 156 bp, synthetic construct
  source 1..156: mol_type = other DNA
  misc_feature 1..156: note = Synthetic
ctgcggcagatgcgcccccaccctccaccgcaacagcagccccctcctacgcaacagccggcgcttctgcctccgccccagcagcagcaacttccagccactaccgccgcggccgccgtgagcggggccgactcggtccgcactagcctgaggtaa

SEQ ID NO: 7538 - DNA, 30 bp, synthetic construct
  source 1..30: mol_type = other DNA
  misc_feature 1..30: note = Synthetic
ctgtcgctgccccgaaaccagtcgccgtag

SEQ ID NO: 7539 - DNA, 24 bp, synthetic construct
  misc_feature 1..24: note = Synthetic
  source 1..24: mol_type = other DNA
atgcgcactggcaaaatactctga

SEQ ID NO: 7540 - DNA, 39 bp, synthetic construct
  misc_feature 1..39: note = Synthetic
  source 1..39: mol_type = other DNA
atgtgtcattacacgccgactcggtccgcactagcctga

SEQ ID NO: 7541 - DNA, 195 bp, synthetic construct
  misc_feature 1..195: note = Synthetic
  source 1..195: mol_type = other DNA
atggtaacgctaggcggggccgctatggatttatcgccgcactggctaggcatggcggcgggtatgtctggttggatgggagcggattttgtcaaggcggttttctcgcaatttgtgcaaagcaagattggccctatcaatcagccggggccgatagattccgacaatgacaagccgcgactcggtccgcactag

SEQ ID NO: 7542 - DNA, 96 bp, synthetic construct
  source 1..96: mol_type = other DNA
  misc_feature 1..96: note = Synthetic
agggacaaaaaaagcaaaataggagaaatcaaaacaaaaagtacagaacaccaaaacaacaaaaccaaaaaatcgactcggtccgcactagcctga

SEQ ID NO: 7543 - DNA, 24 bp, synthetic construct
  source 1..24: mol_type = other DNA
  misc_feature 1..24: note = Synthetic
atgaatattaaaacactagtatag

SEQ ID NO: 7544 - DNA, 168 bp, synthetic construct
  misc_feature 1..168: note = Synthetic
  source 1..168: mol_type = other DNA
atgaaacaatatatcgtcctggcatgcatgtgcctggcggcagctgctatgcctgccagtcttcagcaatcctcatcctcgtgtactgaagaagaaaacaaacattatatgggaatcgatgttattatcaaagtcacaaacgactcggtccgcactagcctgaggtaa

SEQ ID NO: 7545 - DNA, 45 bp, synthetic construct
  source 1..45: mol_type = other DNA
  misc_feature 1..45: note = Synthetic
atgttattatcaaagtcacaaacgactcggtccgcactagcctga

SEQ ID NO: 7546 - DNA, 168 bp, synthetic construct
  misc_feature 1..168: note = Synthetic
  source 1..168: mol_type = other DNA
atgaatggttccagaaaaagaagtagaagggctgctgtagaagatttatataaaagctgtcgtatgggtggtgactgtttacctgatgtagttaataaagttgaagggaaaactcttgctgatattcttttacaagccttcgactcggtccgcactagcctgaggtaa

SEQ ID NO: 7547 - DNA, 21 bp, synthetic construct
  misc_feature 1..21: note = Synthetic
  source 1..21: mol_type = other DNA
atgcaaaaatccagtttctaa

SEQ ID NO: 7548 - DNA, 42 bp, synthetic construct
  misc_feature 1..42: note = Synthetic
  source 1..42: mol_type = other DNA
atgaagatgggccaaaatggacgagattgtgcgcatcgttaa

SEQ ID NO: 7549 - DNA, 81 bp, synthetic construct
  source 1..81: mol_type = other DNA
  misc_feature 1..81: note = Synthetic
aagttactagacagcaaactggaactcatgagaatgctaacattgctacaaatggatcccatattacatacaatcagataa

SEQ ID NO: 7550 - DNA, 36 bp, synthetic construct
  source 1..36: mol_type = other DNA
  misc_feature 1..36: note = Synthetic
atgaacaagtttatcaaaaagattaaagaattgtag

SEQ ID NO: 7551 - DNA, 48 bp, synthetic construct
  misc_feature 1..48: note = Synthetic
  source 1..48: mol_type = other DNA
ttgagcatcctggccagtagcacgtcgggcgtcatccccgagtcatag

SEQ ID NO: 7552 - DNA, 48 bp, synthetic construct
  misc_feature 1..48: note = Synthetic
  source 1..48: mol_type = other DNA
ttgagcatcctgggcagaagcacgtcgggcgtcatccccgagtcatag

SEQ ID NO: 7553 - DNA, 117 bp, synthetic construct
  misc_feature 1..117: note = Synthetic
  source 1..117: mol_type = other DNA
attccaacaacatcaactgaaaaagttagtcgccaaccaatacaacgtaaaatatctagcaaaaattctatgtctaaaaacagaaatagcaagagatccgtacgcagtaataaatag

SEQ ID NO: 7554 - DNA, 48 bp, synthetic construct
  source 1..48: mol_type = other DNA
  misc_feature 1..48: note = Synthetic
atgaccgacgataatataaacatctcgactcggtccgcactagcctga

SEQ ID NO: 7555 - DNA, 36 bp, synthetic construct
  misc_feature 1..36: note = Synthetic
  source 1..36: mol_type = other DNA
atgatatccgcgaacgatatttgtgaaaaatattaa

SEQ ID NO: 7556 - DNA, 51 bp, synthetic construct
  misc_feature 1..51: note = Synthetic
  source 1..51: mol_type = other DNA
ctgaatttactgcaggtgtttgaagatccagacttttttcagcaaatatga

SEQ ID NO: 7557 - DNA, 168 bp, synthetic construct
  source 1..168: mol_type = other DNA
  misc_feature 1..168: note = Synthetic
atgaagtactgcctgcggatggcggtggagggcgcccttacagagctttttaatattcacggtttaaacctgcaaaatcagtgtgttcaaataatacaacagtggaagaatgaaaattacctgggaatggttcagtcaggcgactcggtccgcactagcctgaggtaa

SEQ ID NO: 7558 - DNA, 54 bp, synthetic construct
  source 1..54: mol_type = other DNA
  misc_feature 1..54: note = Synthetic
atgaaaattacctgggaatggttcagtcaggcgactcggtccgcactagcctga

SEQ ID NO: 7559 - DNA, 69 bp, synthetic construct
  source 1..69: mol_type = other DNA
  misc_feature 1..69: note = Synthetic
atagccttacagcttttgagtctagacaggggaacagccttcccttgtaagacagagccaatcttgtaa

SEQ ID NO: 7560 - DNA, 156 bp, synthetic construct
  source 1..156: mol_type = other DNA
  misc_feature 1..156: note = Synthetic
atgcttattctagccctctgggccccggtcgcgggtagtatgcctgaattatccttgactcttttcgatgaacctccgcccttggtggagacggagccgttaccgcctctgcccgatgtttcggagtacgactcggtccgcactagcctgaggtaa

SEQ ID NO: 7561 - DNA, 27 bp, synthetic construct
  misc_feature 1..27: note = Synthetic
  source 1..27: mol_type = other DNA
atgtcaactatcagatcttcgttctga

SEQ ID NO: 7562 - DNA, 105 bp, synthetic construct
  misc_feature 1..105: note = Synthetic
  source 1..105: mol_type = other DNA
atttcaccagtgttctcatcggtcacggtaactacttcgttatcggtcccattgattgcgtctgcttgtagaatctcgttgactttcttagcaacaatcccgtag

SEQ ID NO: 7563 - DNA, 84 bp, synthetic construct
  misc_feature 1..84: note = Synthetic
  source 1..84: mol_type = other DNA
ttgatttattccattataccatttagttataataccgtgactttgggacaattattagttattaagcgtaaacatagtatttga

SEQ ID NO: 7564 - DNA, 15 bp, synthetic construct
  misc_feature 1..15: note = Synthetic
  source 1..15: mol_type = other DNA
ataatagtgacataa

SEQ ID NO: 7565 - DNA, 168 bp, synthetic construct
  source 1..168: mol_type = other DNA
  misc_feature 1..168: note = Synthetic
atgtccatccttatatcgcccagcaataacacaggctggggcctgcgcttcccaagcaagatgtttggcggggcaaagaagcgctccgaccaacacccagtgcgcgtgcgcgggcactaccgcgcgccctggggcgcgcacgactcggtccgcactagcctgaggtaa

SEQ ID NO: 7566 - DNA, 162 bp, synthetic construct
  misc_feature 1..162: note = Synthetic
  source 1..162: mol_type = other DNA
atccttatatcgcccagcaataacacaggctggggcctgcgcttcccaagcaagatgtttggcggggcaaagaagcgctccgaccaacacccagtgcgcgtgcgcgggcactaccgcgcgccctggggcgcgcacgactcggtccgcactagcctgaggtaa

SEQ ID NO: 7567 - DNA, 51 bp, synthetic construct
  source 1..51: mol_type = other DNA
  misc_feature 1..51: note = Synthetic
atgcccgtcttgtaccctgtgccagtggcttggacactgatgttcaattaa

SEQ ID NO: 7568 - DNA, 144 bp, synthetic construct
  source 1..144: mol_type = other DNA
  misc_feature 1..144: note = Synthetic
gtggagggcgcccttacagagctttttaatattcacggtttaaacctgcaaaatcagtgtgttcaaataatacaacagtggaagaatgaaaattacctgggaatggttcagtcaggcgactcggtccgcactagcctgaggtaa

SEQ ID NO: 7569 - DNA, 195 bp, synthetic construct
  source 1..195: mol_type = other DNA
  misc_feature 1..195: note = Synthetic
ttgtgtttaatgcaggaacccgcagacatgtttgagagaaaaatggtgtctttttctgtggtggttccggaacttacctgcctttatctgcatgagcatgactacgatgtgcttgcttttttgcgcgaggctttgcctgattttttgagcagcaccttgcattttatcgactcggtccgcactagcctgaggtaa

SEQ ID NO: 7570 - DNA, 198 bp, synthetic construct
  source 1..198: mol_type = other DNA
  misc_feature 1..198: note = Synthetic
attttgtgtttaatgcaggaacccgcagacgcctttgagagaaaaatggtgtctttttctgtggtggttccggaacttacctgcctttatctgcatgagcatgactacgatgtgcttgcttttttgcgcgaggctttgcctgattttttgagcagcaccttgcattttatcgactcggtccgcactagcctgaggtaa

SEQ ID NO: 7571 - DNA, 51 bp, synthetic construct
  misc_feature 1..51: note = Synthetic
  source 1..51: mol_type = other DNA
atgactacgatgtgcttgcttttttgcgcgaggctttgcctgattttttga

SEQ ID NO: 7572 - DNA, 33 bp, synthetic construct
  source 1..33: mol_type = other DNA
  misc_feature 1..33: note = Synthetic
atgtatgttcaagctaaattacaaaaaacttag

SEQ ID NO: 7573 - DNA, 126 bp, synthetic construct
  source 1..126: mol_type = other DNA
  misc_feature 1..126: note = Synthetic
atggaaccgatccttgcaccaaatccaaatagatttgttattttcccaatccaatatcatgacatctggaatatgtataaaaaggcagaggcatcattcgactcggtccgcactagcctgaggtaa

SEQ ID NO: 7574 - DNA, 48 bp, synthetic construct
  misc_feature 1..48: note = Synthetic
  source 1..48: mol_type = other DNA
atggcaatgtataaaagatccaaatacagtcatataggccataactga

SEQ ID NO: 7575 - DNA, 36 bp, synthetic construct
  misc_feature 1..36: note = Synthetic
  source 1..36: mol_type = other DNA
atgagattggagtatggaaacgcacttatactatga

SEQ ID NO: 7576 - DNA, 210 bp, synthetic construct
  misc_feature 1..210: note = Synthetic
  source 1..210: mol_type = other DNA
atttattctacatggcccagtacattgtccgattcatcaggtagggtcatcgttatgccagataatagatcattcacgtttaaggaagggtttaaattagatgaatcgataaaatctatattgttggtaaacccgtcgtctatagatctattaaagattagagtatataaacatcgcataaaatggacgactcggtccgcactagcctga

SEQ ID NO: 7577 - DNA, 219 bp, synthetic construct
  misc_feature 1..219: note = Synthetic
  source 1..219: mol_type = other DNA
atggatatgccttcctattacttggtaattgtgggaatagtgatggtctgctcctgcactttctttgctattatgatctacccctgttttgatctcggctggaactctgttggggcatttacatacacactacaaaacagttcaccagccttcacaccgcctccccgcagaaatcagttccccctgattcagtactcgactcggtccgcactagcctga

SEQ ID NO: 7578 - DNA, 219 bp, synthetic construct
  misc_feature 1..219: note = Synthetic
  source 1..219: mol_type = other DNA
atggtgagacaagtagccaacagggaagggttgcaaatatcatttgggcacacctatgataatattgatgaagcagacagtattcagcaagtaactgagaggtgggaagctcaaagccaaagtcctaatgtgcagtcaggtgaatttattgaaaaatttgaggctcctggtggtgcaaatcaaagaactgctcctccgactcggtccgcactagcctga

SEQ ID NO: 7579 - DNA, 207 bp, synthetic construct
  source 1..207: mol_type = other DNA
  misc_feature 1..207: note = Synthetic
atgaaacacagattgtattctgaaggattgagtattagtaatgatttaaactcgataatcggtcaacaatctacaatggatacggatatagaaatagacgaagatgacatcatggaacttcttaatatattgactgagttaggttgtgatgtcgactttgatgaaaattttagcgatatcgactcggtccgcactagcctgaggtaa

SEQ ID NO: 7580 - DNA, 75 bp, synthetic construct
  misc_feature 1..75: note = Synthetic
  source 1..75: mol_type = other DNA
atgactgttcccgcaagtcttagtacgcggacgtttaactctgggcattggcacgagtcacgaactgaattttag

SEQ ID NO: 7581 - DNA, 90 bp, synthetic construct
  misc_feature 1..90: note = Synthetic
  source 1..90: mol_type = other DNA
acgagccgaagtctgtggggggaactccacttagagggcatgcccgggcgtaggcttctgagttgggatgggccccaacttggcccctga

SEQ ID NO: 7582 - DNA, 177 bp, synthetic construct
  misc_feature 1..177: note = Synthetic
  source 1..177: mol_type = other DNA
atcgcaatcactgaagctatacaggccaacattgagttattttcaggacacaaacacaagcctctgacagcgagaatcaacagtgataattccgttacgttacattcatggcttgatcgctacgaaaaaatcctggccagcagaggaatcgactcggtccgcactagcctgaggtaa

SEQ ID NO: 7583 - DNA, 177 bp, synthetic construct
  source 1..177: mol_type = other DNA
  misc_feature 1..177: note = Synthetic
atcgcaatcactgaagctatacaggccaacattgagttattttcaggacacaaacacaagcctctgacagcgagaatcaacagtgataattccgttacgttacattcgccgcttgatcgctacgaaaaaatcctggccagcagaggaatcgactcggtccgcactagcctgaggtaa

SEQ ID NO: 7584 - DNA, 87 bp, synthetic construct
  source 1..87: mol_type = other DNA
  misc_feature 1..87: note = Synthetic
ataattccgttacgttacattcgccgcttgatcgctacgaaaaaatcctggccagcagaggaatcgactcggtccgcactagcctga

SEQ ID NO: 7585 - DNA, 30 bp, synthetic construct
  misc_feature 1..30: note = Synthetic
  source 1..30: mol_type = other DNA
atggaatttccagttttaacgatacattga

SEQ ID NO: 7586 - DNA, 120 bp, synthetic construct
  misc_feature 1..120: note = Synthetic
  source 1..120: mol_type = other DNA
atatcaacaactggtaaagacgatatgttttcaaaaaatcgagataaaaaacactttgcttcatccgaaatccaagcaaagggtaaatgtgacattttcatgactcgttttttctgttga

SEQ ID NO: 7587 - DNA, 168 bp, synthetic construct
  source 1..168: mol_type = other DNA
  misc_feature 1..168: note = Synthetic
atgttgatattaacaaaagtgaatatatatatgttaataattgtattgtggttatatggctacaatttcataatgagcggaagtcagtgtccgatgattaatgacgatagatttactctgaaaagaaagtatcaaatcgacgactcggtccgcactagcctgaggtaa

SEQ ID NO: 7588 - DNA, 174 bp, synthetic construct
  source 1..174: mol_type = other DNA
  misc_feature 1..174: note = Synthetic
attattgccttgatattaacaaaagtgaatatatatatgttaataattgtattgtggttatatggctacaatttcataatgagcggaagtcagtgtccgatgattaatgacgatagatttactctgaaaagaaagtatcaaatcgacgactcggtccgcactagcctgaggtaa

SEQ ID NO: 7589 - DNA, 168 bp, synthetic construct
  source 1..168: mol_type = other DNA
  misc_feature 1..168: note = Synthetic
atgttgatattaacaaaagtgaatatatatatgttaataattgtattgtggttatacggctacaattttataattagtgaaagtcagtgtccgatgatcaatgacgatagctttactctgaaaagaaagtatcaaatcgacgactcggtccgcactagcctgaggtaa

SEQ ID NO: 7590 - DNA, 171 bp, synthetic construct
  misc_feature 1..171: note = Synthetic
  source 1..171: mol_type = other DNA
attgccttgatattaacaaaagtgaatatatatatgttaataattgtattgtggttatacggctacaattttataattagtgaaagtcagtgtccgatgatcaatgacgatagctttactctgaaaagaaagtatcaaatcgacgactcggtccgcactagcctgaggtaa

SEQ ID NO: 7591 - DNA, 198 bp, synthetic construct
  misc_feature 1..198: note = Synthetic
  source 1..198: mol_type = other DNA
atgctgccttcattagatgcccgactacattttattaatgttggatacagacacttaacctatttaaaatatttacatcacagagcaaatcaatgcagtcactcggagattatcaaaaaaaaaatcaaactactcacttcaattttatcgaaactgttaaatgtgaatggaattttagaacgactcggtccgcactag

SEQ ID NO: 7592 - DNA, 15 bp, synthetic construct
  source 1..15: mol_type = other DNA
  misc_feature 1..15: note = Synthetic
atgattccctattaa

SEQ ID NO: 7593 - DNA, 48 bp, synthetic construct
  misc_feature 1..48: note = Synthetic
  source 1..48: mol_type = other DNA
ttgagcatcgccgccagaagcacgtcgggcgtcatccccgagtcatag

SEQ ID NO: 7594 - DNA, 42 bp, synthetic construct
  misc_feature 1..42: note = Synthetic
  source 1..42: mol_type = other DNA
atgctggccagaagcacgtcgggcgtcatccccgagtcatag

SEQ ID NO: 7595 - DNA, 48 bp, synthetic construct
  source 1..48: mol_type = other DNA
  misc_feature 1..48: note = Synthetic
ttgagcgtcctggccagaagcacgtcgggcgtcatccccgagtcatag

SEQ ID NO: 7596 - DNA, 189 bp, synthetic construct
  misc_feature 1..189: note = Synthetic
  source 1..189: mol_type = other DNA
attatcacattttatcgaacaatgttatatactatgagaattaaatcagcaattattttttctcttgaggacgtaacacattaccagttcaaaatactaatatttttaacaaaggatgaactaaatataagcgatgaagaaaaacaaatactagatagagtcgactcggtccgcactagcctgaggtaa

SEQ ID NO: 7597 - DNA, 168 bp, synthetic construct
  misc_feature 1..168: note = Synthetic
  source 1..168: mol_type = other DNA
atgaaacaatatattgtcctggcatgcatgtgcctagtggcagctgctatgcctactagtcttcaacaatcctcatcctcgtgtactgaagaagaaaacaaacatcatatgggaatcgatgttattatcaaagtcacaaacgactcggtccgcactagcctgaggtaa

SEQ ID NO: 7598 - DNA, 60 bp, synthetic construct
  source 1..60: mol_type = other DNA
  misc_feature 1..60: note = Synthetic
atcatatgggaatcgatgttattatcaaagtcacaaacgactcggtccgcactagcctga

SEQ ID NO: 7599 - DNA, 84 bp, synthetic construct
  misc_feature 1..84: note = Synthetic
  source 1..84: mol_type = other DNA
atgttgcacgcacaaacatatattatcatgcaggaacatccagactacttgcagttggacacgactcggtccgcactagcctga

SEQ ID NO: 7600 - DNA, 36 bp, synthetic construct
  source 1..36: mol_type = other DNA
  misc_feature 1..36: note = Synthetic
gtggaattcatatcggagaagttaatggagaattaa

SEQ ID NO: 7601 - DNA, 27 bp, synthetic construct
  misc_feature 1..27: note = Synthetic
  source 1..27: mol_type = other DNA
attgcaattgtgaagaacgtttcttag

SEQ ID NO: 7602 - DNA, 168 bp, synthetic construct
  source 1..168: mol_type = other DNA
  misc_feature 1..168: note = Synthetic
atgtcatttcaacggggcaaccggagcatccggccggcgatgtccgaggcgttgcagaatgacttcagctacaacccgcgaccgcctccgccgagcgcagaagagattgacttcttctgcgtggacatgcgcaaagtactcgactcggtccgcactagcctgaggtaa

SEQ ID NO: 7603 - DNA, 129 bp, synthetic construct
  misc_feature 1..129: note = Synthetic
  source 1..129: mol_type = other DNA
atgtccgaggcgttgcagaatgacttcagctacaacccgcgaccgcctccgccgagcgcagaagagattgacttcttctgcgtggacatgcgcaaagtactcgactcggtccgcactagcctgaggtaa

SEQ ID NO: 7604 - DNA, 168 bp, synthetic construct
  source 1..168: mol_type = other DNA
  misc_feature 1..168: note = Synthetic
atgcttacgatgttaaccgaccgaatcgactctcaactggtactgtcgcggctgccgcgctcccgttttcagcgattctgggagacccctacgttaataatgaaggaagagtccgcaccgtcatcaggctccatcatcctcgactcggtccgcactagcctgaggtaa

SEQ ID NO: 7605 - DNA, 171 bp, synthetic construct
  misc_feature 1..171: note = Synthetic
  source 1..171: mol_type = other DNA
acggcccttacgatgttaaccgaccgaatcgactctcaactggtactgtcgcggctgccgcgctcccgttttcagcgattctgggagacccctacgttaataatgaaggaagagtccgcaccgtcatcaggctccatcatcctcgactcggtccgcactagcctgaggtaa

SEQ ID NO: 7606 - DNA, 177 bp, synthetic construct
  source 1..177: mol_type = other DNA
  misc_feature 1..177: note = Synthetic
ttgctacttagtccggcgaagtcgagaaggtcacgaatgaaccaggcgataatggcgcacatcgttgcgtcgattactgtttttgtaaacgcaccgccattatatctgccgcgaaggtacgccattgcaaacgcaaggattgccccgatgccttgttcccgactcggtccgcactag

SEQ ID NO: 7607 - DNA, 48 bp, synthetic construct
  misc_feature 1..48: note = Synthetic
  source 1..48: mol_type = other DNA
attctatcaatgcagaggttttgccagaacccattggagctcttataa

SEQ ID NO: 7608 - DNA, 18 bp, synthetic construct
  source 1..18: mol_type = other DNA
  misc_feature 1..18: note = Synthetic
atctcgctcgcgtggtaa

SEQ ID NO: 7609 - DNA, 24 bp, synthetic construct
  source 1..24: mol_type = other DNA
  misc_feature 1..24: note = Synthetic
atgggagaaatatatacagaatga

SEQ ID NO: 7610 - DNA, 15 bp, synthetic construct
  source 1..15: mol_type = other DNA
  misc_feature 1..15: note = Synthetic
atggcgttcgtgtag

SEQ ID NO: 7611 - DNA, 24 bp, synthetic construct
  misc_feature 1..24: note = Synthetic
  source 1..24: mol_type = other DNA
atgaaacaacccctcagccgctga

SEQ ID NO: 7612 - DNA, 111 bp, synthetic construct
  source 1..111: mol_type = other DNA
  misc_feature 1..111: note = Synthetic
attatgctctatatattgatctttttgactatcctcactctgcagctatcttggcagagagtgttcagatgcatatggatagatattttaaatatagggataaacttgtag

SEQ ID NO: 7613 - DNA, 60 bp, synthetic construct
  source 1..60: mol_type = other DNA
  misc_feature 1..60: note = Synthetic
atggttatgttctatatgttgatctttttgactatcctcactctgaagctatcttggtag

SEQ ID NO: 7614 - DNA, 54 bp, synthetic construct
  misc_feature 1..54: note = Synthetic
  source 1..54: mol_type = other DNA
ttgatagtccttttccaagtccgcattatgtacctattctatgaataccattaa

SEQ ID NO: 7615 - DNA, 63 bp, synthetic construct
  source 1..63: mol_type = other DNA
  misc_feature 1..63: note = Synthetic
atgtattctttgatagtccttttccaagtccgcattatgtacctattctgccaataccattaa

SEQ ID NO: 7616 - DNA, 36 bp, synthetic construct
  source 1..36: mol_type = other DNA
  misc_feature 1..36: note = Synthetic
acgccacgagtgacgacgacgctgcttggggcataa

SEQ ID NO: 7617 - DNA, 24 bp, synthetic construct
  source 1..24: mol_type = other DNA
  misc_feature 1..24: note = Synthetic
acgaccgtattcacaaagctgtga

SEQ ID NO: 7618 - DNA, 24 bp, synthetic construct
  source 1..24: mol_type = other DNA
  misc_feature 1..24: note = Synthetic
atgaccgaatccacaaagcagtaa

SEQ ID NO: 7619 - DNA, 78 bp, synthetic construct
  misc_feature 1..78: note = Synthetic
  source 1..78: mol_type = other DNA
ttgaccctacctttaccattgagacaaccacgctcccccaggatgctgtctccagcgactcggtccgcactagcctga

SEQ ID NO: 7620 - DNA, 87 bp, synthetic construct
  misc_feature 1..87: note = Synthetic
  source 1..87: mol_type = other DNA
ttggcagatacagacaaggtggccagacttatgcaagatgatatcaacagctatatggcaaggctggaagatgtagacaggaattag

SEQ ID NO: 7621 - DNA, 183 bp, synthetic construct
  misc_feature 1..183: note = Synthetic
  source 1..183: mol_type = other DNA
atgcaagccagcaatatgtctgcttctcattctctctctcagtctccaaatctacatcctgattttacttataagcgacaagaagctctctggaagcaacttgtctccgcagaacacagaaaattctgctcttgtggagactacacccaacatttcgactcggtccgcactagcctgaggtaa

SEQ ID NO: 7622 - DNA, 120 bp, synthetic construct
  misc_feature 1..120: note = Synthetic
  source 1..120: mol_type = other DNA
ctgattttacttataagcgacaagaagctctctggaagcaacttgtctccgcagaacacagaaaattctgctcttgtggagactacacccaacatttcgactcggtccgcactagcctga

SEQ ID NO: 7623 - DNA, 183 bp, synthetic construct
  source 1..183: mol_type = other DNA
  misc_feature 1..183: note = Synthetic
atgcaagccagcaatgcctctgcttctcattctctctctcagtctccaaatctacatcctgattttacttataagcgacaagaagctctctggaagcaacttgtctccgcagaacacagaaaattctgctcttgtggagactacacccaacatttcgactcggtccgcactagcctgaggtaa

SEQ ID NO: 7624 - DNA, 159 bp, synthetic construct
  source 1..159: mol_type = other DNA
  misc_feature 1..159: note = Synthetic
ctgcttctcattctctctctcagtctccaaatctacatcctgattttacttataagcgacaagaagctctctggaagcaacttgtctccgcagaacacagaaaattctgctcttgtggagactacacccaacatttcgactcggtccgcactagcctga

SEQ ID NO: 7625 - DNA, 168 bp, synthetic construct
  source 1..168: mol_type = other DNA
  misc_feature 1..168: note = Synthetic
atggagagggatgttacgattgccttgtttacaatttaccttgtctgtatattctggggtatctcatctattatctggtttatgtacttaactatccgtttgtacatgatccggtcagagatttataaaaagatctctatcgactcggtccgcactagcctgaggtaa

SEQ ID NO: 7626 - DNA, 87 bp, synthetic construct
  misc_feature 1..87: note = Synthetic
  source 1..87: mol_type = other DNA
atgtacttaactatccgtttgtacatgatccggtcagagatttataaaaagatctctatcgactcggtccgcactagcctgaggtaa

SEQ ID NO: 7627 - DNA, 168 bp, synthetic construct
  misc_feature 1..168: note = Synthetic
  source 1..168: mol_type = other DNA
atggagggcaatggctccaacccagagccaaagcagagcaacaacccgatggtcgttgacccgcctggcacaacaggtccgaccacatcccacgttgttgttgctaatccggagcaacccaatggggccgcacagcgcctggagttggctcgactcggtccgcactag

SEQ ID NO: 7628 - DNA, 168 bp, synthetic construct
  misc_feature 1..168: note = Synthetic
  source 1..168: mol_type = other DNA
atggagggcagccgctccaacccagagccaaagcagagcaacaacccgatggtcgttgacccgcctggcacaacaggtccgaccacatcccacgttgttgttgctaatccggagcaacccaatggggccgcacagcgcctggagttggctcgactcggtccgcactag

SEQ ID NO: 7629 - DNA, 18 bp, synthetic construct
  misc_feature 1..18: note = Synthetic
  source 1..18: mol_type = other DNA
atgttccaaattacgtga

SEQ ID NO: 7630 - DNA, 63 bp, synthetic construct
  source 1..63: mol_type = other DNA
  misc_feature 1..63: note = Synthetic
atgtcagtcttttcgggtggtttacagaccggagctgccaaccgcagcccacgaacgacgtga

SEQ ID NO: 7631 - DNA, 33 bp, synthetic construct
  misc_feature 1..33: note = Synthetic
  source 1..33: mol_type = other DNA
gtgaacaagccgactcggtccgcactagcctga

SEQ ID NO: 7632 - DNA, 21 bp, synthetic construct
  source 1..21: mol_type = other DNA
  misc_feature 1..21: note = Synthetic
atgtatgtgcctcggagttaa

SEQ ID NO: 7633 - DNA, 36 bp, synthetic construct
  misc_feature 1..36: note = Synthetic
  source 1..36: mol_type = other DNA
atgaaatcacagacgactcggtccgcactagcctga

SEQ ID NO: 7634 - DNA, 156 bp, synthetic construct
  source 1..156: mol_type = other DNA
  misc_feature 1..156: note = Synthetic
ctgatgctcacgcccgtggtgtggtcggcacgctgggaccaaatgttcagctacctggccaagctgggcacctatcatcattaccgggttgacaacggcacgctcagcgtcatcctcaacagcaccaccgcgacgttccagagcagggttgcttga

SEQ ID NO: 7635 - DNA, 174 bp, synthetic construct
  misc_feature 1..174: note = Synthetic
  source 1..174: mol_type = other DNA
atgcccgctacttcctactcacctattctcagtgcggggaactcgacccctggaaagttagcaatcaccttggagaacttcgaggagaatgcatcgtcgcacgagaagcccatgctgatggtggaactcatctacacgcttttgtcgacttcggcacgactcggtccgcactag

SEQ ID NO: 7636 - DNA, 192 bp, synthetic construct
  misc_feature 1..192: note = Synthetic
  source 1..192: mol_type = other DNA
atgccacattccactgcaatgcccgctacttcctactcacctattctcagtgcggggaactcgacccctggaaagttagcaatcaccttggagaacttcgaggagaatgcatcgtcgcacgagaagcccatgctgatggtggaactcatctacacgcttttgtcgacttcggcacgactcggtccgcactag

SEQ ID NO: 7637 - DNA, 183 bp, synthetic construct
  source 1..183: mol_type = other DNA
  misc_feature 1..183: note = Synthetic
ctggctctaggagagatggcgtgcctccgggtgttcctggcggtgttcgcgctgtgcggaagcgtgcactcggcgcaatggatcggcgagcgcgacttctgcatggcccacgcgcaggacgtcttcgcgcggctgcaagtgtggatgcgcatcgacgactcggtccgcactagcctgaggtaa

SEQ ID NO: 7638 - DNA, 207 bp, synthetic construct
  misc_feature 1..207: note = Synthetic
  source 1..207: mol_type = other DNA
ctgattcacgactccttcggtaccattccggctgacgctgcgaacctgttcaaagcagtgcgcgaaactatggttgacacatatgagtcttgtgatgtactggctgatttctacgaccagttcgctgaccagttgcacgagtctcaattggacaaaatgccagcacttccggctaaaggcgactcggtccgcactagcctgaggtaa

SEQ ID NO: 7639 - DNA, 144 bp, synthetic construct
  misc_feature 1..144: note = Synthetic
  source 1..144: mol_type = other DNA
atcttttgcaaagctttgcacggcgtcaccaagaaaaaacacaaaaagactctattttttattagtatccttctcctgtcatttttactcatacagatcccctatatagctatcctcgactcggtccgcactagcctgaggtaa

SEQ ID NO: 7640 - DNA, 213 bp, synthetic construct
  misc_feature 1..213: note = Synthetic
  source 1..213: mol_type = other DNA
atgcctgaggtgtacaaagcgattaacattgcgcaaaacaccgcatggaaaatcaacaagaaagtcctagcggtcgccaacgtaatcaccaagtggaagcattgtccggtcgaggacatccctgcgattgagcgtgaagaactcccgatgaaaccggaagacatcgacatgaatcctgaggctctcgactcggtccgcactagcctgaggtaa

SEQ ID NO: 7641 - DNA, 186 bp, synthetic construct
  source 1..186: mol_type = other DNA
  misc_feature 1..186: note = Synthetic
atgcttagggcggccagacgtgcagcttcgggcgccagcgccggcaggtcccgcaggcaagcagccgctgtcgcagcggcgactattgccgacatggcccaatcgcgaagaggcaatgtatactgggtgcgtgacgctgccaccggtcaacgtgtacccgtgcgcacccgactcggtccgcactag

SEQ ID NO: 7642 - DNA, 168 bp, synthetic construct
  source 1..168: mol_type = other DNA
  misc_feature 1..168: note = Synthetic
atggatatcttcagggaaatcgcatcttctatgaaaggagagaatgtattcatttctccaccgtcaatctcgtcagtattgacaatactgtattatggagctaatggatccactgctgaacagctatcaaaatatgtagacgactcggtccgcactagcctgaggtaa

SEQ ID NO: 7643 - DNA, 174 bp, synthetic construct
  misc_feature 1..174: note = Synthetic
  source 1..174: mol_type = other DNA
attgccgccgatatcttcagggaaatcgcatcttctatgaaaggagagaatgtattcatttctccaccgtcaatctcgtcagtattgacaatactgtattatggagctaatggatccactgctgaacagctatcaaaatatgtagacgactcggtccgcactagcctgaggtaa

SEQ ID NO: 7644 - DNA, 30 bp, synthetic construct
  source 1..30: mol_type = other DNA
  misc_feature 1..30: note = Synthetic
atgattattacttttatatccgcagtgtga

SEQ ID NO: 7645 - DNA, 42 bp, synthetic construct
  misc_feature 1..42: note = Synthetic
  source 1..42: mol_type = other DNA
atgatgcggaaggttacctggattttttcaaaggcaagataa

SEQ ID NO: 7646 - DNA, 30 bp, synthetic construct
  misc_feature 1..30: note = Synthetic
  source 1..30: mol_type = other DNA
atgattgccacttttatatccgcagtgtga

SEQ ID NO: 7647 - DNA, 12 bp, synthetic construct
  source 1..12: mol_type = other DNA
  misc_feature 1..12: note = Synthetic
atgaaaagttaa

SEQ ID NO: 7648 - DNA, 168 bp, synthetic construct
  source 1..168: mol_type = other DNA
  misc_feature 1..168: note = Synthetic
atgtttgtcattaaacgaaatggatacaaggaaaatgtcatgtttgataaaatcacgtctcgtattagaaaattatgttatggcttaaacacggatcatatagatcctattaaaatagctatgaaggttattcaaggaatcgactcggtccgcactagcctgaggtaa

SEQ ID NO: 7649 - DNA, 27 bp, synthetic construct
  misc_feature 1..27: note = Synthetic
  source 1..27: mol_type = other DNA
atgtcgtaccgactcggtccgcactag

SEQ ID NO: 7650 - DNA, 18 bp, synthetic construct
  misc_feature 1..18: note = Synthetic
  source 1..18: mol_type = other DNA
atgccagggacatactaa

SEQ ID NO: 7651 - DNA, 18 bp, synthetic construct
  misc_feature 1..18: note = Synthetic
  source 1..18: mol_type = other DNA
atgccacgggcatactaa

SEQ ID NO: 7652 - DNA, 39 bp, synthetic construct
  source 1..39: mol_type = other DNA
  misc_feature 1..39: note = Synthetic
atttttccttcagtaacgactcggtccgcactagcctga

SEQ ID NO: 7653 - DNA, 42 bp, synthetic construct
  source 1..42: mol_type = other DNA
  misc_feature 1..42: note = Synthetic
atgaacgccttgcaaacgacgactcggtccgcactagcctga

SEQ ID NO: 7654 - DNA, 216 bp, synthetic construct
  misc_feature 1..216: note = Synthetic
  source 1..216: mol_type = other DNA
atgccctacatccttccatcgcgcctacccccggctatcgtggctacacctaccgccccagaagacgagcgactacccgacgccgaaccaccactggaacccgccgccgccgtcgccgtcgccagcccgtgctggccccgatttccgtgcgcagggtggctcgcgaaggaggcaggaccctggtgctgcgactcggtccgcactagcctgaggtaa

SEQ ID NO: 7655 - DNA, 153 bp, synthetic construct
  misc_feature 1..153: note = Synthetic
  source 1..153: mol_type = other DNA
atgggggcgggaagtagcgcgttaacgaccgccagggcctcctgcagccgcggctccgcctccgagggcggaacggccgcgcggatcatctcatattgttcctcggggcgcgctccccagccacacgactcggtccgcactagcctgaggtaa

SEQ ID NO: 7656 - DNA, 66 bp, synthetic construct
  source 1..66: mol_type = other DNA
  misc_feature 1..66: note = Synthetic
atgatgcggatctttatgatacgtacaatgataatgaatcatctactgtgtcaccaacaactgtag

SEQ ID NO: 7657 - DNA, 153 bp, synthetic construct
  source 1..153: mol_type = other DNA
  misc_feature 1..153: note = Synthetic
ctgtctttcagaccttgttggacatcccgtacaatcaagatgttcctgtatgttgtttgcagtctggcggtttgctttcgaggactattaagcctttctctgcaatcgtctccaaatttgtgccctggagtgattcgactcggtccgcactag

SEQ ID NO: 7658 - DNA, 153 bp, synthetic construct
  source 1..153: mol_type = other DNA
  misc_feature 1..153: note = Synthetic
ctgtctttcagaccttgttggacatcccgtacaatcaagatgttcctgtatgttgtttgcagtctggcggtttgctttcgaggactattaagcctttctctgcaatcgtctccaaatctctgccctggagtgattcgactcggtccgcactag

SEQ ID NO: 7659 - DNA, 216 bp, synthetic construct
  misc_feature 1..216: note = Synthetic
  source 1..216: mol_type = other DNA
ctggcaactttcccggcgagcctggctaaccgtgaccagaacgaagtgaacgaaatccgtcgccagtgggttctggcttttcgggaaaacgggatcaccacgatggaacaggttaacgcaggaatgcgcgtagcccgtcggcagaatcgaccatttctgccatcacccgggcagtttgttgcatggtgccgggaagaacgactcggtccgcactag

SEQ ID NO: 7660 - DNA, 216 bp, synthetic construct
  source 1..216: mol_type = other DNA
  misc_feature 1..216: note = Synthetic
ctggcaactttcccggcgagcctggctaaccgtgaccagaacgaagtgaacgaaatccgtcgccagtgggttctggcttttcgggaaaacgggatcaccacggccgaacaggttaacgcaggaatgcgcgtagcccgtcggcagaatcgaccatttctgccatcacccgggcagtttgttgcatggtgccgggaagaacgactcggtccgcactag

SEQ ID NO: 7661 - DNA, 210 bp, synthetic construct
  misc_feature 1..210: note = Synthetic
  source 1..210: mol_type = other DNA
ttgaggccgcgtgtggcccctggactgtgtttctgtaaggtcatgtctgtccggacattttgtcaggttcacttgggagctgtcccaccagagcgacgcgggtctcaggtgtctgcgggacaattgtcggattttgatatgtgtgcccaatctctcatagactttctaaaggttagggtcggcgactcggtccgcactagcctgaggtaa

SEQ ID NO: 7662 - DNA, 210 bp, synthetic construct
  source 1..210: mol_type = other DNA
  misc_feature 1..210: note = Synthetic
ttgaggccgcgtgtggcccctggactgtgtttctgtaaggtcgcctctgtccggacattttgtcaggttcacttgggagctgtcccaccagagcgacgcgggtctcaggtgtctgcgggacaattgtcggattttgatatgtgtgcccaatctctcatagactttctaaaggttagggtcggcgactcggtccgcactagcctgaggtaa

SEQ ID NO: 7663 - DNA, 12 bp, synthetic construct
  source 1..12: mol_type = other DNA
  misc_feature 1..12: note = Synthetic
atgtacgattaa

SEQ ID NO: 7664 - DNA, 168 bp, synthetic construct
  misc_feature 1..168: note = Synthetic
  source 1..168: mol_type = other DNA
atggatcccaaaagctactactgcaatgaggacctgaggagcgatggtggagaaaaatcaccaggaggagacctctacaagggaatcatcctggtgtcgactgtgatatcccttatcattgctataatctctctcgcattcgactcggtccgcactagcctgaggtaa

SEQ ID NO: 7665 - DNA, 192 bp, synthetic construct
  misc_feature 1..192: note = Synthetic
  source 1..192: mol_type = other DNA
ctgtgctcccaaagtttaagaaaaatgagacacctgcacctcctgtcttcaactgtgcctattgacatggccgcattattgctggaggactatgtaaatacaatattggaggacgaactgcatttatctccgtttgagctgggacccacacttcaggacctatacgactcggtccgcactagcctgaggtaa

SEQ ID NO: 7666 - DNA, 192 bp, synthetic construct
  misc_feature 1..192: note = Synthetic
  source 1..192: mol_type = other DNA
ctgtgctcccaaagtttaagaaaagccagacacctgcacctcctgtcttcaactgtgcctattgacatggccgcattattgctggaggactatgtaaatacaatattggaggacgaactgcatttatctccgtttgagctgggacccacacttcaggacctatacgactcggtccgcactagcctgaggtaa

SEQ ID NO: 7667 - DNA, 15 bp, synthetic construct
  source 1..15: mol_type = other DNA
  misc_feature 1..15: note = Synthetic
atgttacgtttctga

SEQ ID NO: 7668 - DNA, 42 bp, synthetic construct
  source 1..42: mol_type = other DNA
  misc_feature 1..42: note = Synthetic
attgtgtattttttcgactcggtccgcactagcctgaggtaa

SEQ ID NO: 7669 - DNA, 15 bp, synthetic construct
  source 1..15: mol_type = other DNA
  misc_feature 1..15: note = Synthetic
ttgctgttcctttag

SEQ ID NO: 7670 - DNA, 42 bp, synthetic construct
  source 1..42: mol_type = other DNA
  misc_feature 1..42: note = Synthetic
atgtacaggcccaggaacaacaaaattaccaccagatattag

SEQ ID NO: 7671 - DNA, 30 bp, synthetic construct
  source 1..30: mol_type = other DNA
  misc_feature 1..30: note = Synthetic
atgaaatcgactcggtccgcactagcctga

SEQ ID NO: 7672 - DNA, 15 bp, synthetic construct
  misc_feature 1..15: note = Synthetic
  source 1..15: mol_type = other DNA
atggtgaggaaatag

SEQ ID NO: 7673 - DNA, 66 bp, synthetic construct
  misc_feature 1..66: note = Synthetic
  source 1..66: mol_type = other DNA
aagaaaacaaacatcatatgggaatcgatgttattatcaaagtcgactcggtccgcactagcctga

SEQ ID NO: 7674 - DNA, 60 bp, synthetic construct
  misc_feature 1..60: note = Synthetic
  source 1..60: mol_type = other DNA
atgacatatacaacgaggccgttcacggagacaacgatcacgtggcacatcggtagataa

SEQ ID NO: 7675 - DNA, 219 bp, synthetic construct
  misc_feature 1..219: note = Synthetic
  source 1..219: mol_type = other DNA
attacaacgaccaacaaaatggcaactatggaagagttacagagagaaattaatgcccatgagggacagcttgtggtggctaggcaaaaggtgaaggacgcagaaaggcaatacgaaaaagaccctgatgatctcaataagagggcactacatgaccgtgaaagtgttgctgcctctatccagtcaaagatagatgcgactcggtccgcactagcctga

SEQ ID NO: 7676 - DNA, 192 bp, synthetic construct
  source 1..192: mol_type = other DNA
  misc_feature 1..192: note = Synthetic
atggaagagttacagagagaaattaatgcccatgagggacagcttgtggtggctaggcaaaaggtgaaggacgcagaaaggcaatacgaaaaagaccctgatgatctcaataagagggcactacatgaccgtgaaagtgttgctgcctctatccagtcaaagatagatgcgactcggtccgcactagcctga

SEQ ID NO: 7677 - DNA, 75 bp, synthetic construct
  source 1..75: mol_type = other DNA
  misc_feature 1..75: note = Synthetic
atgaagactccagattcaataataattgaaaggctctctatcttatgcaatagttatacgttttggctgtattag

SEQ ID NO: 7678 - DNA, 72 bp, synthetic construct
  source 1..72: mol_type = other DNA
  misc_feature 1..72: note = Synthetic
atgaagcaatccttcaacaccgacttaggttcaattttctcatcatttactgttgtaattcaatcttactaa

SEQ ID NO: 7679 - DNA, 30 bp, synthetic construct
  misc_feature 1..30: note = Synthetic
  source 1..30: mol_type = other DNA
atgacattgatccatacgagaacgggctag

SEQ ID NO: 7680 - DNA, 210 bp, synthetic construct
  misc_feature 1..210: note = Synthetic
  source 1..210: mol_type = other DNA
ctgttccacactacgcagtccgaagagggatgtagtcctttaatgccaaatctagctgctgcggttccctgcagaccgttcgtcaacctagcgcaggagacgggaacgacaaacctgctggtagcgggcagtcgaccgacgaataccggcgtgagaaattttgtgataaatttaaccgtcagcgactcggtccgcactagcctgaggtaa

SEQ ID NO: 7681 - DNA, 216 bp, synthetic construct
  misc_feature 1..216: note = Synthetic
  source 1..216: mol_type = other DNA
ctggacaagatcttcgaggtcacgggcgtgacgcgcaacctgcgtccgcagaccgtgaagaactacgcgaagaacaacagcaaccagctcacctgggagaacttcctcgcgcacatgcgcgcgcgcaagcgcgccgcgcagatcccggagttcggccacgagtacgtgttctcgcccgcgcgcttcgccgactcggtccgcactagcctgaggtaa

SEQ ID NO: 7682 - DNA, 216 bp, synthetic construct
  misc_feature 1..216: note = Synthetic
  source 1..216: mol_type = other DNA
atctatgaccaccttactcccatgtcagattggccgccttacggcctccgcgatttggcggtggccctagagccagttgtgttcacgcccatggagaagaaagtcatcgtctggggcgctgacaccgctgcgtgcggagacatcataaggggattacctgtttcggccaggttgggcaatgagatcttgctcgcgactcggtccgcactagcctga

SEQ ID NO: 7683 - DNA, 195 bp, synthetic construct
  source 1..195: mol_type = other DNA
  misc_feature 1..195: note = Synthetic
atgtcagattggccgccttacggcctccgcgatttggcggtggccctagagccagttgtgttcacgcccatggagaagaaagtcatcgtctggggcgctgacaccgctgcgtgcggagacatcataaggggattacctgtttcggccaggttgggcaatgagatcttgctcgcgactcggtccgcactagcctga

SEQ ID NO: 7684 - DNA, 135 bp, synthetic construct
  misc_feature 1..135: note = Synthetic
  source 1..135: mol_type = other DNA
ctgcgggacatgctcaaagtcaacccgtgcgtcaccgtgcagatccgcgaggggagttgcgcgcgcccctgcaggcggcccagctcctcggagccttgctgcgtcgtggcgcgcacgcgactcggtccgcactag

SEQ ID NO: 7685 - DNA, 90 bp, synthetic construct
  source 1..90: mol_type = other DNA
  misc_feature 1..90: note = Synthetic
atgtctgggatagtaaaatctatcatattgagcggaccatctggtttaggaaagacagccatagccacgactcggtccgcactagcctga

SEQ ID NO: 7686 - DNA, 48 bp, synthetic construct
  misc_feature 1..48: note = Synthetic
  source 1..48: mol_type = other DNA
atcatgctttggttgttaatgtactactctggtgtgtggtgcttatag

SEQ ID NO: 7687 - DNA, 36 bp, synthetic construct
  misc_feature 1..36: note = Synthetic
  source 1..36: mol_type = other DNA
atgctgatacctataaaattcctacacaggcagtaa

SEQ ID NO: 7688 - DNA, 168 bp, synthetic construct
  source 1..168: mol_type = other DNA
  misc_feature 1..168: note = Synthetic
atgagctgcaccccgtgtcgcccacaaaaaaggctaacaaggccaagaagtcaagttccccgggtacaaactctggcaacagaagtaaaaaaaggaggggtagaagtactagccgcagtaccactgtcagaagaaacagacgactcggtccgcactagcctgaggtaa

SEQ ID NO: 7689 - DNA, 99 bp, synthetic construct
  source 1..99: mol_type = other DNA
  misc_feature 1..99: note = Synthetic
aggggtcgagtcgtcaataagtgtgaggttcaggctcgtatgcctgaatttcaaggttcgacctgtaccatggcgatacgcgatgacaacaggatttag

SEQ ID NO: 7690 - DNA, 168 bp, synthetic construct
  misc_feature 1..168: note = Synthetic
  source 1..168: mol_type = other DNA
atgactgaccaccacctggacctcgagatggacggccaggcctccgagcagcgcatcctgcaactgcgcgtccgtcagcagcaggagcgggccgccaaggagctcctcgatgccatcaacatccaccagtgcaagaagggcgactcggtccgcactagcctgaggtaa

SEQ ID NO: 7691 - DNA, 54 bp, synthetic construct
  source 1..54: mol_type = other DNA
  misc_feature 1..54: note = Synthetic
atgccatcaacatccaccagtgcaagaagggcgactcggtccgcactagcctga

SEQ ID NO: 7692 - DNA, 153 bp, synthetic construct
  source 1..153: mol_type = other DNA
  misc_feature 1..153: note = Synthetic
ctggacctcgagatggacggccaggcctccgagcagcgcatcctgcaactgcgcgtccgtcagcagcaggagcgggccgccaaggagctcctcgatgccatcaacatccaccagtgcaagaagggcgactcggtccgcactagcctgaggtaa

SEQ ID NO: 7693 - DNA, 168 bp, synthetic construct
  source 1..168: mol_type = other DNA
  misc_feature 1..168: note = Synthetic
atgactgacaaccacctggaccttgagatggacggccaggcctccgagcaacgcatcctgcaactgcgcgtccgtcagcagcaggagcgaaccgccaaggagctccttgatgccatcaacatccaccagtgcaagaaaggcgactcggtccgcactagcctgaggtaa

SEQ ID NO: 7694 - DNA, 153 bp, synthetic construct
  misc_feature 1..153: note = Synthetic
  source 1..153: mol_type = other DNA
ctggaccttgagatggacggccaggcctccgagcaacgcatcctgcaactgcgcgtccgtcagcagcaggagcgaaccgccaaggagctccttgatgccatcaacatccaccagtgcaagaaaggcgactcggtccgcactagcctgaggtaa

SEQ ID NO: 7695 - DNA, 54 bp, synthetic construct
  source 1..54: mol_type = other DNA
  misc_feature 1..54: note = Synthetic
atgccatcaacatccaccagtgcaagaaaggcgactcggtccgcactagcctga

SEQ ID NO: 7696 - DNA, 42 bp, synthetic construct
  misc_feature 1..42: note = Synthetic
  source 1..42: mol_type = other DNA
atgcggaattttattgtgaatccagtaatacatggactctga

SEQ ID NO: 7697 - DNA, 18 bp, synthetic construct
  misc_feature 1..18: note = Synthetic
  source 1..18: mol_type = other DNA
atgtggacgttacggtga

SEQ ID NO: 7698 - DNA, 132 bp, synthetic construct
  misc_feature 1..132: note = Synthetic
  source 1..132: mol_type = other DNA
atggtccgcgtcccagtgattgcgctgctgaatggcttcggccttcgccttccaaggttcaatcacaactactctccattgtggacgcatgatcttctcgagtgtactccggtacccgaagtagggcactag

SEQ ID NO: 7699 - DNA, 72 bp, synthetic construct
  source 1..72: mol_type = other DNA
  misc_feature 1..72: note = Synthetic
gtggcgagaggcgagcggctgtttacaaaattgaggatttgttgcaggacgtgggtgggaatgaacctttga

SEQ ID NO: 7700 - DNA, 48 bp, synthetic construct
  misc_feature 1..48: note = Synthetic
  source 1..48: mol_type = other DNA
attaatgtcgaaatgattttttttataaaaaaaatattgaatatataa

SEQ ID NO: 7701 - DNA, 87 bp, synthetic construct
  misc_feature 1..87: note = Synthetic
  source 1..87: mol_type = other DNA
atggaacgcgtgatattttctatcaatggggaaattattacggcgtctccgtataattttttaaacacattcaggatcaccatctaa

SEQ ID NO: 7702 - DNA, 57 bp, synthetic construct
  source 1..57: mol_type = other DNA
  misc_feature 1..57: note = Synthetic
atgacgctgcatccccaacagcctttgaccaccgtaccgtcgagccacacggagtag

SEQ ID NO: 7703 - DNA, 162 bp, synthetic construct
  source 1..162: mol_type = other DNA
  misc_feature 1..162: note = Synthetic
atgcaggccaattgggccaaagtcatcttggtcctattcctctttgcaggggttgatgccgagactcacgtgtctggggcagcagtcggccggagtaccgccggcttggctaacctcttttcttctgggtctaagcagaatttacgactcggtccgcactag

SEQ ID NO: 7704 - DNA, 183 bp, synthetic construct
  source 1..183: mol_type = other DNA
  misc_feature 1..183: note = Synthetic
gtgggggtggcctatttcagcatgcaggccaattgggccaaagtcatcttggtcctattcctctttgcaggggttgatgccgagactcacgtgtctggggcagcagtcggccggagtaccgccggcttggctaacctcttttcttctgggtctgcccagaatttacgactcggtccgcactag

SEQ ID NO: 7705 - DNA, 99 bp, synthetic construct
  misc_feature 1..99: note = Synthetic
  source 1..99: mol_type = other DNA
atgaatttagctttaaatgtccttggggtattggggtgttatgggaaattgttttcgacgattatctttgtttggacagccgactcaggcaaagtatga

SEQ ID NO: 7706 - DNA, 192 bp, synthetic construct
  misc_feature 1..192: note = Synthetic
  source 1..192: mol_type = other DNA
atgtccttggggtattggggtgttatgggaaattgttttcgacgattatctttgtttggacagccgactcaggcaaagtatgaaatgttgtgctcttccgacgatttagagaccgaagagctgacgttttttctggatatgacgtataaagattttggagtttacgactcggtccgcactagcctgaggtaa

SEQ ID NO: 7707 - DNA, 33 bp, synthetic construct
  misc_feature 1..33: note = Synthetic
  source 1..33: mol_type = other DNA
atgctacctgtgagccccgtccaaggacgttaa

SEQ ID NO: 7708 - DNA, 168 bp, synthetic construct
  misc_feature 1..168: note = Synthetic
  source 1..168: mol_type = other DNA
atggagcaaccacccgaggacgaggcccctcaaagagaaccatacaatgaatggctaattgacaccttagcagaagttcaagaagaagctttaaagcattttgatagacgcttattgcatgcagtaggaagctggatctacgactcggtccgcactagcctgaggtaa

SEQ ID NO: 7709 - DNA, 216 bp, synthetic construct
  source 1..216: mol_type = other DNA
  misc_feature 1..216: note = Synthetic
ataaagaacagtactcaatcaatagcaatcatgaaacaatatatcgtcctggcatgcatgtgcctgccagtcttcagcaatcatcctcatcctcctcctcgtgtacggaagaagaaaacaaacatcatatgggaatcgatgttattatcaaagtcacaaagcaagaccaaacaccgaccaatgataagatttgcgactcggtccgcactagcctga

SEQ ID NO: 7710 - DNA, 216 bp, synthetic construct
  misc_feature 1..216: note = Synthetic
  source 1..216: mol_type = other DNA
ataaagaacagtactcaatcaatagcaatcatgaaacaatatatcgtcctggcgcccatgtgcctgccagtcttcagcaatcatcctcatcctcctcctcgtgtacggaagaagaaaacaaacatcatatgggaatcgatgttattatcaaagtcacaaagcaagaccaaacaccgaccaatgataagatttgcgactcggtccgcactagcctga

SEQ ID NO: 7711 - DNA, 27 bp, synthetic construct
  source 1..27: mol_type = other DNA
  misc_feature 1..27: note = Synthetic
atgaatcctatgctcggatcggactaa

SEQ ID NO: 7712 - DNA, 48 bp, synthetic construct
  misc_feature 1..48: note = Synthetic
  source 1..48: mol_type = other DNA
atgacggagttcagtagaggtaacggcaagctcgagcgtatagtatga

SEQ ID NO: 7713 - DNA, 207 bp, synthetic construct
  source 1..207: mol_type = other DNA
  misc_feature 1..207: note = Synthetic
attgcaccttgccggccacctttgctatctttgctgaagatgatggacccaaactcgacttctgaagatgtaaaatttacacctgacccataccaggtgccttttgtacaagcttttgaccaagctaccagagtctatcaggacctgggagggccatcacaagctcctttgccttgtgtcgactcggtccgcactagcctgaggtaa

SEQ ID NO: 7714 - DNA, 207 bp, synthetic construct
  misc_feature 1..207: note = Synthetic
  source 1..207: mol_type = other DNA
attgcaccttgccggccacctttgctatctttgctgaagatgatggacccaaactcgacttctgaagatgtaaaatttacacctgacccataccaggtgccttttgtacaagcttttgaccaagctaccagagtctatcaggacctgggagggccatcgcaagctcctttgccttgtgtcgactcggtccgcactagcctgaggtaa

SEQ ID NO: 7715 - DNA, 27 bp, synthetic construct
  source 1..27: mol_type = other DNA
  misc_feature 1..27: note = Synthetic
atgttgaagctgccgccgctaacttga

SEQ ID NO: 7716 - DNA, 168 bp, synthetic construct
  source 1..168: mol_type = other DNA
  misc_feature 1..168: note = Synthetic
atggcacgccggctgcccaagcccaccctccaggggaggctggaggcggattttccagacagtcccctgcttcctaaatttcaagagctgaaccagaataatctccccaatgatgtttttcgggaggctcaaagaagttacgactcggtccgcactagcctgaggtaa

SEQ ID NO: 7717 - DNA, 66 bp, synthetic construct
  source 1..66: mol_type = other DNA
  misc_feature 1..66: note = Synthetic
ataatctccccaatgatgtttttcgggaggctcaaagaagttacgactcggtccgcactagcctga

SEQ ID NO: 7718 - DNA, 168 bp, synthetic construct
  misc_feature 1..168: note = Synthetic
  source 1..168: mol_type = other DNA
atggcacgccggctgcccaagcccaccctccaggggaggctggaggcggattttccagacagtcccctgcttcctaaatttcaagagctgaaccagaataatctccccaatgatgtttttcgggaggctcaaaggagttacgactcggtccgcactagcctgaggtaa

SEQ ID NO: 7719 - DNA, 66 bp, synthetic construct
  source 1..66: mol_type = other DNA
  misc_feature 1..66: note = Synthetic
ataatctccccaatgatgtttttcgggaggctcaaaggagttacgactcggtccgcactagcctga

SEQ ID NO: 7720 - DNA, 129 bp, synthetic construct
  misc_feature 1..129: note = Synthetic
  source 1..129: mol_type = other DNA
ctggaggcggattttccagacagtcccctgcttcctaaatttcaagagctgaaccagaataatctccccaatgatgtttttcgggaggctcaaagaagttacgactcggtccgcactagcctgaggtaa

SEQ ID NO: 7721 - DNA, 129 bp, synthetic construct
  misc_feature 1..129: note = Synthetic
  source 1..129: mol_type = other DNA
ctggaggcggattttccagacagtcccctgcttcctaaatttcaagagctgaaccagaataatctccccaatgatgtttttcgggaggctcaaaggagttacgactcggtccgcactagcctgaggtaa

SEQ ID NO: 7722 - DNA, 168 bp, synthetic construct
  source 1..168: mol_type = other DNA
  misc_feature 1..168: note = Synthetic
atgcccctatcctatcaacacttccggagactactgttgttagacgacgaggcaggtcccctagaagaagaactccctcgcctcgcagacgaaggtctcaatcgccgcgtcgcagaagatctcaatctcgggaatctcaacgactcggtccgcactagcctgaggtaa

SEQ ID NO: 7723 - DNA, 45 bp, synthetic construct
  misc_feature 1..45: note = Synthetic
  source 1..45: mol_type = other DNA
atctcaatctcgggaatctcaacgactcggtccgcactagcctga

SEQ ID NO: 7724 - DNA, 168 bp, synthetic construct
  source 1..168: mol_type = other DNA
  misc_feature 1..168: note = Synthetic
atgctggaacgtactccttgcacttattccatcgttgttcctgaggctctaaacgtgcacctagacgacttttcttttgttaattttcttaaaaattgcttgcctgattttctgtccagttatctggaagatatcaccggcgactcggtccgcactagcctgaggtaa

SEQ ID NO: 7725 - DNA, 51 bp, synthetic construct
  misc_feature 1..51: note = Synthetic
  source 1..51: mol_type = other DNA
atgcgtccgcagagttttttccgccagtcatcacggacggtggggggttag

SEQ ID NO: 7726 - DNA, 114 bp, synthetic construct
  source 1..114: mol_type = other DNA
  misc_feature 1..114: note = Synthetic
atgccatgctctataaatcactcccctatctcaggtaggcctgcacaccttaggtatggagcgaaggttagtggtcactctgcagtgcctggtgctgctttacctggcacctga

SEQ ID NO: 7727 - DNA, 114 bp, synthetic construct
  misc_feature 1..114: note = Synthetic
  source 1..114: mol_type = other DNA
atgccatgctctataaatcacttccctatctcaggtaggcctgcacaccttaggtatggagcgaaggttagtggtcactctgcagtgcctggtgctgctttacctggcacctga

SEQ ID NO: 7728 - DNA, 156 bp, synthetic construct
  source 1..156: mol_type = other DNA
  misc_feature 1..156: note = Synthetic
atgccagcactaaaggacctggttcttcaacttgaaccaagcgtcctagatttagatctttattgttacgaggaggtgcctcctgatgacatagaggaggagttagtgtcgcctcagcaaccttatgccgactcggtccgcactagcctgaggtaa

SEQ ID NO: 7729 - DNA, 168 bp, synthetic construct
  misc_feature 1..168: note = Synthetic
  source 1..168: mol_type = other DNA
atggcgatatcgactttttcaattggcgatttgggttatcttagaaattttctgcagaatgaatgtaactggttcagaatttgtaaaaaaacattctatcgcgaatatcgcagcgttgcgacatcgtctcctacattctccgactcggtccgcactagcctgaggtaa

SEQ ID NO: 7730 - DNA, 171 bp, synthetic construct
  source 1..171: mol_type = other DNA
  misc_feature 1..171: note = Synthetic
ctggccgcgatatcgactttttcaattggcgatttgggttatcttagaaattttctgcagaatgaatgtaactggttcagaatttgtaaaaaaacattctatcgcgaatatcgcagcgttgcgacatcgtctcctacattctccgactcggtccgcactagcctgaggtaa

SEQ ID NO: 7731 - DNA, 138 bp, synthetic construct
  source 1..138: mol_type = other DNA
  misc_feature 1..138: note = Synthetic
atcgcaaggattcctagtctccggtggacccgctctcaaagagagattgctatactcatttggccaagaatacttccagccctccaagcatatgatcttcggcaaagtatgcaattgccccgactcggtccgcactag

SEQ ID NO: 7732 - DNA, 168 bp, synthetic construct
  source 1..168: mol_type = other DNA
  misc_feature 1..168: note = Synthetic
atgagtttgcagtttatcggtctacagcggcgcgatgtggtagccctggtcaactttctgcgccatctcacgcaaaagcccgacgtggatctcgaggcacaccccaagatcctgaaaaaatgcggcgaaaaacgcctgcacgactcggtccgcactagcctgaggtaa

SEQ ID NO: 7733 - DNA, 222 bp, synthetic construct
  source 1..222: mol_type = other DNA
  misc_feature 1..222: note = Synthetic
atcaaaactttgaaattgtcgatcctacatttaccattcattattacgtttagcatgattattcaaagtacacgtagactgagacgagcatctagcttgttaaagaaaagcaaaccttacaacaaagaaaaaactaacttatctttatctttgtcacttaaagaactccattcggttttcaaattatttccagacgactcggtccgcactagcctgaggtaa

SEQ ID NO: 7734 - DNA, 222 bp, synthetic construct
  source 1..222: mol_type = other DNA
  misc_feature 1..222: note = Synthetic
atcaaaactttgaaattgtcgatcctacatttaccattcattattacgtttagcgccattattcaaagtacacgtagactgagacgagcatctagcttgttaaagaaaagcaaaccttacaacaaagaaaaaactaacttatctttatctttgtcacttaaagaactccattcggttttcaaattatttccagacgactcggtccgcactagcctgaggtaa

SEQ ID NO: 7735 - DNA, 63 bp, synthetic construct
  misc_feature 1..63: note = Synthetic
  source 1..63: mol_type = other DNA
atgtcaaacatccactctgcggcggtcaggtcttctgctgtcccccacttgctgccgctctga

SEQ ID NO: 7736 - DNA, 168 bp, synthetic construct
  source 1..168: mol_type = other DNA
  misc_feature 1..168: note = Synthetic
atggcgatatcgactttttcaattggcgatttgggttatcttagaaattttttgcagaatgaatgtaactggttcaggatttgtaaaaaaacattctatcgcgaatatcgcagcgttgcgacatcgtctcctatattttccgactcggtccgcactagcctgaggtaa

SEQ ID NO: 7737 - DNA, 141 bp, synthetic construct
  misc_feature 1..141: note = Synthetic
  source 1..141: mol_type = other DNA
ttggcgatttgggttatcttagaaattttttgcagaatgaatgtaactggttcaggatttgtaaaaaaacattctatcgcgaatatcgcagcgttgcgacatcgtctcctatattttccgactcggtccgcactagcctga

SEQ ID NO: 7738 - DNA, 198 bp, synthetic construct
  source 1..198: mol_type = other DNA
  misc_feature 1..198: note = Synthetic
ttgcgatcaccggtaaattcgctcttactggccgcgatatcgactttttcaattggcgatttgggttatcttagaaattttttgcagaatgaatgtaactggttcaggatttgtaaaaaaacattctatcgcgaatatcgcagcgttgcgacatcgtctcctatattttccgactcggtccgcactagcctgaggtaa

SEQ ID NO: 7739 - DNA, 105 bp, synthetic construct
  misc_feature 1..105: note = Synthetic
  source 1..105: mol_type = other DNA
atgaatgtaactggttcaggatttgtaaaaaaacattctatcgcgaatatcgcagcgttgcgacatcgtctcctatattttccgactcggtccgcactagcctga

SEQ ID NO: 7740 - DNA, 90 bp, synthetic construct
  misc_feature 1..90: note = Synthetic
  source 1..90: mol_type = other DNA
atccacaaaagcataatcataagcaacccaaaagagtcaaccgtgaatgatcaaaatgaccaaaccaaaaataatgatattaccggataa

SEQ ID NO: 7741 - DNA, 42 bp, synthetic construct
  misc_feature 1..42: note = Synthetic
  source 1..42: mol_type = other DNA
ataaccatttggataaccacgactcggtccgcactagcctga

SEQ ID NO: 7742 - DNA, 42 bp, synthetic construct
  misc_feature 1..42: note = Synthetic
  source 1..42: mol_type = other DNA
agggtggacaacagaagaacagtcaaaagggccagcatatag

SEQ ID NO: 7743 - DNA, 102 bp, synthetic construct
  source 1..102: mol_type = other DNA
  misc_feature 1..102: note = Synthetic
atgtcccaggccctcacagaacaatccaccacgccagtgcgccactcacggacaatgacagaagaaatgaaccctccggctcaaccagccctcgcatgctga

SEQ ID NO: 7744 - DNA, 42 bp, synthetic construct
  source 1..42: mol_type = other DNA
  misc_feature 1..42: note = Synthetic
atgctgacaccaattaacgcgactcggtccgcactagcctga

SEQ ID NO: 7745 - DNA, 39 bp, synthetic construct
  source 1..39: mol_type = other DNA
  misc_feature 1..39: note = Synthetic
gtggacaacagaagaacagtcaaaagggccagcgcctag

SEQ ID NO: 7746 - DNA, 138 bp, synthetic construct
  misc_feature 1..138: note = Synthetic
  source 1..138: mol_type = other DNA
atcgcaaggattcctagtctccggtggacccgctctcaaagagagattgctatactcatttggccaagaatacttccaatcctccaagcatatgatcttcggcaaagtatgcaattgccccgactcggtccgcactag

SEQ ID NO: 7747 - DNA, 21 bp, synthetic construct
  misc_feature 1..21: note = Synthetic
  source 1..21: mol_type = other DNA
ctgaaatcctgggcggaataa

SEQ ID NO: 7748 - DNA, 90 bp, synthetic construct
  misc_feature 1..90: note = Synthetic
  source 1..90: mol_type = other DNA
attcactcggtcttgcaaacggttaaccagcccctcaatctgagtcggctgatcagcatagaaggacctagccgactcggtccgcactag

SEQ ID NO: 7749 - DNA, 33 bp, synthetic construct
  misc_feature 1..33: note = Synthetic
  source 1..33: mol_type = other DNA
gtgcaaacctcagcaagcagggtgtggaagtag

SEQ ID NO: 7750 - DNA, 48 bp, synthetic construct
  misc_feature 1..48: note = Synthetic
  source 1..48: mol_type = other DNA
atgtcaggccacttctttccggagcggggttttgctatcacgttgtga

SEQ ID NO: 7751 - DNA, 87 bp, synthetic construct
  misc_feature 1..87: note = Synthetic
  source 1..87: mol_type = other DNA
atgacgccgagccgtaatttgtgccacgcatcttccccctgttcgacagctctcacatcgatcccggtacgactcggtccgcactag

SEQ ID NO: 7752 - DNA, 54 bp, synthetic construct
  misc_feature 1..54: note = Synthetic
  source 1..54: mol_type = other DNA
attttcgcctcaggccacttctttccggagcggggttttgctatcacgttgtga

SEQ ID NO: 7753 - DNA, 168 bp, synthetic construct
  source 1..168: mol_type = other DNA
  misc_feature 1..168: note = Synthetic
atgacacagttaagtctattttatcaatttccaatccaaccaattttcgaagggcatgtcagaaatactctaatttgtaccgaggaagatatgcaacaactccaaaacttgggaattcgaaaacttcgaaaagaaaaagacgactcggtccgcactagcctgaggtaa

SEQ ID NO: 7754 - DNA, 174 bp, synthetic construct
  misc_feature 1..174: note = Synthetic
  source 1..174: mol_type = other DNA
atcaaagccacacagttaagtctattttatcaatttccaatccaaccaattttcgaagggcatgtcagaaatactctaatttgtaccgaggaagatatgcaacaactccaaaacttgggaattcgaaaacttcgaaaagaaaaagacgactcggtccgcactagcctgaggtaa

SEQ ID NO: 7755 - DNA, 180 bp, synthetic construct
  misc_feature 1..180: note = Synthetic
  source 1..180: mol_type = other DNA
atgtcaccatactttagtacgtggcgggatcgtcctgataatccatgtatgcgactgttcctctacttctgtttcgaactgatttccctcacctatgcttgtggccgtttgttttcgcaatttagaactctaagcgcgactggtagcacgcgagccacctaccgactcggtccgcactag

SEQ ID NO: 7756 - DNA, 93 bp, synthetic construct
  misc_feature 1..93: note = Synthetic
  source 1..93: mol_type = other DNA
atgcgggtgctgccgtgtactcggctaaggtattacgtgttcgagtatgtcctagcccgctgccgcgactcggtccgcactagcctgaggtaa

SEQ ID NO: 7757 - DNA, 21 bp, synthetic construct
  misc_feature 1..21: note = Synthetic
  source 1..21: mol_type = other DNA
atgactgtttccaaaccgtaa

SEQ ID NO: 7758 - DNA, 168 bp, synthetic construct
  source 1..168: mol_type = other DNA
  misc_feature 1..168: note = Synthetic
atggcttctgacgtgggttctcatcctctgacggttacacgattccgctgcagagtgcattatgtgtacaataaactgttgattttaactttgtttgcccccgtgattctggaatccgtcatctacgtgtccgggccacacgactcggtccgcactagcctgaggtaa

SEQ ID NO: 7759 - DNA, 189 bp, synthetic construct
  misc_feature 1..189: note = Synthetic
  source 1..189: mol_type = other DNA
atttcatccaccgacaccatccccaagccgcagaggagcaggcctatcatgtcaataagggacttgagtgtctcaaatctctcagagaaaatccgcccgatgctgtcgaaattaaggaagcccaaattatccgaagcaaggccgcctgcgaagaatcaagcgagagcgactcggtccgcactagcctga

SEQ ID NO: 7760 - DNA, 183 bp, synthetic construct
  misc_feature 1..183: note = Synthetic
  source 1..183: mol_type = other DNA
ctgcgcaccagcaccgcccaactttttcacctctgcctaatcatctcttgttcatgtcctactgttcaagcctccaagctgtgccttgggtggctttggggcatggacatcgacccttataaagaatttggagctactgtggagttactctcgttcgactcggtccgcactagcctgaggtaa

SEQ ID NO: 7761 - DNA, 39 bp, synthetic construct
  misc_feature 1..39: note = Synthetic
  source 1..39: mol_type = other DNA
ctgcttacggtttcgtcgactcggtccgcactagcctga

SEQ ID NO: 7762 - DNA, 84 bp, synthetic construct
  source 1..84: mol_type = other DNA
  misc_feature 1..84: note = Synthetic
atgaggctagcaataatgttgatcacgactatgtatatccacttccagaaaatatggtatacgactcggtccgcactagcctga

SEQ ID NO: 7763 - DNA, 195 bp, synthetic construct
  misc_feature 1..195: note = Synthetic
  source 1..195: mol_type = other DNA
atcattcatccgaccacccgttctatccctaaatggcagaggaacaggcctaccatgtcagcaaagggctggaatgcctcaaagccctcagagagaatcctcctgacattgaggagattcaagaggtcagcagcctcagagaccaaacctgcaacccaggccaagagaatggcgactcggtccgcactagcctga

SEQ ID NO: 7764 - DNA, 195 bp, synthetic construct
  misc_feature 1..195: note = Synthetic
  source 1..195: mol_type = other DNA
atcattcatccgaccacccgttctatccctaagccgcagaggaacaggcctaccatgtcagcaaagggctggaatgcctcaaagccctcagagagaatcctcctgacattgaggagattcaagaggtcagcagcctcagagaccaaacctgcaacccaggccaagagaatggcgactcggtccgcactagcctga

SEQ ID NO: 7765 - DNA, 168 bp, synthetic construct
  misc_feature 1..168: note = Synthetic
  source 1..168: mol_type = other DNA
atggcagaagaacaagcataccatgtcaacaaggggctggaatgtatcaagtccctcaaagcctctcccccggatctatccaccatcagagacaccattgagagctggagagaggggctcagcccctcgggccgtgcaaccgactcggtccgcactagcctgaggtaa

SEQ ID NO: 7766 - DNA, 120 bp, synthetic construct
  misc_feature 1..120: note = Synthetic
  source 1..120: mol_type = other DNA
aagtccctcaaagcctctcccccggatctatccaccatcagagacaccattgagagctggagagaggggctcagcccctcgggccgtgcaaccgactcggtccgcactagcctgaggtaa

SEQ ID NO: 7767 - DNA, 150 bp, synthetic construct
  misc_feature 1..150: note = Synthetic
  source 1..150: mol_type = other DNA
aagcttaccatgtcaacaaaggcctggaatgcatcaaggctctcagggcccgacccctcgaccccctggtcgttgaagaagcccttgcagcatgggtcgagacctccgaagggcaaacgcttgaccgcgactcggtccgcactagcctga

SEQ ID NO: 7768 - DNA, 156 bp, synthetic construct
  misc_feature 1..156: note = Synthetic
  source 1..156: mol_type = other DNA
atgacaattcacagatcagctcaaccagacaccaccagcatacacgaaaccaaccttcacagtggatacctcagcatccaaaactctccttcccgaatggatcaggatgccttcttttttgagagggatcctgcgactcggtccgcactagcctga

SEQ ID NO: 7769 - DNA, 108 bp, synthetic construct
  source 1..108: mol_type = other DNA
  misc_feature 1..108: note = Synthetic
gtggtatgtggagtgtcttcattcacggacatgatggctgtagtaaaggatctaaaacttatacatctggtggaggtggaatgtggggaggatcgtctagtggtgtaa

SEQ ID NO: 7770 - DNA, 51 bp, synthetic construct
  misc_feature 1..51: note = Synthetic
  source 1..51: mol_type = other DNA
atagaggagatcaagggtttggatcaacaggacttagataatagacaatag

SEQ ID NO: 7771 - DNA, 198 bp, synthetic construct
  misc_feature 1..198: note = Synthetic
  source 1..198: mol_type = other DNA
atgaagctactactaatcacaatactagtcacaattactgaacaaaagtcaaatttcgatctaactcttcagtgcccacataatccaagacaggatgaaggtttttcttatgggtggattgacatgcctgttcaggcttatacgactttgcagcagattacagtggaaagtagctgtccgcgactcggtccgcactag

SEQ ID NO: 7772 - DNA, 204 bp, synthetic construct
  source 1..204: mol_type = other DNA
  misc_feature 1..204: note = Synthetic
acgaaagccaagctactactaatcacaatactagtcacaattactgaacaaaagtcaaatttcgatctaactcttcagtgcccacataatccaagacaggatgaaggtttttcttatgggtggattgacatgcctgttcaggcttatacgactttgcagcagattacagtggaaagtagctgtccgcgactcggtccgcactag

SEQ ID NO: 7773 - DNA, 60 bp, synthetic construct
  misc_feature 1..60: note = Synthetic
  source 1..60: mol_type = other DNA
atgattggtcagataataaggatagtgaagaacgactcggtccgcactagcctgaggtaa

SEQ ID NO: 7774 - DNA, 135 bp, synthetic construct
  source 1..135: mol_type = other DNA
  misc_feature 1..135: note = Synthetic
atgcctcttctaaaggaggtagtagcggtggtatgtggagtgtcttcattcacggacatgatggctgtagtaaaggatctaaaacttatacatctggtggaggtggaatgtggggaggatcgtctagtggtgtaa

SEQ ID NO: 7775 - DNA, 123 bp, synthetic construct
  source 1..123: mol_type = other DNA
  misc_feature 1..123: note = Synthetic
atgtacattcctgcctcaaggattctaatggaccgcctcaattcagtgcgatatgtttgcttttgctttctccgctgctcggtactcgtaggccacagtcactcacccgggtgtggtacttga

SEQ ID NO: 7776 - DNA, 192 bp, synthetic construct
  misc_feature 1..192: note = Synthetic
  source 1..192: mol_type = other DNA
atggcaactatggaggaattacagagggaaatcaatgcccatgagggtcaattagtgatagccaggcagaaggtgagggatgcagaaaaacagtatgaaaaggatccagatgagttgaacaagagaacattaactgaccgagagggcgttgcagtatctatccacgactcggtccgcactagcctgaggtaa

SEQ ID NO: 7777 - DNA, 195 bp, synthetic construct
  source 1..195: mol_type = other DNA
  misc_feature 1..195: note = Synthetic
acggccgcaactatggaggaattacagagggaaatcaatgcccatgagggtcaattagtgatagccaggcagaaggtgagggatgcagaaaaacagtatgaaaaggatccagatgagttgaacaagagaacattaactgaccgagagggcgttgcagtatctatccacgactcggtccgcactagcctgaggtaa

SEQ ID NO: 7778 - DNA, 192 bp, synthetic construct
  misc_feature 1..192: note = Synthetic
  source 1..192: mol_type = other DNA
atggcaactatggaggaactacagagagagatcaatgcccatgagggtcaactggtgatagccaggcagaaggtaagagatgcagaaaaacagtatgaaaaggatccagatgagttaaataagagaacattaacagacagagaaggggttgcagcatccatccacgactcggtccgcactagcctgaggtaa

SEQ ID NO: 7779 - DNA, 186 bp, synthetic construct
  source 1..186: mol_type = other DNA
  misc_feature 1..186: note = Synthetic
atggcaactatggaggaaatccagagagaaatcagtgctcacgaggggcagcttgtgatagcacgccagaaggtcaaggatgcagaaaagcagtatgagaaggatcctgatgacttaaacaagagggcactgcatgatcgggagagtgtcgcagcttccgactcggtccgcactagcctgaggtaa

SEQ ID NO: 7780 - DNA, 177 bp, synthetic construct
  source 1..177: mol_type = other DNA
  misc_feature 1..177: note = Synthetic
atggaggaaatccagagagaaatcagtgctcacgaggggcagcttgtgatagcacgccagaaggtcaaggatgcagaaaagcagtatgagaaggatcctgatgacttaaacaagagggcactgcatgatcgggagagtgtcgcagcttccgactcggtccgcactagcctgaggtaa

SEQ ID NO: 7781 - DNA, 180 bp, synthetic construct
  misc_feature 1..180: note = Synthetic
  source 1..180: mol_type = other DNA
atgggcacggtggaggagttgcagaaagagttgaccacgcaggagggacagttggtagtggcatcacagaaagtcagagatgccgaagcacaatacaataaggatcctgatgagataaacttgaaggttcttacagaccgccagaatactcagaccggagtacgactcggtccgcactag

SEQ ID NO: 7782 - DNA, 39 bp, synthetic construct
  source 1..39: mol_type = other DNA
  misc_feature 1..39: note = Synthetic
atgccgaagcacaatacaataaggatcctgatgagataa

SEQ ID NO: 7783 - DNA, 171 bp, synthetic construct
  source 1..171: mol_type = other DNA
  misc_feature 1..171: note = Synthetic
gtggaggagttgcagaaagagttgaccacgcaggagggacagttggtagtggcatcacagaaagtcagagatgccgaagcacaatacaataaggatcctgatgagataaacttgaaggttcttacagaccgccagaatactcagaccggagtacgactcggtccgcactag

SEQ ID NO: 7784 - DNA, 12 bp, synthetic construct
  source 1..12: mol_type = other DNA
  misc_feature 1..12: note = Synthetic
atggacgtatga

SEQ ID NO: 7785 - DNA, 210 bp, synthetic construct
  misc_feature 1..210: note = Synthetic
  source 1..210: mol_type = other DNA
ctgggcttgattaccgccaatgaactcggatggttggagagaacaaagagtgacctaagccatctaatgggaaggagagaggagggggcaaccatgggattctcaatggacattgacctgcggccagcctcagcttgggccatctatgctgccttgacaactttcattaccccagccgtccaacatgcagtgcgactcggtccgcactag

SEQ ID NO: 7786 - DNA, 210 bp, synthetic construct
  misc_feature 1..210: note = Synthetic
  source 1..210: mol_type = other DNA
ctgggcttgattaccgccagccaactcggatggttggagagaacaaagagtgacctaagccatctaatgggaaggagagaggagggggcaaccatgggattctcaatggacattgacctgcggccagcctcagcttgggccatctatgctgccttgacaactttcattaccccagccgtccaacatgcagtgcgactcggtccgcactag

SEQ ID NO: 7787 - DNA, 111 bp, synthetic construct
  misc_feature 1..111: note = Synthetic
  source 1..111: mol_type = other DNA
atgaacgctctcgtcaggcttgtcatggtccgtaaaagctgcatgaaaaacacgacgaaagcgttcagtgttggatcagactcacgtcacacgttacatcatacaacgtag

SEQ ID NO: 7788 - DNA, 168 bp, synthetic construct
  source 1..168: mol_type = other DNA
  misc_feature 1..168: note = Synthetic
atgcaactttttcacctctgcctaatcatctcttgttcatgtcctactgttcaagcctccaagctgtgccttgggtggctttggggcatggacatcgacccttataaagaatttggagctactgtggagttactctcgttcgactcggtccgcactagcctgaggtaa

SEQ ID NO: 7789 - DNA, 171 bp, synthetic construct
  source 1..171: mol_type = other DNA
  misc_feature 1..171: note = Synthetic
atggcagatatagagaggttaatagcagagggccttgagatagagaaagagctgatgaccgctcggattcgtttgcaagaggcaaaggaagctgcagagagaaatcctgatgagttaaatttaaagggagttgatgccagacaaggggcgactcggtccgcactagcctga

SEQ ID NO: 7790 - DNA, 192 bp, synthetic construct
  source 1..192: mol_type = other DNA
  misc_feature 1..192: note = Synthetic
atggcaacaattgaggaattacaaaaggacttggcacttcaagaaggccaattgacaataactaaacaaaaactcaaagatgcccaagaacaatatgaaaaggatccagatgatataaacaaggcaagcgttctacagagacaaatggatgcaaagatgacagacgactcggtccgcactagcctgaggtaa

SEQ ID NO: 7791 - DNA, 42 bp, synthetic construct
  misc_feature 1..42: note = Synthetic
  source 1..42: mol_type = other DNA
aagatgcccaagaacaatatgaaaaggatccagatgatataa

SEQ ID NO: 7792 - DNA, 141 bp, synthetic construct
  source 1..141: mol_type = other DNA
  misc_feature 1..141: note = Synthetic
ttgacaataactaaacaaaaactcaaagatgcccaagaacaatatgaaaaggatccagatgatataaacaaggcaagcgttctacagagacaaatggatgcaaagatgacagacgactcggtccgcactagcctgaggtaa

SEQ ID NO: 7793 - DNA, 156 bp, synthetic construct
  misc_feature 1..156: note = Synthetic
  source 1..156: mol_type = other DNA
atggcgcaaagccgtataactagagaggacatccaaaagttggaggatgcaaaaaagcagatagaaatccagctatcatcctcaatccaaaaattggccactgagacagaacaatttgggcctgaccctgacccgactcggtccgcactagcctga

SEQ ID NO: 7794 - DNA, 180 bp, synthetic construct
  source 1..180: mol_type = other DNA
  misc_feature 1..180: note = Synthetic
atcatgtggagtttgctattactggccgctttagttggccaaggctttgcattaaaaaatgtgtttgacatgagaattcagtgcccccactcagtcaaatttggggaaacaagtgtgtcaggctacacagaactgcccccactctcattacaggaggcgactcggtccgcactagcctga

SEQ ID NO: 7795 - DNA, 189 bp, synthetic construct
  misc_feature 1..189: note = Synthetic
  source 1..189: mol_type = other DNA
atgatttctatagctaagttagctgtgtgtgtgagtctactactatgtataagtgcaactgagcacaagcccattttgctcaattgtccacattatggtgttattggggctgagtatgtctgggggactacaagaattggacacttcccactagatgaggtcgactcggtccgcactagcctgaggtaa

SEQ ID NO: 7796 - DNA, 72 bp, synthetic construct
  misc_feature 1..72: note = Synthetic
  source 1..72: mol_type = other DNA
attgtccacattatggtgttattggggctgagtatgtctgggggactacaagaattggacacttcccactag

SEQ ID NO: 7797 - DNA, 90 bp, synthetic construct
  source 1..90: mol_type = other DNA
  misc_feature 1..90: note = Synthetic
attatggtgtcagtgatgctgaatatgtctggggaaaagttaaaattgggcgttttacaatcgatgatattacgactcggtccgcactag

SEQ ID NO: 7798 - DNA, 186 bp, synthetic construct
  misc_feature 1..186: note = Synthetic
  source 1..186: mol_type = other DNA
ttgtggcgccagaactgtatgtggagcatgtgctgggtgttgcgcgcacatttggggctgctcttctgggtggccgtgattgagctatgtgcggccagcggtcctgccaccatcatggcctcggattgttgcgagaattccctgtccagtgccagattcgactcggtccgcactagcctgaggtaa

SEQ ID NO: 7799 - DNA, 159 bp, synthetic construct
  misc_feature 1..159: note = Synthetic
  source 1..159: mol_type = other DNA
atgtgctgggtgttgcgcgcacatttggggctgctcttctgggtggccgtgattgagctatgtgcggccagcggtcctgccaccatcatggcctcggattgttgcgagaattccctgtccagtgccagattcgactcggtccgcactagcctgaggtaa

SEQ ID NO: 7800 - DNA, 207 bp, synthetic construct
  misc_feature 1..207: note = Synthetic
  source 1..207: mol_type = other DNA
ctgttcctgatgagcacccgcgctctcatctcttcagacttgtcgccacccccgctcagactaacggcactaccaccgtgcacccgcacggcgcaaaaaacggcagcggcggtagtgccctgccgaccctcgtcgttttcggcttcatcgttacgctacttttctttctctttatgctctacttcgactcggtccgcactagcctga

SEQ ID NO: 7801 - DNA, 168 bp, synthetic construct
  source 1..168: mol_type = other DNA
  misc_feature 1..168: note = Synthetic
atgtcacaaaacagaaagactctgcctgctgatggacctggtgggcacggagtgctttgcgagggtgtgccgcctagacaccggtgcgaaatgaagagtgtggcgagtcccttatgtcagttccacggcgtgttttgcctcgactcggtccgcactagcctgaggtaa

SEQ ID NO: 7802 - DNA, 66 bp, synthetic construct
  source 1..66: mol_type = other DNA
  misc_feature 1..66: note = Synthetic
ctgatggacctggtgggcacggagtgctttgcgagggtgtgccgcctagacaccggtgcgaaatga

SEQ ID NO: 7803 - DNA, 24 bp, synthetic construct
  misc_feature 1..24: note = Synthetic
  source 1..24: mol_type = other DNA
atgaagacccatctgaaacaatga

SEQ ID NO: 7804 - DNA, 177 bp, synthetic construct
  source 1..177: mol_type = other DNA
  misc_feature 1..177: note = Synthetic
atggtagggtgggtttgcatcttcctcgtggtccttactactgcaactgctgggctaacacggaatctttatgagttgaagatagaatgtccacatactgtgggtttaggtcagggttacgtgacaggttcagtggaaattacacctatcgactcggtccgcactagcctgaggtaa

SEQ ID NO: 7805 - DNA, 42 bp, synthetic construct
  misc_feature 1..42: note = Synthetic
  source 1..42: mol_type = other DNA
acgaagaagcaaacactgaataaaggagatacagagccgtag

SEQ ID NO: 7806 - DNA, 186 bp, synthetic construct
  misc_feature 1..186: note = Synthetic
  source 1..186: mol_type = other DNA
atggaaaaatacagagaaattcatagggatctacaatcctttccagttgggtcactgacagcagtagagtgtatagactacctggatcgtctctatgcaataaggcatgacattgttgatcagatgataaagcatgactggtcagataacaaggattcagaggcgactcggtccgcactagcctga

SEQ ID NO: 7807 - DNA, 48 bp, synthetic construct
  misc_feature 1..48: note = Synthetic
  source 1..48: mol_type = other DNA
atgactggtcagataacaaggattcagaggcgactcggtccgcactag

SEQ ID NO: 7808 - DNA, 183 bp, synthetic construct
  misc_feature 1..183: note = Synthetic
  source 1..183: mol_type = other DNA
aggatcgcctggagtttgctattactggccgctttagttggccaaggctttgcattaaaaaatgtgtttgacatgagaattcagtgcccccactcagtcaaatttggggaaacaagtgtgtcaggctacacagaactgcccccactctcattacaggaggcgactcggtccgcactagcctga

SEQ ID NO: 7809 - DNA, 15 bp, synthetic construct
  source 1..15: mol_type = other DNA
  misc_feature 1..15: note = Synthetic
atgtgtttgacatga

SEQ ID NO: 7810 - DNA, 183 bp, synthetic construct
  source 1..183: mol_type = other DNA
  misc_feature 1..183: note = Synthetic
atgatcatgtggggtttactattgacaatgattttgatcgattttggggcatccttaaggaatgtctatgacatgaaaatagaatgcccacattcaatcaactttggggagagtagtgtaacaggtaaggtggagctgccaccccttctgcttacagatgcgactcggtccgcactagcctga

SEQ ID NO: 7811 - DNA, 177 bp, synthetic construct
  misc_feature 1..177: note = Synthetic
  source 1..177: mol_type = other DNA
atgtggggtttactattgacaatgattttgatcgattttggggcatccttaaggaatgtctatgacatgaaaatagaatgcccacattcaatcaactttggggagagtagtgtaacaggtaaggtggagctgccaccccttctgcttacagatgcgactcggtccgcactagcctga

SEQ ID NO: 7812 - DNA, 177 bp, synthetic construct
  misc_feature 1..177: note = Synthetic
  source 1..177: mol_type = other DNA
atggaagggtggtatctggttgttcttggagtctgctatacgctgacactggcaatgcccaagaccatttatgagcttaaaatggaatgcccgcacactgtgggtctcggtcaaggttacatcattggctcaacagaactaggtttgatcgactcggtccgcactagcctgaggtaa

SEQ ID NO: 7813 - DNA, 69 bp, synthetic construct
  source 1..69: mol_type = other DNA
  misc_feature 1..69: note = Synthetic
atgacactgaaagttcccatgccgccacgtctaatgtttctgaggacgttagggacaatgtgtctgtag

SEQ ID NO: 7814 - DNA, 36 bp, synthetic construct
  source 1..36: mol_type = other DNA
  misc_feature 1..36: note = Synthetic
ctgtgcccctgctcgactcggtccgcactagcctga

SEQ ID NO: 7815 - DNA, 183 bp, synthetic construct
  misc_feature 1..183: note = Synthetic
  source 1..183: mol_type = other DNA
atggcaacattagaggaactccaaaaagaaatcaacaaccacgagggccaattggtgatagccaggcagaaggtgaaagatgcagaaaagcagtatgaaaaggatcctgacgacctgaataaaagggcattgagtgaccgggaaagcattgcacaatcaattcagcgactcggtccgcactag

SEQ ID NO: 7816 - DNA, 174 bp, synthetic construct
  source 1..174: mol_type = other DNA
  misc_feature 1..174: note = Synthetic
atgcagaaatattacgaaatcagggacaaagtccatggcattgagccaggcacaataggggcagtagaatgtattaatttgctagattcactctacatggttcgtcatgacctaattgatgagatgattaaacatgactggtcagataacaaggatcgactcggtccgcactag

SEQ ID NO: 7817 - DNA, 129 bp, synthetic construct
  source 1..129: mol_type = other DNA
  misc_feature 1..129: note = Synthetic
ctggcaatgcccaagaccatttatgagcttaaaatggaatgcccgcacactgtgggtctcggtcaaggttacatcattggctcaacagaactaggtttgatcgactcggtccgcactagcctgaggtaa

SEQ ID NO: 7818 - DNA, 207 bp, synthetic construct
  misc_feature 1..207: note = Synthetic
  source 1..207: mol_type = other DNA
aagaagaagcaaacacagacaaatatgggaaaatcgagtccagtttgtctgtatctgattcttcagggtctattactatttgatacagtaaatgccaaaaacctgaatgaacttaaaatggagtgtccgcacactattgggctaggtcaaggccttgttgtaggttcagtagaactaccacctgcgactcggtccgcactagcctga

SEQ ID NO: 7819 - DNA, 192 bp, synthetic construct
  misc_feature 1..192: note = Synthetic
  source 1..192: mol_type = other DNA
ctgataaacaaggataaaatgagtagagtttgtctgtgtctgctcttctcgggcctactactatggagggctgcagaacttcgaaaccttattgagttaaaaattgaatgtcctcatacaattggattaggccagggcttggtcatcggttcagtcgagctaccacctgcgactcggtccgcactagcctga

SEQ ID NO: 7820 - DNA, 192 bp, synthetic construct
  source 1..192: mol_type = other DNA
  misc_feature 1..192: note = Synthetic
ataaaggccgaaaaatacagagaaattcatagggatctacaatcctttccagttgggtcactgacagcagtagagtgtatagactacctggatcgtctctatgcaataaggcatgacattgttgatcagatgataaagcatgactggtcagataacaaggattcagaggcgactcggtccgcactagcctga

SEQ ID NO: 7821 - DNA, 192 bp, synthetic construct
  misc_feature 1..192: note = Synthetic
  source 1..192: mol_type = other DNA
atggagaaatatagagaaatacacagggatctgaaggagtttactattaactcattaacagccgtggaatgcatggattacttggataggctctatgctgtccggcatgacattgttgaccagatgataaaacatgaatggtcagacaataaagacagcgaggacgactcggtccgcactagcctgaggtaa

SEQ ID NO: 7822 - DNA, 180 bp, synthetic construct
  source 1..180: mol_type = other DNA
  misc_feature 1..180: note = Synthetic
atggagaaatatcgggagatacatcataaggtgaaggcacatgcagtaggtagtctgactgcagtggagtgtattgactacctggacagactttatgcaatcaggcatgacttggtggatcaaatgataaaacatgattggtctgacaataaggacagagaacgactcggtccgcactag

SEQ ID NO: 7823 - DNA, 33 bp, synthetic construct
  misc_feature 1..33: note = Synthetic
  source 1..33: mol_type = other DNA
atgcaatcaggcatgacttggtggatcaaatga

SEQ ID NO: 7824 - DNA, 21 bp, synthetic construct
  misc_feature 1..21: note = Synthetic
  source 1..21: mol_type = other DNA
atgcatagatctactggatag

SEQ ID NO: 7825 - DNA, 141 bp, synthetic construct
  source 1..141: mol_type = other DNA
  misc_feature 1..141: note = Synthetic
atgaacagcaacttattgttgccagacaaaaacttaaggatgcagagagagcagtggaagtggacccagatgacgttaataaaaacacactgcaagccaggcaacaaacagtgtcagccgactcggtccgcactagcctga

SEQ ID NO: 7826 - DNA, 27 bp, synthetic construct
  misc_feature 1..27: note = Synthetic
  source 1..27: mol_type = other DNA
atgataatatcaaaacgatggatataa

SEQ ID NO: 7827 - DNA, 78 bp, synthetic construct
  misc_feature 1..78: note = Synthetic
  source 1..78: mol_type = other DNA
gtggtgttttgcgatttcgaggccgggctcgatcctcacctttcattgtcaataggggacactttgacactaccttga

SEQ ID NO: 7828 - DNA, 117 bp, synthetic construct
  misc_feature 1..117: note = Synthetic
  source 1..117: mol_type = other DNA
atgtcgtccgtgctcaaagcatttgagcgattcactatagaacaggaacttcaagacaggggtgaggagggttcaattccgccggagactttaacgactcggtccgcactagcctga

SEQ ID NO: 7829 - DNA, 117 bp, synthetic construct
  source 1..117: mol_type = other DNA
  misc_feature 1..117: note = Synthetic
atgtcgtccgtgctcaaagcatttgagcgattcactatagaacaggaacttcaagacaggggtgaggagggttcagccccgccggagactttaacgactcggtccgcactagcctga

SEQ ID NO: 7830 - DNA, 45 bp, synthetic construct
  misc_feature 1..45: note = Synthetic
  source 1..45: mol_type = other DNA
gtggactccctgcttacaacagaagagactactactactatatag

SEQ ID NO: 7831 - DNA, 177 bp, synthetic construct
  source 1..177: mol_type = other DNA
  misc_feature 1..177: note = Synthetic
atagaaatctttcagacaaagatgactcaagggaaaatgactcccgaagagctaaagaaattagaacatgagtacaatcaaactgagaaggcattgacagagtcatctcagaaactgattcaagagatagatcaagctggtcaaaaccctgactcgactcggtccgcactagcctga

SEQ ID NO: 7832 - DNA, 57 bp, synthetic construct
  misc_feature 1..57: note = Synthetic
  source 1..57: mol_type = other DNA
atgattccctatatgtttaagattggaatgcgcatcttctatatgagtggatgctga

SEQ ID NO: 7833 - DNA, 42 bp, synthetic construct
  source 1..42: mol_type = other DNA
  misc_feature 1..42: note = Synthetic
attctacaatcttataagaagatttgggatctatatcactag

SEQ ID NO: 7834 - DNA, 57 bp, synthetic construct
  source 1..57: mol_type = other DNA
  misc_feature 1..57: note = Synthetic
atgattccctatatgtttaagattggaatgtgcatcttctatatgagtggatgctga

SEQ ID NO: 7835 - DNA, 48 bp, synthetic construct
  source 1..48: mol_type = other DNA
  misc_feature 1..48: note = Synthetic
atgccgattctacaatcttataagaagatttgggatctatatcactag

SEQ ID NO: 7836 - DNA, 42 bp, synthetic construct
  misc_feature 1..42: note = Synthetic
  source 1..42: mol_type = other DNA
atgatcatattggacatggaagaagtaatggtgaaaaaatga

SEQ ID NO: 7837 - DNA, 36 bp, synthetic construct
  source 1..36: mol_type = other DNA
  misc_feature 1..36: note = Synthetic
atgctgtttcaaacgactcggtccgcactagcctga

SEQ ID NO: 7838 - DNA, 123 bp, synthetic construct
  source 1..123: mol_type = other DNA
  misc_feature 1..123: note = Synthetic
ttgcccggcaaaaacttaaagatgcagaaaagacggtggaagccgacccggatgatgttaacaagagcacactacagagtagacgggcagctgtgtcagccgactcggtccgcactagcctga

SEQ ID NO: 7839 - DNA, 186 bp, synthetic construct
  source 1..186: mol_type = other DNA
  misc_feature 1..186: note = Synthetic
atgagcaacctcaaagatattcaggatgagatcactcgttacgagcagcagctcatcgttgctcgacagaaactcagggatgctgagaaggcggtggaggaggaccccgatgatgttaacaaaaatacattacaggcaagacggcagactgtgtcagccgactcggtccgcactagcctgaggtaa

SEQ ID NO: 7840 - DNA, 165 bp, synthetic construct
  misc_feature 1..165: note = Synthetic
  source 1..165: mol_type = other DNA
atattcaggatgagatcactcgttacgagcagcagctcatcgttgctcgacagaaactcagggatgctgagaaggcggtggaggaggaccccgatgatgttaacaaaaatacattacaggcaagacggcagactgtgtcagccgactcggtccgcactagcctga

SEQ ID NO: 7841 - DNA, 195 bp, synthetic construct
  source 1..195: mol_type = other DNA
  misc_feature 1..195: note = Synthetic
aaggctggggccagcaacctcaaagatattcaggatgagatcactcgttacgagcagcagctcatcgttgctcgacagaaactcagggatgctgagaaggcggtggaggaggaccccgatgatgttaacaaaaatacattacaggcaagacggcagactgtgtcagccgactcggtccgcactagcctgaggtaa

SEQ ID NO: 7842 - DNA, 21 bp, synthetic construct
  misc_feature 1..21: note = Synthetic
  source 1..21: mol_type = other DNA
atagaggttataagagtgtaa

SEQ ID NO: 7843 - DNA, 111 bp, synthetic construct
  source 1..111: mol_type = other DNA
  misc_feature 1..111: note = Synthetic
atgaagaagaaggagtctggagtggtggagagaggacgtggaacgcgtcctcctgccaatcgtggaggaggagctcctccgaagaaggcgactcggtccgcactagcctga

SEQ ID NO: 7844 - DNA, 84 bp, synthetic construct
  source 1..84: mol_type = other DNA
  misc_feature 1..84: note = Synthetic
atgcccgctggcgaggcgtcgtatgtgacccatacgttcgtaatctggatatcaactttgctgcagccctccgtattaccgtag

SEQ ID NO: 7845 - DNA, 102 bp, synthetic construct
  misc_feature 1..102: note = Synthetic
  source 1..102: mol_type = other DNA
aggaagatagagacccgtctgaaggtaagccgggttgctcaatcatggccgagctgccgaatgggccgcccaacactcacgactcggtccgcactagcctga

SEQ ID NO: 7846 - DNA, 48 bp, synthetic construct
  misc_feature 1..48: note = Synthetic
  source 1..48: mol_type = other DNA
gtgataagcaagcaacgccgtattaacatccgactcggtccgcactag

SEQ ID NO: 7847 - DNA, 57 bp, synthetic construct
  source 1..57: mol_type = other DNA
  misc_feature 1..57: note = Synthetic
atggttgtaacatgtattaagatagagtcgaccatgaataatccgtgtattctctga

SEQ ID NO: 7848 - DNA, 72 bp, synthetic construct
  misc_feature 1..72: note = Synthetic
  source 1..72: mol_type = other DNA
ttgcccgtctcactggtgaaaagaaaaaccaccctggcgcccaatacgcaaacccgactcggtccgcactag

SEQ ID NO: 7849 - DNA, 15 bp, synthetic construct
  source 1..15: mol_type = other DNA
  misc_feature 1..15: note = Synthetic
atggtgcatccatag

SEQ ID NO: 7850 - DNA, 123 bp, synthetic construct
  source 1..123: mol_type = other DNA
  misc_feature 1..123: note = Synthetic
ctgccaggcagaagctcaaagatgcagaaagagcggtggaattggaccccgatgatgttaacaaaagcacattacagagcagacgggcagctgtgtctgccgactcggtccgcactagcctga

SEQ ID NO: 7851 - DNA, 123 bp, synthetic construct
  misc_feature 1..123: note = Synthetic
  source 1..123: mol_type = other DNA
ctgctcggcaaaagcttaaggatgccgagaaggcagtggaggtggacccggatgacgttaacaagagcacactacaaagtagacgggcagctgtgtctaccgactcggtccgcactagcctga

SEQ ID NO: 7852 - DNA, 183 bp, synthetic construct
  misc_feature 1..183: note = Synthetic
  source 1..183: mol_type = other DNA
aaggagcaaacaatgggtgatattaaagaattagagaacgagctaaaaaacacagaaacacaacttgaattggccacaaagaagctagaaaaggcaactgcagactacgagcatgatgatgatgaaacaaacaaggcaagttatgaacggaggacactggaggtacgactcggtccgcactag

SEQ ID NO: 7853 - DNA, 102 bp, synthetic construct
  source 1..102: mol_type = other DNA
  misc_feature 1..102: note = Synthetic
aggcaactgcagactacgagcatgatgatgatgaaacaaacaaggcaagttatgaacggaggacactggaggtacgactcggtccgcactagcctgaggtaa

SEQ ID NO: 7854 - DNA, 72 bp, synthetic construct
  source 1..72: mol_type = other DNA
  misc_feature 1..72: note = Synthetic
atgagcaggtcaagcatcgaccgccggaaagtatgtgcccgaaagcgtccctctcgcttgtccaacaaataa

SEQ ID NO: 7855 - DNA, 21 bp, synthetic construct
  misc_feature 1..21: note = Synthetic
  source 1..21: mol_type = other DNA
atggaggctccagacgtgtaa

SEQ ID NO: 7856 - DNA, 120 bp, synthetic construct
  misc_feature 1..120: note = Synthetic
  source 1..120: mol_type = other DNA
atggaagggatgggacttcgcagagctcattgccaacaatcatttacacggacagtgggcgcagtcagaaaaactgatgcaggagttgcatttcgtcacggtcttttgacctaccattga

SEQ ID NO: 7857 - DNA, 72 bp, synthetic construct
  source 1..72: mol_type = other DNA
  misc_feature 1..72: note = Synthetic
atatcttcgaaaacaaaaatagatattatttttgcagtacaaactattgcgactcggtccgcactagcctga

SEQ ID NO: 7858 - DNA, 141 bp, synthetic construct
  source 1..141: mol_type = other DNA
  misc_feature 1..141: note = Synthetic
atgataagtaattacgagccgttgctgctgttagttataacatgctgtgtactactatttaattttaccatatcttcgaaaacaaaaatagatattatttttgcagtacaaactattgcgactcggtccgcactagcctga

SEQ ID NO: 7859 - DNA, 81 bp, synthetic construct
  misc_feature 1..81: note = Synthetic
  source 1..81: mol_type = other DNA
atggagaggcaaacatacaggaggaaaggctatatgagctactctctgacccacgctccgactcggtccgcactagcctga

SEQ ID NO: 7860 - DNA, 63 bp, synthetic construct
  misc_feature 1..63: note = Synthetic
  source 1..63: mol_type = other DNA
aggagcaaaggctatatgagctactctctgacccacgctccgactcggtccgcactagcctga

SEQ ID NO: 7861 - DNA, 54 bp, synthetic construct
  misc_feature 1..54: note = Synthetic
  source 1..54: mol_type = other DNA
atgattatatcgaaacagttaataagattacaccacagcttaaaaatctactag

SEQ ID NO: 7862 - DNA, 57 bp, synthetic construct
  misc_feature 1..57: note = Synthetic
  source 1..57: mol_type = other DNA
acgatgattatatcgaaacagttaataagattacaccacagcttaaaaatctactag

SEQ ID NO: 7863 - DNA, 18 bp, synthetic construct
  source 1..18: mol_type = other DNA
  misc_feature 1..18: note = Synthetic
atgatcgatacagtttaa

SEQ ID NO: 7864 - DNA, 162 bp, synthetic construct
  misc_feature 1..162: note = Synthetic
  source 1..162: mol_type = other DNA
atggtcatcggtctagtcatattcgtgtctgtggcggccaccatcgtcggtgtgttgtctaacgtattggacatgcttatgtacgtagaagaaaataatgaagaggatgctaaaatcaaggaggagcaagaattactgtcgactcggtccgcactagcctga

SEQ ID NO: 7865 - DNA, 60 bp, synthetic construct
  source 1..60: mol_type = other DNA
  misc_feature 1..60: note = Synthetic
atgaagaggatgctaaaatcaaggaggagcaagaattactgtcgactcggtccgcactag

SEQ ID NO: 7866 - DNA, 162 bp, synthetic construct
  misc_feature 1..162: note = Synthetic
  source 1..162: mol_type = other DNA
atggtcatcggtctagtcatattcgtgtctgtggcggccgccatcgtcggtgtgttgtctaacgtattggacatgcttatgtacgtagaagaaaataatgaagaggatgctagaatcaaggaggagcaagaactactgtcgactcggtccgcactagcctga

SEQ ID NO: 7867 - DNA, 168 bp, synthetic construct
  source 1..168: mol_type = other DNA
  misc_feature 1..168: note = Synthetic
atgaaccggcaagcttcgggccgctgccgtcgcgcgctgtggatttcggcgcgcgtgctttttctgtgcgccttcgtcacgctagcgggcctgtacctgcgacagctgctgctcgcacccgcgccgcggcggttgcccgccgactcggtccgcactagcctgaggtaa

SEQ ID NO: 7868 - DNA, 114 bp, synthetic construct
  misc_feature 1..114: note = Synthetic
  source 1..114: mol_type = other DNA
gtgctttttctgtgcgccttcgtcacgctagcgggcctgtacctgcgacagctgctgctcgcacccgcgccgcggcggttgcccgccgactcggtccgcactagcctgaggtaa

SEQ ID NO: 7869 - DNA, 60 bp, synthetic construct
  source 1..60: mol_type = other DNA
  misc_feature 1..60: note = Synthetic
atgtctatcgtgcggaccatgttgaccccgcatttgttagtgagtattatgagtttttaa

SEQ ID NO: 7870 - DNA, 33 bp, synthetic construct
  source 1..33: mol_type = other DNA
  misc_feature 1..33: note = Synthetic
atgaattcaatgagttttatgagcaaacagtaa

SEQ ID NO: 7871 - DNA, 24 bp, synthetic construct
  misc_feature 1..24: note = Synthetic
  source 1..24: mol_type = other DNA
atgaatttgtccgtatacagctaa

SEQ ID NO: 7872 - DNA, 21 bp, synthetic construct
  source 1..21: mol_type = other DNA
  misc_feature 1..21: note = Synthetic
atgcaatctgtgggaaaataa

SEQ ID NO: 7873 - DNA, 39 bp, synthetic construct
  source 1..39: mol_type = other DNA
  misc_feature 1..39: note = Synthetic
atgctacatatgaaaaaaactaacagatatcatggataa

SEQ ID NO: 7874 - DNA, 90 bp, synthetic construct
  misc_feature 1..90: note = Synthetic
  source 1..90: mol_type = other DNA
atgagatcgaagcacaacgagctgaaaagtccaattatgagttgttccaagaggatggagtggaagacgactcggtccgcactagcctga

SEQ ID NO: 7875 - DNA, 39 bp, synthetic construct
  source 1..39: mol_type = other DNA
  misc_feature 1..39: note = Synthetic
atgctacatatgaaaaaaactaacagatatcgccgataa

SEQ ID NO: 7876 - DNA, 48 bp, synthetic construct
  misc_feature 1..48: note = Synthetic
  source 1..48: mol_type = other DNA
atgagctactctctgacccacgctccgactcggtccgcactagcctga

SEQ ID NO: 7877 - DNA, 174 bp, synthetic construct
  source 1..174: mol_type = other DNA
  misc_feature 1..174: note = Synthetic
ataaccatggctcctacccaatccaaagtcagaatccacaatctggccgaagctcacgagaagacactaagagctttcccaatagaagttgaacaaaacccagaagggaaaaaattattagtaaaacagattagaataagaacattcgactcggtccgcactagcctgaggtaa

SEQ ID NO: 7878 - DNA, 216 bp, synthetic construct
  misc_feature 1..216: note = Synthetic
  source 1..216: mol_type = other DNA
attatcagctcttgttttttcagagaacggtgtacttttgaaactataatgtcactgcatgaattaataaaacaaactatgtccaaaaatttagaaaaaaaacattatgagttgttaaaattaaaacttggtgaagatcatcctcttagcgttcgacagcaaattcacgctctcaatcaaaatcttgtcgactcggtccgcactagcctgaggtaa

SEQ ID NO: 7879 - DNA, 84 bp, synthetic construct
  source 1..84: mol_type = other DNA
  misc_feature 1..84: note = Synthetic
ttggtgaagatcatcctcttagcgttcgacagcaaattcacgctctcaatcaaaatcttgtcgactcggtccgcactagcctga

SEQ ID NO: 7880 - DNA, 222 bp, synthetic construct
  misc_feature 1..222: note = Synthetic
  source 1..222: mol_type = other DNA
ataggtcgctttttttcactcacggatgccaatgttcccggagtgtatgcttcttctcgaatcatccatgccggccaccgggaaggtctctcggtgatgcttttcaatcatggcgacagcttctacgagggtcgcgccggagaccccgtagcctgcctggtgctggaaagagtgatttacccacctgttcgccaggctacgactcggtccgcactagcctga

SEQ ID NO: 7881 - DNA, 66 bp, synthetic construct
  misc_feature 1..66: note = Synthetic
  source 1..66: mol_type = other DNA
atgttcccggagtgtatgcttcttctcgaatcatccatgccggccaccgggaaggtctctcggtga

SEQ ID NO: 7882 - DNA, 177 bp, synthetic construct
  misc_feature 1..177: note = Synthetic
  source 1..177: mol_type = other DNA
atcgcaattatggcttatggttctcgctaccgaggttatcggcgtcgccgacgcatgttctctcgttcgcgtgccagacgtggtaatggtcgtcggtattcccgcgctccgcggagacgtgtgtatcggcgacgccgaacacgtcgatccgactcggtccgcactagcctgaggtaa

SEQ ID NO: 7883 - DNA, 222 bp, synthetic construct
  misc_feature 1..222: note = Synthetic
  source 1..222: mol_type = other DNA
ataaatacccgtgtcccccctactcacatgttagagaatcctgaggcggcatcgcaattgccgcttatggttctcgctaccgaggttatcggcgtcgccgacgcatgttctctcgttcgcgtgccagacgtggtaatggtcgtcggtattcccgcgctccgcggagacgtgtgtatcggcgacgccgaacacgtcgatccgactcggtccgcactagcctga

SEQ ID NO: 7884 - DNA, 123 bp, synthetic construct
  misc_feature 1..123: note = Synthetic
  source 1..123: mol_type = other DNA
atgttctctcgttcgcgtgccagacgtggtaatggtcgtcggtattcccgcgctccgcggagacgtgtgtatcggcgacgccgaacacgtcgatccgactcggtccgcactagcctgaggtaa

SEQ ID NO: 7885 - DNA, 168 bp, synthetic construct
  misc_feature 1..168: note = Synthetic
  source 1..168: mol_type = other DNA
atgggcacaaagtgctgtaaaccagtatcttgcggcatgtgtaagaaaaccgaaaacaccctgatggattacaagggaaatcctatattactaacgacggaatttactgttttgaccgataccgaatcggaagaggaaggcgactcggtccgcactagcctgaggtaa

SEQ ID NO: 7886 - DNA, 222 bp, synthetic construct
  misc_feature 1..222: note = Synthetic
  source 1..222: mol_type = other DNA
atattaagctttcgcgcagcgcgctttatccgactcgctgtcgagacggctttgccggcatgtccctactcaccaaagccgccgccgaagcctggggcacctatctccgacagcgcgacgagcgctgcgaagatgctatccgctgcgactacggcgttttccaatttagaaacaccgtctttcaaaagacgttatcgatcgactcggtccgcactagcctga

SEQ ID NO: 7887 - DNA, 222 bp, synthetic construct
  misc_feature 1..222: note = Synthetic
  source 1..222: mol_type = other DNA
atattaagctttcgcgcagcgcgctttatccgactcgctgtcgagacggctttgccggcgcctccctactcaccaaagccgccgccgaagcctggggcacctatctccgacagcgcgacgagcgctgcgaagatgctatccgctgcgactacggcgttttccaatttagaaacaccgtctttcaaaagacgttatcgatcgactcggtccgcactagcctga

SEQ ID NO: 7888 - DNA, 168 bp, synthetic construct
  source 1..168: mol_type = other DNA
  misc_feature 1..168: note = Synthetic
atgagtctactgctagaaaacctcatcgaagaagataccatattttttgcaggaagtatatctgagtatgatgatttacaaatggttattgccggcgcaaaatccaaatttccaagatctatgctttctatttttaatatcgactcggtccgcactagcctgaggtaa

SEQ ID NO: 7889 - DNA, 168 bp, synthetic construct
  misc_feature 1..168: note = Synthetic
  source 1..168: mol_type = other DNA
atgagtctactgctagaaaacctcatcgaagaagataccatattttttgcaggaagtatatctgagtatgatgatttacaaatggttattgccggtgcaaaatccaaatttccaagatctatgctttctatttttaatatcgactcggtccgcactagcctgaggtaa

SEQ ID NO: 7890 - DNA, 81 bp, synthetic construct
  misc_feature 1..81: note = Synthetic
  source 1..81: mol_type = other DNA
atcgggcaggcgatccgtacagcaacgatgggcctacctcttttcaaggtttattttgatctgcgactcggtccgcactag

SEQ ID NO: 7891 - DNA, 192 bp, synthetic construct
  misc_feature 1..192: note = Synthetic
  source 1..192: mol_type = other DNA
ctgttaatattatatttttgggatccgcaatgtccagggtatcggagtatggggtaccggaaggtgttcgggaatctgatagcgatacagactctgtgtttatgtatcagcatacagagcttatgcagaacaacgcgtcgccactcgtcgttcaaacaagaccaccggccgactcggtccgcactagcctga

SEQ ID NO: 7892 - DNA, 192 bp, synthetic construct
  misc_feature 1..192: note = Synthetic
  source 1..192: mol_type = other DNA
ctgttaatattatatttttgggatccgcagcctccagggtatcggagtatggggtaccggaaggtgttcgggaatctgatagcgatacagactctgtgtttatgtatcagcatacagagcttatgcagaacaacgcgtcgccactcgtcgttcaaacaagaccaccggccgactcggtccgcactagcctga

SEQ ID NO: 7893 - DNA, 201 bp, synthetic construct
  misc_feature 1..201: note = Synthetic
  source 1..201: mol_type = other DNA
attatctttgtttttgtgatcgaatccacaaaggccgctgatgaaaacgaaacggtggtttctgctcctgtttctactgctgcttggatctatgtttttccaaaagagaaagaacttttggatgttttatctgttttatcgttaatggagagaaattctcctgtagttatttccgactcggtccgcactagcctgaggtaa

SEQ ID NO: 7894 - DNA, 114 bp, synthetic construct
  source 1..114: mol_type = other DNA
  misc_feature 1..114: note = Synthetic
aggccgctgatgaaaacgaaacggtggtttctgctcctgtttctactgctgcttggatctatgtttttccaaaagagaaagaacttttggatgttttatctgttttatcgttaa

SEQ ID NO: 7895 - DNA, 219 bp, synthetic construct
  misc_feature 1..219: note = Synthetic
  source 1..219: mol_type = other DNA
atttcaccacaaaaccccattatctctgtttctgtgatcaaatccacaaagatggctgatgaaaacgaaacggtagtttctgctcccgtttctactgctgcttggatctatgttttcccaaaagataaagaacttttggatgttttatctgttttatcgttaatggagagaaattctcctatagttatttccgactcggtccgcactagcctgaggtaa

SEQ ID NO: 7896 - DNA, 216 bp, synthetic construct
  misc_feature 1..216: note = Synthetic
  source 1..216: mol_type = other DNA
acgcagcaggtcatttaccatatgtactatatgaccctacagctacagatgcaaaacaacaccacagacatggatatgaaaagcctgaagaattgtggacagccaaaagccgtgtgcacccattgtaaacactccccaccgtgccctcagccaggatgcgtaactaaacgcccaccagtaccacccagcgactcggtccgcactagcctgaggtaa

SEQ ID NO: 7897 - DNA, 195 bp, synthetic construct
  misc_feature 1..195: note = Synthetic
  source 1..195: mol_type = other DNA
atgtactatatgaccctacagctacaggcccaaaacaacaccacagacatggatatgaaaagcctgaagaattgtggacagccaaaagccgtgtgcacccattgtaaacactccccaccgtgccctcagccaggatgcgtaactaaacgcccaccagtaccacccagcgactcggtccgcactagcctgaggtaa

SEQ ID NO: 7898 - DNA, 168 bp, synthetic construct
  misc_feature 1..168: note = Synthetic
  source 1..168: mol_type = other DNA
atgagtctactgctagaaaacctcatcgaagaagataccatattttttgcaggaagtatatctgagtatgatgatttacaaatggttattgctggtgcaaaatccaaatttccaagatctatgctttctatttttaatatcgactcggtccgcactagcctgaggtaa

SEQ ID NO: 7899 - DNA, 159 bp, synthetic construct
  misc_feature 1..159: note = Synthetic
  source 1..159: mol_type = other DNA
ctgctagaaaacctcatcgaagaagataccatattttttgcaggaagtatatctgagtatgatgatttacaaatggttattgccggcgcaaaatccaaatttccaagatctatgctttctatttttaatatcgactcggtccgcactagcctgaggtaa

SEQ ID NO: 7900 - DNA, 159 bp, synthetic construct
  misc_feature 1..159: note = Synthetic
  source 1..159: mol_type = other DNA
ctgctagaaaacctcatcgaagaagataccatattttttgcaggaagtatatctgagtatgatgatttacaaatggttattgccggtgcaaaatccaaatttccaagatctatgctttctatttttaatatcgactcggtccgcactagcctgaggtaa

SEQ ID NO: 7901 - DNA, 159 bp, synthetic construct
  misc_feature 1..159: note = Synthetic
  source 1..159: mol_type = other DNA
ctgctagaaaacctcatcgaagaagataccatattttttgcaggaagtatatctgagtatgatgatttacaaatggttattgctggtgcaaaatccaaatttccaagatctatgctttctatttttaatatcgactcggtccgcactagcctgaggtaa

SEQ ID NO: 7902 - DNA, 225 bp, synthetic construct
  misc_feature 1..225: note = Synthetic
  source 1..225: mol_type = other DNA
atgagcagaatcatactctgttgcgaacagaacgagcgtcatcgtcgcgccggcacgatgcagctggcccagcgcctgtgcgagctgctgatgtgccgtcgcaaagccgcgcctgtggccgattacgtgctgctgcagcctagcgaggacgtggagctgcgcgagctgcaggcgtttctggacgagaactttaagcacgactcggtccgcactagcctgaggtaa

SEQ ID NO: 7903 - DNA, 96 bp, synthetic construct
  source 1..96: mol_type = other DNA
  misc_feature 1..96: note = Synthetic
acgtgctgctgcagcctagcgaggacgtggagctgcgcgagctgcaggcgtttctggacgagaactttaagcacgactcggtccgcactagcctga

SEQ ID NO: 7904 - DNA, 225 bp, synthetic construct
  source 1..225: mol_type = other DNA
  misc_feature 1..225: note = Synthetic
atgagcagaatcatactctgttgcgaacagaacgagcgtcatcgtcgcgccggcacggcccagctggcccagcgcctgtgcgagctgctgatgtgccgtcgcaaagccgcgcctgtggccgattacgtgctgctgcagcctagcgaggacgtggagctgcgcgagctgcaggcgtttctggacgagaactttaagcacgactcggtccgcactagcctgaggtaa

SEQ ID NO: 7905 - DNA, 24 bp, synthetic construct
  source 1..24: mol_type = other DNA
  misc_feature 1..24: note = Synthetic
atgctaatgctaattacaacatag

SEQ ID NO: 7906 - DNA, 120 bp, synthetic construct
  misc_feature 1..120: note = Synthetic
  source 1..120: mol_type = other DNA
atgtccaggataacatttttacggataaataaatatgaaggtggagagcgtgacgttcctgacattgttgggaataggatgcgttctatcatgctgtactattccgtcacgacccattaa

SEQ ID NO: 7907 - DNA, 120 bp, synthetic construct
  source 1..120: mol_type = other DNA
  misc_feature 1..120: note = Synthetic
atgtccaggataacatttttacggataaataaatgccaaggtggagagcgtgacgttcctgacattgttgggaataggatgcgttctatcatgctgtactattccgtcacgacccattaa

SEQ ID NO: 7908 - DNA, 15 bp, synthetic construct
  source 1..15: mol_type = other DNA
  misc_feature 1..15: note = Synthetic
atgggtacggtgtaa

SEQ ID NO: 7909 - DNA, 36 bp, synthetic construct
  misc_feature 1..36: note = Synthetic
  source 1..36: mol_type = other DNA
atattgatgggtacggtggaatctgaatctccttaa

SEQ ID NO: 7910 - DNA, 51 bp, synthetic construct
  misc_feature 1..51: note = Synthetic
  source 1..51: mol_type = other DNA
atcaacttgaacttactggtgtgtttgtttttgaagagcttcgaagtttaa

SEQ ID NO: 7911 - DNA, 207 bp, synthetic construct
  source 1..207: mol_type = other DNA
  misc_feature 1..207: note = Synthetic
gtgtttgtttttgaagagcttcgaagtttaaacccgaaaatgaagggaggaagaatcaatgccgtagccactttcactggctccggctgtagtaacagacatcctttttgtttgcataggattgtagcgataacagtagtaatcataaccgtatcgattggtttagtcgaccagttgtccgactcggtccgcactagcctgaggtaa

SEQ ID NO: 7912 - DNA, 207 bp, synthetic construct
  misc_feature 1..207: note = Synthetic
  source 1..207: mol_type = other DNA
gtgtttgtttttgaagagcttcgaagtttaaacccgaaagccaagggaggaagaatcaatgccgtagccactttcactggctccggctgtagtaacagacatcctttttgtttgcataggattgtagcgataacagtagtaatcataaccgtatcgattggtttagtcgaccagttgtccgactcggtccgcactagcctgaggtaa

SEQ ID NO: 7913 - DNA, 144 bp, synthetic construct
  misc_feature 1..144: note = Synthetic
  source 1..144: mol_type = other DNA
acgatgttcttcgcagatgatgattcattttttaagtatttggctagtcaagatgatgaatcttcattatctgatatattgcaaatcactcaatatctagactttctgttattattcgactcggtccgcactagcctgaggtaa

SEQ ID NO: 7914 - DNA, 63 bp, synthetic construct
  misc_feature 1..63: note = Synthetic
  source 1..63: mol_type = other DNA
acggagatgaaggaggtgatggagatgagggtgaggaagggcaggagtgatgtaacttgttag

SEQ ID NO: 7915 - DNA, 30 bp, synthetic construct
  source 1..30: mol_type = other DNA
  misc_feature 1..30: note = Synthetic
atgccagtagacgccgggtataaggtctag

SEQ ID NO: 7916 - DNA, 75 bp, synthetic construct
  misc_feature 1..75: note = Synthetic
  source 1..75: mol_type = other DNA
atacaagcggccatgggactagggtgttatggggtaagagggagcatcgactcggtccgcactagcctgaggtaa

SEQ ID NO: 7917 - DNA, 51 bp, synthetic construct
  source 1..51: mol_type = other DNA
  misc_feature 1..51: note = Synthetic
atgacgaagttacaaatatacatggctagtatgctcgaacatggatcctga

SEQ ID NO: 7918 - DNA, 66 bp, synthetic construct
  source 1..66: mol_type = other DNA
  misc_feature 1..66: note = Synthetic
atgctgttatcgaatatccagttgtttgtaattttagaagatatagtgagagtgacagtgatgtag

SEQ ID NO: 7919 - DNA, 222 bp, synthetic construct
  source 1..222: mol_type = other DNA
  misc_feature 1..222: note = Synthetic
atgagtaaacttcttattgagatcaatagtgatgacattaaaaagctgagagataatgaagaacccaattcacctaagataagagtgtacaatactgttatatcatacattgagagcaatagaaaaaacaacaagcaaacaatccatctgctcaaaagactaccagcagacgtgctgaagaagacaataaaaaacacatcgactcggtccgcactagcctga

SEQ ID NO: 7920 - DNA, 18 bp, synthetic construct
  misc_feature 1..18: note = Synthetic
  source 1..18: mol_type = other DNA
atgacattaaaaagctga

SEQ ID NO: 7921 - DNA, 57 bp, synthetic construct
  misc_feature 1..57: note = Synthetic
  source 1..57: mol_type = other DNA
ctgataatacttaaaaaaataataatatccgactcggtccgcactagcctgaggtaa

SEQ ID NO: 7922 - DNA, 126 bp, synthetic construct
  source 1..126: mol_type = other DNA
  misc_feature 1..126: note = Synthetic
acggccgcgaaggcctacgccgtggggcagtttgagaagcccaccgagacccctcccgaagacctggacaccctgagcctggccatcgaggcagccatccaggacctgaggaacaaatctcagtaa

SEQ ID NO: 7923 - DNA, 48 bp, synthetic construct
  misc_feature 1..48: note = Synthetic
  source 1..48: mol_type = other DNA
atagtgatttcccgtgacagtattaacgtgcgactcggtccgcactag

SEQ ID NO: 7924 - DNA, 24 bp, synthetic construct
  source 1..24: mol_type = other DNA
  misc_feature 1..24: note = Synthetic
atgaaaatgcttatgtctctgtag

SEQ ID NO: 7925 - DNA, 18 bp, synthetic construct
  misc_feature 1..18: note = Synthetic
  source 1..18: mol_type = other DNA
atgcttatgtctctgtag

SEQ ID NO: 7926 - DNA, 102 bp, synthetic construct
  misc_feature 1..102: note = Synthetic
  source 1..102: mol_type = other DNA
atgggtcaaagatcacagtctataaggctcgtccttaacatatttttcaaacggggaagatgtaaaagaaacgtccactgtcttcaacataattacgcttaa

SEQ ID NO: 7927 - DNA, 168 bp, synthetic construct
  source 1..168: mol_type = other DNA
  misc_feature 1..168: note = Synthetic
atggagttattggaccacgacatttataagggacccgtccgagaacgggtcacgtataccattcccaaccatccctatctctcgcttaccgttcatcattccagggaacttgatgttgatctgaaagacataacggaggacgactcggtccgcactagcctgaggtaa

SEQ ID NO: 7928 - DNA, 54 bp, synthetic construct
  source 1..54: mol_type = other DNA
  misc_feature 1..54: note = Synthetic
atccctatctctcgcttaccgttcatcattccagggaacttgatgttgatctga

SEQ ID NO: 7929 - DNA, 171 bp, synthetic construct
  source 1..171: mol_type = other DNA
  misc_feature 1..171: note = Synthetic
gtggccgagttattggaccacgacatttataagggacccgtccgagaacgggtcacgtataccattcccaaccatccctatctctcgcttaccgttcatcattccagggaacttgatgttgatctgaaagacataacggaggacgactcggtccgcactagcctgaggtaa

SEQ ID NO: 7930 - DNA, 27 bp, synthetic construct
  misc_feature 1..27: note = Synthetic
  source 1..27: mol_type = other DNA
atgaataaactcaactcttttgtttaa

SEQ ID NO: 7931 - DNA, 33 bp, synthetic construct
  source 1..33: mol_type = other DNA
  misc_feature 1..33: note = Synthetic
atgaaaaacatcttaagaaaccgggtcgcctaa

SEQ ID NO: 7932 - DNA, 36 bp, synthetic construct
  misc_feature 1..36: note = Synthetic
  source 1..36: mol_type = other DNA
atcttcatgtatacgactcggtccgcactagcctga

SEQ ID NO: 7933 - DNA, 27 bp, synthetic construct
  source 1..27: mol_type = other DNA
  misc_feature 1..27: note = Synthetic
atcgaattatctttgaagcctttgtag

SEQ ID NO: 7934 - DNA, 105 bp, synthetic construct
  source 1..105: mol_type = other DNA
  misc_feature 1..105: note = Synthetic
atgttgactttgagcagcgatctgaaagacagatctttctatgcgggtgatttattgaacggttttttttgtttagttgtgtgttgcatgtattttggtgtgtga

SEQ ID NO: 7935 - DNA, 105 bp, synthetic construct
  misc_feature 1..105: note = Synthetic
  source 1..105: mol_type = other DNA
atgttgactttgagcagcgatctgaaagacagatctttttatgcgggtgatttattgaacggctttttttgtttagtcgtgtgttgcatgtattttggtgtgtga

SEQ ID NO: 7936 - DNA, 201 bp, synthetic construct
  misc_feature 1..201: note = Synthetic
  source 1..201: mol_type = other DNA
atcttaaagaaaaaatttttagagcgccaagatttagagaaacatagagctgcaaggcacataaaaaaaccattgaggttacagttgaagtcagtaggagagatgacatcattcaggagtataaattacatgggaaacacaaaagacgcagcagtattcccagttactgttcctatttcgactcggtccgcactagcctga

SEQ ID NO: 7937 - DNA, 15 bp, synthetic construct
  source 1..15: mol_type = other DNA
  misc_feature 1..15: note = Synthetic
atgtgccggacttga

SEQ ID NO: 7938 - DNA, 222 bp, synthetic construct
  misc_feature 1..222: note = Synthetic
  source 1..222: mol_type = other DNA
atgatattgtgtaccagaactccacctaaaagttttaaatctttgaaaaaagtttatacattctttaaatttttagcggataaaaaaatgacattatttaagagcattctatttaacttgcaagatctatccctgtatataacggaaacggataacgcaggattaaaagaatataaacgtatggaaaagtggaccaaaacgactcggtccgcactagcctga

SEQ ID NO: 7939 - DNA, 222 bp, synthetic construct
  source 1..222: mol_type = other DNA
  misc_feature 1..222: note = Synthetic
atgatattgtgtactaggacaccacctaagagtttcaaatctctaaaaaaggtttatacattctttaaatttttagcggataaaaaaatgacattatttaagagcattctatttaacttgcaagatctatccctggatataacggaaacggataacgcaggattaaaagaatataaacgtatggaaaagtggaccaaaacgactcggtccgcactagcctga

SEQ ID NO: 7940 - DNA, 81 bp, synthetic construct
  misc_feature 1..81: note = Synthetic
  source 1..81: mol_type = other DNA
ctgcgtatgatagaatcgtctgaagcggtgtgtgaagtaacaccgcaggactgtctaatagacaaggaaaatccactttga

SEQ ID NO: 7941 - DNA, 99 bp, synthetic construct
  source 1..99: mol_type = other DNA
  misc_feature 1..99: note = Synthetic
atgtcgcgctgtgagacagtgcttcttgtctgcaccgatctaaggacgccaccgagaacacaatccttgcacctatacaaccgactcggtccgcactag

SEQ ID NO: 7942 - DNA, 123 bp, synthetic construct
  source 1..123: mol_type = other DNA
  misc_feature 1..123: note = Synthetic
ctggctctcccaaaagaaaactcatggaacatgaagactccaaagagcaatacctcaggactaaagggactgagttggagcaaggaaagggagatgtggacgactcggtccgcactagcctga

SEQ ID NO: 7943 - DNA, 12 bp, synthetic construct
  source 1..12: mol_type = other DNA
  misc_feature 1..12: note = Synthetic
acgacgccttag

SEQ ID NO: 7944 - DNA, 57 bp, synthetic construct
  source 1..57: mol_type = other DNA
  misc_feature 1..57: note = Synthetic
atgatgcgaatagtagatttcgagtctataccatggtgtcatgagaggtcttcgtaa

SEQ ID NO: 7945 - DNA, 36 bp, synthetic construct
  source 1..36: mol_type = other DNA
  misc_feature 1..36: note = Synthetic
atcaacatttgtgtgtatcgactcggtccgcactag

SEQ ID NO: 7946 - DNA, 156 bp, synthetic construct
  source 1..156: mol_type = other DNA
  misc_feature 1..156: note = Synthetic
atcatgggagtgctggctgtgattataggatttgtgattttaatatttttaattaggctgattggggtcttatccagccttttcagacaaaaacgcaggccaatctacaaatcagacgtggaaatggccgactcggtccgcactagcctgaggtaa

SEQ ID NO: 7947 - DNA, 15 bp, synthetic construct
  misc_feature 1..15: note = Synthetic
  source 1..15: mol_type = other DNA
atgggtcccgtgtag

SEQ ID NO: 7948 - DNA, 168 bp, synthetic construct
  misc_feature 1..168: note = Synthetic
  source 1..168: mol_type = other DNA
atgttaccctttgtccaagaacgaatagggttgttcatagtaaactttttcatttttaccgtagtatgtgctataacactcttggtgtgtatggctttccttacggctactagattatgtgtgcaatgtatgacaggcttcgactcggtccgcactagcctgaggtaa

SEQ ID NO: 7949 - DNA, 42 bp, synthetic construct
  misc_feature 1..42: note = Synthetic
  source 1..42: mol_type = other DNA
atggaaaacgaactgccttaccctttgtccaagaacgaatag

SEQ ID NO: 7950 - DNA, 84 bp, synthetic construct
  source 1..84: mol_type = other DNA
  misc_feature 1..84: note = Synthetic
gtgtgtatggctttccttacggctactagattatgtgtgcaatgtatgacaggcttcgactcggtccgcactagcctgaggtaa

SEQ ID NO: 7951 - DNA, 12 bp, synthetic construct
  source 1..12: mol_type = other DNA
  misc_feature 1..12: note = Synthetic
gtgaatttatag

SEQ ID NO: 7952 - DNA, 219 bp, synthetic construct
  source 1..219: mol_type = other DNA
  misc_feature 1..219: note = Synthetic
atactattcatccaacttaaacaacgaaaaacatttttcattaagtttatcatgaatgcgtataataaagccgattcgttttctttagagtctgattctatcaaagatgttatacacgattatatttgttggctcagtatgactgatgaaatgagaccatctatcggaaacgtctttaaagcgatggaaaccgactcggtccgcactagcctgaggtaa

SEQ ID NO: 7953 - DNA, 33 bp, synthetic construct
  source 1..33: mol_type = other DNA
  misc_feature 1..33: note = Synthetic
atgcgtataataaagccgattcgttttctttag

SEQ ID NO: 7954 - DNA, 27 bp, synthetic construct
  source 1..27: mol_type = other DNA
  misc_feature 1..27: note = Synthetic
acgattatatttgttggctcagtatga

SEQ ID NO: 7955 - DNA, 39 bp, synthetic construct
  source 1..39: mol_type = other DNA
  misc_feature 1..39: note = Synthetic
aagatgttatacacgattacatttgttggctcagtatga

SEQ ID NO: 7956 - DNA, 219 bp, synthetic construct
  misc_feature 1..219: note = Synthetic
  source 1..219: mol_type = other DNA
atactattcatccaacttaaacaacgaaaaacatttttcattaagtttatcgccaatgcgtataataaagccgattcgttttctttagagtctgattctatcaaagatgttatacacgattatatttgttggctcagtatgactgatgaaatgagaccatctatcggaaacgtctttaaagcgatggaaaccgactcggtccgcactagcctgaggtaa

SEQ ID NO: 7957 - DNA, 21 bp, synthetic construct
  misc_feature 1..21: note = Synthetic
  source 1..21: mol_type = other DNA
acgaaaaacatttttcattaa

SEQ ID NO: 7958 - DNA, 60 bp, synthetic construct
  misc_feature 1..60: note = Synthetic
  source 1..60: mol_type = other DNA
ctgtcttatatttataatatgctagttaatagtaagccaacttttacagatctagtataa

SEQ ID NO: 7959 - DNA, 120 bp, synthetic construct
  misc_feature 1..120: note = Synthetic
  source 1..120: mol_type = other DNA
atggttggctgcgctgctgctatctttagaggggaaaagaggaataagcccccagacaggggagtgggcttgtttgtgacttcaccaaaggtcagggcccaagggggttcgcgttgctag

SEQ ID NO: 7960 - DNA, 54 bp, synthetic construct
  source 1..54: mol_type = other DNA
  misc_feature 1..54: note = Synthetic
atgatgatactcgacatcgttgccgacagtgtgagtgtggtagcagtcatctag

SEQ ID NO: 7961 - DNA, 33 bp, synthetic construct
  misc_feature 1..33: note = Synthetic
  source 1..33: mol_type = other DNA
atggtagacccactactcagcttctcctactaa

SEQ ID NO: 7962 - DNA, 33 bp, synthetic construct
  misc_feature 1..33: note = Synthetic
  source 1..33: mol_type = other DNA
atggtagacccactactcagcttctcttactga

SEQ ID NO: 7963 - DNA, 165 bp, synthetic construct
  source 1..165: mol_type = other DNA
  misc_feature 1..165: note = Synthetic
aaggctttcacagcttgcgttctgattagcatagtcacacttagttcagctgcaatgattaatgttaatgtcactagaggtggtaaaattacattgaatgggacttatccacaaactacatggacaagatatcataacgactcggtccgcactagcctgaggtaa

SEQ ID NO: 7964 - DNA, 144 bp, synthetic construct
  misc_feature 1..144: note = Synthetic
  source 1..144: mol_type = other DNA
ctgattagcatagtcacacttagttcagctgcaatgattaatgttaatgtcactagaggtggtaaaattacattgaatgggacttatccacaaactacatggacaagatatcataacgactcggtccgcactagcctgaggtaa

SEQ ID NO: 7965 - DNA, 192 bp, synthetic construct
  source 1..192: mol_type = other DNA
  misc_feature 1..192: note = Synthetic
ttgtataaccgtgctacttacagcatggcctttttaagacaaacactgtggattttatggacatttaccatggtcattggccaggacaatgaaaagtgttcccaaaaaaccttaattggatatagacttaaaatgtctcgtgacggtgacattgcagttggagacgactcggtccgcactagcctgaggtaa

SEQ ID NO: 7966 - DNA, 123 bp, synthetic construct
  misc_feature 1..123: note = Synthetic
  source 1..123: mol_type = other DNA
atggtcattggccaggacaatgaaaagtgttcccaaaaaaccttaattggatatagacttaaaatgtctcgtgacggtgacattgcagttggagacgactcggtccgcactagcctgaggtaa

SEQ ID NO: 7967 - DNA, 222 bp, synthetic construct
  source 1..222: mol_type = other DNA
  misc_feature 1..222: note = Synthetic
atgtcgttggatgaattggtagatgacggcgatgtatgtgcattgattaagaacatgagaatgacactgtctgacggtccattgctagatagattgaatcaaccagttaataatatagaagatgctaagcgaatgatcgctattagtgccaaagtggctagagacattggtgaacgttcagaaattagatgggaagattcgactcggtccgcactagcctga

SEQ ID NO: 7968 - DNA, 222 bp, synthetic construct
  source 1..222: mol_type = other DNA
  misc_feature 1..222: note = Synthetic
atgtttctaaaagggataatgtttctcgtagaagctaccagcttttggatgacgcaccacgatgcatataaaaacgtatatttgccaaaaagaggaagttatttaaggtcttatgtagaggagtacaacaaagacacacatgtgtgtcttataaacctgcaagggcttatgcatcacgattgtaatcaaaacactactgcgactcggtccgcactagcctga

SEQ ID NO: 7969 - DNA, 87 bp, synthetic construct
  misc_feature 1..87: note = Synthetic
  source 1..87: mol_type = other DNA
aggatgactctcaaattattacactcacggcattcgttaaccaatgcctatggtgtcataaacgcgactcggtccgcactagcctga

SEQ ID NO: 7970 - DNA, 42 bp, synthetic construct
  misc_feature 1..42: note = Synthetic
  source 1..42: mol_type = other DNA
atgctagttaatagtaagccaacttttacagatctagtataa

SEQ ID NO: 7971 - DNA, 168 bp, synthetic construct
  misc_feature 1..168: note = Synthetic
  source 1..168: mol_type = other DNA
atggagggggtagaaatggacaagccgctcctctacttcgacgagatcgcgggcgcgcgcgaatacgacgcggccttcgcggagaagcacgagccgcccaagatccccggccgcggacagatgaagctgctggtctgcgacgactcggtccgcactagcctgaggtaa

SEQ ID NO: 7972 - DNA, 72 bp, synthetic construct
  source 1..72: mol_type = other DNA
  misc_feature 1..72: note = Synthetic
attagtaaaattctgaaggtccgtgtgtttcgcgggcggccaacaaaccagtcgcttaagccgagggggtag

SEQ ID NO: 7973 - DNA, 153 bp, synthetic construct
  source 1..153: mol_type = other DNA
  misc_feature 1..153: note = Synthetic
atggacaagccgctcctctacttcgacgagatcgcgggcgcgcgcgaatacgacgcggccttcgcggagaagcacgagccgcccaagatccccggccgcggacagatgaagctgctggtctgcgacgactcggtccgcactagcctgaggtaa

SEQ ID NO: 7974 - DNA, 69 bp, synthetic construct
  misc_feature 1..69: note = Synthetic
  source 1..69: mol_type = other DNA
atgcctcgatgcatgcctagccagtatcctgtcaacaccagcgactcggtccgcactagcctgaggtaa

SEQ ID NO: 7975 - DNA, 165 bp, synthetic construct
  misc_feature 1..165: note = Synthetic
  source 1..165: mol_type = other DNA
atggtcatcagtctagtcatattcgtgtctgtggcggccgccatcatcggtgtgctgtctaacgtattggagatgcttatgtatgtagaagaaaataatgaagaagatgctagaattaaggaggagcaagaactactcgactcggtccgcactagcctgaggtaa

SEQ ID NO: 7976 - DNA, 63 bp, synthetic construct
  misc_feature 1..63: note = Synthetic
  source 1..63: mol_type = other DNA
atgaagaagatgctagaattaaggaggagcaagaactactcgactcggtccgcactagcctga

SEQ ID NO: 7977 - DNA, 96 bp, synthetic construct
  misc_feature 1..96: note = Synthetic
  source 1..96: mol_type = other DNA
ctggatattttgttcaagatgatggagaatggaagttcacaggcagttcatattactaccgccaaccccgactcggtccgcactagcctgaggtaa

SEQ ID NO: 7978 - DNA, 129 bp, synthetic construct
  misc_feature 1..129: note = Synthetic
  source 1..129: mol_type = other DNA
atgtcgccgctgtccgccagaaggaggagtgaagaggcgcgtcgccgagttgcaagatggccaccccatcgatgctgccccagtgggcgtacatgcacatcgccggacaggacgcttcggagtacctga

SEQ ID NO: 7979 - DNA, 129 bp, synthetic construct
  source 1..129: mol_type = other DNA
  misc_feature 1..129: note = Synthetic
atgtcgccgctgtccgccagaaggaggagtgaagaggcgcgtcgccgagttgcaaggccgccaccccatcgatgctgccccagtgggcgtacatgcacatcgccggacaggacgcttcggagtacctga

SEQ ID NO: 7980 - DNA, 153 bp, synthetic construct
  misc_feature 1..153: note = Synthetic
  source 1..153: mol_type = other DNA
atgctgccccagtgggcgtacatgcacatcgccggacaggacgcttcggagtacctgagtccgggtctggtgcagttcgcccgcgccacagacacctacttcagtctggggaacaagtttaggaacgactcggtccgcactagcctgaggtaa

SEQ ID NO: 7981 - DNA, 159 bp, synthetic construct
  misc_feature 1..159: note = Synthetic
  source 1..159: mol_type = other DNA
atgggtgcaattaacaactactttaacggtgcattaattggcggtattatattgttagcagcgtcttgtatttttgcatttgttgatttttcaaaaaataagcccacggttactatttggagagcgttaagcgactcggtccgcactagcctgaggtaa

SEQ ID NO: 7982 - DNA, 201 bp, synthetic construct
  source 1..201: mol_type = other DNA
  misc_feature 1..201: note = Synthetic
ctgttgttagctattttaagttcaccggtgaaggccattgaacctgatctagaaattgatggaagaatcaccgaacagaggctcctcactgatcgcgctaggcgacgccaacaggatcaaaaaaataaagagttaattgatttacaaaccgtgcatcagtgtaaaaaaggactcgactcggtccgcactagcctgaggtaa

SEQ ID NO: 7983 - DNA, 114 bp, synthetic construct
  source 1..114: mol_type = other DNA
  misc_feature 1..114: note = Synthetic
atgcaggtgacttttatttacatcctagttattacatgttacgaaaacgacgtaaacgtttaccatattttttttcagatgtctctttggctgcctcgactcggtccgcactag

SEQ ID NO: 7984 - DNA, 54 bp, synthetic construct
  source 1..54: mol_type = other DNA
  misc_feature 1..54: note = Synthetic
atttcctccaaactcctcaccatagccaccaattcgcatcacttaagaaagtag

SEQ ID NO: 7985 - DNA, 57 bp, synthetic construct
  source 1..57: mol_type = other DNA
  misc_feature 1..57: note = Synthetic
atagacataagaaatttgccaatgttagtgatgaatatctacaatatatattcatag

SEQ ID NO: 7986 - DNA, 57 bp, synthetic construct
  source 1..57: mol_type = other DNA
  misc_feature 1..57: note = Synthetic
atagacataagaaatttgccaatgttagtgatgaatatctgcaatatatattcatag

SEQ ID NO: 7987 - DNA, 222 bp, synthetic construct
  misc_feature 1..222: note = Synthetic
  source 1..222: mol_type = other DNA
atgcccaaggccagacggcagcgaactcgtcgcacacgcagcaacagaccaccaacaccatggcccactttccaggtttcggacagagcctcctctatggatacccagtctacgtgtttggcgattgtgttcaagccgattggtgtcccgtttcaggtgggctttgttccacccgcctgcaccggcatgcccttctcgccgactcggtccgcactagcctga

SEQ ID NO: 7988 - DNA, 108 bp, synthetic construct
  misc_feature 1..108: note = Synthetic
  source 1..108: mol_type = other DNA
atgcccaaggccagacggcagcgaactcgtcgcacacgcagcaacagaccaccaacaccatggcgccctccggcgaccatcccgtacatcctctccgaccgaccctga

SEQ ID NO: 7989 - DNA, 192 bp, synthetic construct
  source 1..192: mol_type = other DNA
  misc_feature 1..192: note = Synthetic
acgcagcaacagaccaccaacaccatggcgccctccggcgaccatcccgtacatcctctccgaccgaccctgatcctaagggtcgcccccgtgttgtctttctcaggcctcctccagaacacgatacaccagtcaccaccacctcaggatcccccaatggcagccgactcggtccgcactagcctgaggtaa

SEQ ID NO: 7990 - DNA, 72 bp, synthetic construct
  source 1..72: mol_type = other DNA
  misc_feature 1..72: note = Synthetic
atgcccaaggccagacggcagcgaactcgtcgcacacgcagcaacagaccaccaacaccatgggtaagataa

SEQ ID NO: 7991 - DNA, 222 bp, synthetic construct
  source 1..222: mol_type = other DNA
  misc_feature 1..222: note = Synthetic
atgcccaaggccagacggcagcgaactcgtcgcacacgcagcaacagaccaccaacaccgccgcccactttccaggtttcggacagagcctcctctatggatacccagtctacgtgtttggcgattgtgttcaagccgattggtgtcccgtttcaggtgggctttgttccacccgcctgcaccggcatgcccttctcgccgactcggtccgcactagcctga

SEQ ID NO: 7992 - DNA, 108 bp, synthetic construct
  source 1..108: mol_type = other DNA
  misc_feature 1..108: note = Synthetic
atgcccaaggccagacggcagcgaactcgtcgcacacgcagcaacagaccaccaacaccgccgcgccctccggcgaccatcccgtacatcctctccgaccgaccctga

SEQ ID NO: 7993 - DNA, 192 bp, synthetic construct
  source 1..192: mol_type = other DNA
  misc_feature 1..192: note = Synthetic
acgcagcaacagaccaccaacaccgccgcgccctccggcgaccatcccgtacatcctctccgaccgaccctgatcctaagggtcgcccccgtgttgtctttctcaggcctcctccagaacacgatacaccagtcaccaccacctcaggatcccccaatggcagccgactcggtccgcactagcctgaggtaa

SEQ ID NO: 7994 - DNA, 72 bp, synthetic construct
  misc_feature 1..72: note = Synthetic
  source 1..72: mol_type = other DNA
atgcccaaggccagacggcagcgaactcgtcgcacacgcagcaacagaccaccaacaccgccggtaagataa

SEQ ID NO: 7995 - DNA, 21 bp, synthetic construct
  source 1..21: mol_type = other DNA
  misc_feature 1..21: note = Synthetic
atgttgtactctaagccgtga

SEQ ID NO: 7996 - DNA, 42 bp, synthetic construct
  misc_feature 1..42: note = Synthetic
  source 1..42: mol_type = other DNA
ataccagagttgggaggaaggaaaggaggtgatgctgaataa

SEQ ID NO: 7997 - DNA, 144 bp, synthetic construct
  source 1..144: mol_type = other DNA
  misc_feature 1..144: note = Synthetic
atcatatccatccccaaatccgccttcctgagcatgctacaaagcagcatcgatggaatgaagaccacagcggcaaaaatgtcacatacactttcagggccaggcctaatggggtgcgactcggtccgcactagcctgaggtaa

SEQ ID NO: 7998 - DNA, 78 bp, synthetic construct
  source 1..78: mol_type = other DNA
  misc_feature 1..78: note = Synthetic
ttgttagagcagaaaatatcatgttttcaatatgttgctaacatggttacatcatccgattctgaattcgcgcattaa

SEQ ID NO: 7999 - DNA, 168 bp, synthetic construct
  misc_feature 1..168: note = Synthetic
  source 1..168: mol_type = other DNA
atggacgtaatgggtgcaattaacaactactttaacggtgcattaattggcggtattatattgttagcagcgtcttgtatttttgcatttgttgatttttcaaaaaataagcccacggttactatttggagagcgttaagcgactcggtccgcactagcctgaggtaa

SEQ ID NO: 8000 - DNA, 198 bp, synthetic construct
  source 1..198: mol_type = other DNA
  misc_feature 1..198: note = Synthetic
atagatataacaacgtctggtaaaagtcactgcccgatgtttactgcaactgttataataagcggaataaaatttaaaccggcaataggaaatacaaaaagggaagcaaaatataacgcgtctaaaataactatggacgaaatattggattccgtaattataaagttttacgactcggtccgcactagcctgaggtaa

SEQ ID NO: 8001 - DNA, 33 bp, synthetic construct
  misc_feature 1..33: note = Synthetic
  source 1..33: mol_type = other DNA
atgcaatgccacagatgcctgatctttctgtaa

SEQ ID NO: 8002 - DNA, 198 bp, synthetic construct
  source 1..198: mol_type = other DNA
  misc_feature 1..198: note = Synthetic
atccaagccgtcacaccacccagaccagccatgaacagctctggtcaagaggatatcatatccatccccaaatccgccttcctgagcatgctacaaagcagcatcgatggaatgaagaccacagcggcaaaaatgtcacatacactttcagggccaggcctaatggggtgcgactcggtccgcactagcctgaggtaa

SEQ ID NO: 8003 - DNA, 84 bp, synthetic construct
  misc_feature 1..84: note = Synthetic
  source 1..84: mol_type = other DNA
atggatcctagtataattgattgtataaacagacacatcaacatgcgcatacaacgcgactcggtccgcactagcctgaggtaa

SEQ ID NO: 8004 - DNA, 48 bp, synthetic construct
  misc_feature 1..48: note = Synthetic
  source 1..48: mol_type = other DNA
atcaacatgcgcatacaacgcgactcggtccgcactagcctgaggtaa

SEQ ID NO: 8005 - DNA, 204 bp, synthetic construct
  source 1..204: mol_type = other DNA
  misc_feature 1..204: note = Synthetic
atgtctggtaattcatatagagatcgaaaaaagagatctgttgaagcatttcttgattggatggacacattcggattgcgagactccgttccggatagacgcaaattagacgatgtagcggatagtttcaatttggctatgagatacgtattagataaatggaatactaattatacaccttcgactcggtccgcactagcctga

SEQ ID NO: 8006 - DNA, 210 bp, synthetic construct
  misc_feature 1..210: note = Synthetic
  source 1..210: mol_type = other DNA
ataaaaaacttaggagctaaaggttactcagtcatatacagcatgactgagatattcaaccttgatgagagctcatggtcagtcaaagggatactagatccgttaacacctgatacctatcctgatggtcgactagtgcctaaagttcgagttatcgatccgggtctaggagatcgcaagagcgactcggtccgcactagcctgaggtaa

SEQ ID NO: 8007 - DNA, 210 bp, synthetic construct
  misc_feature 1..210: note = Synthetic
  source 1..210: mol_type = other DNA
ataaaaaacttaggagctaaaggttactcagtcatatacagcgccactgagatattcaaccttgatgagagctcatggtcagtcaaagggatactagatccgttaacacctgatacctatcctgatggtcgactagtgcctaaagttcgagttatcgatccgggtctaggagatcgcaagagcgactcggtccgcactagcctgaggtaa

SEQ ID NO: 8008 - DNA, 135 bp, synthetic construct
  misc_feature 1..135: note = Synthetic
  source 1..135: mol_type = other DNA
atgaccaaatcaaccagaatcaaaatcaactctggggcaaataacaatggagttgccaatcctcaaaacaaatgcaattaccgcaatccttgctgcagtcacactctgttttgcttccagtcaaaacatcactga

SEQ ID NO: 8009 - DNA, 135 bp, synthetic construct
  source 1..135: mol_type = other DNA
  misc_feature 1..135: note = Synthetic
atgaccaaatcaaccagaatcaaaatcaactctggggcaaataacagccgagttgccaatcctcaaaacaaatgcaattaccgcaatccttgctgcagtcacactctgttttgcttccagtcaaaacatcactga

SEQ ID NO: 8010 - DNA, 204 bp, synthetic construct
  source 1..204: mol_type = other DNA
  misc_feature 1..204: note = Synthetic
atgtctggtaattcatatagagatcgaaaaaagagatcggtcgaagcatttcttgattggatggacacattcggattgcgagactccgttccggatagacgcaaattagacgatgtagcggatagtttcaatttggctatgagatacgtattagataaatggaatactaattatacaccttcgactcggtccgcactagcctga

SEQ ID NO: 8011 - DNA, 144 bp, synthetic construct
  misc_feature 1..144: note = Synthetic
  source 1..144: mol_type = other DNA
atggacacattcggattacgagactccgttccagatagacgcaaattagacgatgtagcggatagtttcaatttggctatgcgatacgtattagataaatggaatactaattatacaccttcgactcggtccgcactagcctga

SEQ ID NO: 8012 - DNA, 204 bp, synthetic construct
  misc_feature 1..204: note = Synthetic
  source 1..204: mol_type = other DNA
atgtctggtaattcatatagagatcgaaaaaagagatctgtcgaagcattttttgattggatggacatattcggattgcgagactccgttccagatagacgcaaattagacgatgtagcggatagtttcaatttggctatgagatacgtattagataaatggaatactaattatacacattcgactcggtccgcactagcctga

SEQ ID NO: 8013 - DNA, 165 bp, synthetic construct
  source 1..165: mol_type = other DNA
  misc_feature 1..165: note = Synthetic
atggcggcgtctaaggtatacagagtgtgcgagcagactctactagcaggcgctgttcggatgatggacaaattcttgcaaaagaaaacagtttttgtgccacagcttgacaaacaggtaaggttgactggtcttcacgactcggtccgcactagcctgaggtaa

SEQ ID NO: 8014 - DNA, 195 bp, synthetic construct
  source 1..195: mol_type = other DNA
  misc_feature 1..195: note = Synthetic
atcgtcagtaccccggatgaaaagggcatagtggcgtacttcacaagaataagattccgcacactggactgcccctttagcaatgccgtcactcctgagctacacaggacgagaggaacgggacgtgggggcgctaccccttaccgcccaatccgacagaagacgctcgactcggtccgcactagcctgaggtaa

SEQ ID NO: 8015 - DNA, 15 bp, synthetic construct
  source 1..15: mol_type = other DNA
  misc_feature 1..15: note = Synthetic
atgtcctgcatgtag

SEQ ID NO: 8016 - DNA, 30 bp, synthetic construct
  source 1..30: mol_type = other DNA
  misc_feature 1..30: note = Synthetic
atgcaccgaacatccatttatagaatttag

SEQ ID NO: 8017 - DNA, 45 bp, synthetic construct
  source 1..45: mol_type = other DNA
  misc_feature 1..45: note = Synthetic
atgaagacaagaacacctccctgcttcttgaatgaccataactaa

SEQ ID NO: 8018 - DNA, 105 bp, synthetic construct
  source 1..105: mol_type = other DNA
  misc_feature 1..105: note = Synthetic
atgaccataactaaacgctctgatcatatggattacctccacaccaaaccatgcacacgagcactctcttccgtctttatgcgagcaatagatcaacatatgtaa

SEQ ID NO: 8019 - DNA, 33 bp, synthetic construct
  source 1..33: mol_type = other DNA
  misc_feature 1..33: note = Synthetic
atggccatcaattacgtgctccgaacaaactga

SEQ ID NO: 8020 - DNA, 168 bp, synthetic construct
  misc_feature 1..168: note = Synthetic
  source 1..168: mol_type = other DNA
atgctggcgctgttcgagttcctgcggtccgtggaggactgctaccggcgcaccatcttcaacttccacatcgcgcacagcgccgaggcgggcgatgtctacggcgtgctgcgcgaccgcatcctcgcggccacgcgcttcgactcggtccgcactagcctgaggtaa

SEQ ID NO: 8021 - DNA, 165 bp, synthetic construct
  misc_feature 1..165: note = Synthetic
  source 1..165: mol_type = other DNA
ctggcgctgttcgagttcctgcggtccgtggaggactgctaccggcgcaccatcttcaacttccacatcgcgcacagcgccgaggcgggcgatgtctacggcgtgctgcgcgaccgcatcctcgcggccacgcgcttcgactcggtccgcactagcctgaggtaa

SEQ ID NO: 8022 - DNA, 168 bp, synthetic construct
  misc_feature 1..168: note = Synthetic
  source 1..168: mol_type = other DNA
atggcacccaaaaagaagctgcagctgccgccgccgccacccacggacgaggaggaatactgggacagtcaggcagaggaggttttggacgaggaggaggagatgatggaagactgggacagcctagacgaagcttccgacgactcggtccgcactagcctgaggtaa

SEQ ID NO: 8023 - DNA, 171 bp, synthetic construct
  source 1..171: mol_type = other DNA
  misc_feature 1..171: note = Synthetic
agggccgcacccaaaaagaagctgcagctgccgccgccgccacccacggacgaggaggaatactgggacagtcaggcagaggaggttttggacgaggaggaggagatgatggaagactgggacagcctagacgaagcttccgacgactcggtccgcactagcctgaggtaa

SEQ ID NO: 8024 - DNA, 30 bp, synthetic construct
  misc_feature 1..30: note = Synthetic
  source 1..30: mol_type = other DNA
atgttgaacgaaactcccgctataccctga

SEQ ID NO: 8025 - DNA, 96 bp, synthetic construct
  source 1..96: mol_type = other DNA
  misc_feature 1..96: note = Synthetic
atcagtctctgtccatccattaggatcccaaatcatctcaaacccatgtctggaactgtgacttttggtccttcctatcgactcggtccgcactag

SEQ ID NO: 8026 - DNA, 96 bp, synthetic construct
  source 1..96: mol_type = other DNA
  misc_feature 1..96: note = Synthetic
atcagtctctgtccatccattaggatcccaaatcatctcaaacccgcctctggaactgtgacttttggtccttcctatcgactcggtccgcactag

SEQ ID NO: 8027 - DNA, 210 bp, synthetic construct
  misc_feature 1..210: note = Synthetic
  source 1..210: mol_type = other DNA
ctggctcccgttgttgacaaccaagggcagcggctcagcgtcacctattctcaggacaccatatccatcctgcttggtccattcacgtatgtgatcgcggacctgcttcagatggagctcattagtcactccttcgtatcctccagcttgcaggacatcgcggcctatttatatcagactagcagaccgactcggtccgcactagcctga

SEQ ID NO: 8028 - DNA, 189 bp, synthetic construct
  source 1..189: mol_type = other DNA
  misc_feature 1..189: note = Synthetic
attaacgttaactctttagcgttaaaaaattcccaagcggaacttacgtctaattgtactagaactacgtccgccgttggtgacgtacatccaggagaacctgtagtaaaagataaaataaaactgcctacctggttgggcgcggccataacactggttgtaatatcgactcggtccgcactagcctga

SEQ ID NO: 8029 - DNA, 192 bp, synthetic construct
  misc_feature 1..192: note = Synthetic
  source 1..192: mol_type = other DNA
acgattaatgttaactctttagcgttaaaaaattcccaagcagaacttacgtctaattgtactagaactacgtccgccgttggtgacgtacatccaggagaacctatagtaaaagataaaataaaactgcctacctggttgggcgcggccataacactggttgtaatatcgactcggtccgcactagcctga

SEQ ID NO: 8030 - DNA, 168 bp, synthetic construct
  misc_feature 1..168: note = Synthetic
  source 1..168: mol_type = other DNA
atggaagtccacgattttgagaccgacgagttcaatgatttcaatgaagatgactatgccacaagagaattcctgaatcccgatgagcgcatgacgtacttgaatcatgctgattacaatttgaattctcctctaattagcgactcggtccgcactagcctgaggtaa

SEQ ID NO: 8031 - DNA, 60 bp, synthetic construct
  misc_feature 1..60: note = Synthetic
  source 1..60: mol_type = other DNA
ttgagaccgacgagttcaatgatttcaatgaagatgactatgccacaagagaattcctga

SEQ ID NO: 8032 - DNA, 42 bp, synthetic construct
  misc_feature 1..42: note = Synthetic
  source 1..42: mol_type = other DNA
atgtttattgaaagcagaatcatctccggcacaacactatag

SEQ ID NO: 8033 - DNA, 96 bp, synthetic construct
  misc_feature 1..96: note = Synthetic
  source 1..96: mol_type = other DNA
ttgttcatggaggcacagagtggaggatgctcaatagtacagtactcaaacaatccttacttcgggcaacggctatatcgactcggtccgcactag

SEQ ID NO: 8034 - DNA, 168 bp, synthetic construct
  misc_feature 1..168: note = Synthetic
  source 1..168: mol_type = other DNA
atgaagaggaaggatttggaggcgcgaggaaaagcgccagggagggatttttccaccccgttctggggaagagaaggtaggagaaaggacaaggaaaagggaggggagtctccctcaaatcggcaagtgaccctgaataccgactcggtccgcactagcctgaggtaa

SEQ ID NO: 8035 - DNA, 165 bp, synthetic construct
  misc_feature 1..165: note = Synthetic
  source 1..165: mol_type = other DNA
aagaggaaggatttggaggcgcgaggaaaagcgccagggagggatttttccaccccgttctggggaagagaaggtaggagaaaggacaaggaaaagggaggggagtctccctcaaatcggcaagtgaccctgaataccgactcggtccgcactagcctgaggtaa

SEQ ID NO: 8036 - DNA, 18 bp, synthetic construct
  misc_feature 1..18: note = Synthetic
  source 1..18: mol_type = other DNA
atgcagagcaaggactga

SEQ ID NO: 8037 - DNA, 189 bp, synthetic construct
  source 1..189: mol_type = other DNA
  misc_feature 1..189: note = Synthetic
ctgatacaatatccaacagcttggcaatcagtaggacacatgatggtgattttccgtttgatgcgaacaaattttctgatcaaatttctcctaatacaccaagggatgcacatggttgccgggcatgatgccaacgatgctgtgatttcaaattcagtggctcaagcgactcggtccgcactagcctga

SEQ ID NO: 8038 - DNA, 147 bp, synthetic construct
  source 1..147: mol_type = other DNA
  misc_feature 1..147: note = Synthetic
atggtgattttccgtttgatgcgaacaaattttctgatcaaatttctcctaatacaccaagggatgcacatggttgccgggcatgatgccaacgatgctgtgatttcaaattcagtggctcaagcgactcggtccgcactagcctga

SEQ ID NO: 8039 - DNA, 213 bp, synthetic construct
  source 1..213: mol_type = other DNA
  misc_feature 1..213: note = Synthetic
attcaagtacgcccagagcaaggactgatacaatatccaacagcttggcaatcagtaggacacatgatggtgattttccgtttgatgcgaacaaattttctgatcaaatttctcctaatacaccaagggatgcacatggttgccgggcatgatgccaacgatgctgtgatttcaaattcagtggctcaagcgactcggtccgcactagcctga

SEQ ID NO: 8040 - DNA, 18 bp, synthetic construct
  misc_feature 1..18: note = Synthetic
  source 1..18: mol_type = other DNA
atgcatacaagctgttaa

SEQ ID NO: 8041 - DNA, 81 bp, synthetic construct
  source 1..81: mol_type = other DNA
  misc_feature 1..81: note = Synthetic
atggaactttcctccactcctttgggagactctccaatgggccatgtttctgacgactcggtccgcactagcctgaggtaa

SEQ ID NO: 8042 - DNA, 186 bp, synthetic construct
  misc_feature 1..186: note = Synthetic
  source 1..186: mol_type = other DNA
ttgctgccaaagtacacgatggctgggttgttgagcaccttcgacacgtttagctctaggaggagtgagagtattaataagtcaggaggaggtgctgttatccccggccagaggagcacagtctcagtgttcgtactaggcccaagtgttactgatgacgactcggtccgcactagcctgaggtaa

SEQ ID NO: 8043 - DNA, 171 bp, synthetic construct
  source 1..171: mol_type = other DNA
  misc_feature 1..171: note = Synthetic
acggccgctgggttgttgagcaccttcgacacgtttagctctaggaggagtgagagtattaataagtcaggaggaggtgctgttatccccggccagaggagcacagtctcagtgttcgtactaggcccaagtgttactgatgacgactcggtccgcactagcctgaggtaa

SEQ ID NO: 8044 - DNA, 69 bp, synthetic construct
  source 1..69: mol_type = other DNA
  misc_feature 1..69: note = Synthetic
gtggtgagcgcgtgttttatgatggccagctcgtggaccgcgcggggaaatcccagaaaggaaaactaa

SEQ ID NO: 8045 - DNA, 54 bp, synthetic construct
  misc_feature 1..54: note = Synthetic
  source 1..54: mol_type = other DNA
attacccatccagtaaaaaaaataaagattaaagagacgatgattttgaattga

SEQ ID NO: 8046 - DNA, 72 bp, synthetic construct
  source 1..72: mol_type = other DNA
  misc_feature 1..72: note = Synthetic
ataacatccatttccaagaccacagataactatattattaatctttaccacaaatatggagaggggtcgtga

SEQ ID NO: 8047 - DNA, 15 bp, synthetic construct
  source 1..15: mol_type = other DNA
  misc_feature 1..15: note = Synthetic
atgctggagaaatag

SEQ ID NO: 8048 - DNA, 189 bp, synthetic construct
  misc_feature 1..189: note = Synthetic
  source 1..189: mol_type = other DNA
aggccaagattatcagggactatggaggaagacaggaactggatagtagtccccacctggagggtgccagggaggatggagaaatggcatgcccttgtcaagtacctgaaatacagaacaaaagacctagaggaggtgcgctatgttccccaccacaaggtcgactcggtccgcactagcctgaggtaa

SEQ ID NO: 8049 - DNA, 156 bp, synthetic construct
  misc_feature 1..156: note = Synthetic
  source 1..156: mol_type = other DNA
aggaactggatagtagtccccacctggagggtgccagggaggatggagaaatggcatgcccttgtcaagtacctgaaatacagaacaaaagacctagaggaggtgcgctatgttccccaccacaaggtcgactcggtccgcactagcctgaggtaa

SEQ ID NO: 8050 - DNA, 138 bp, synthetic construct
  source 1..138: mol_type = other DNA
  misc_feature 1..138: note = Synthetic
atgacttcgcatcttgctcagagtggtgccgaaagatgtgggaagagacattcgacgatgcgtacatcaagctgtatgaactttggaaatcgagaggtcaatgaggtcaccgtacgttggaaatcgagaggtcaatga

SEQ ID NO: 8051 - DNA, 72 bp, synthetic construct
  misc_feature 1..72: note = Synthetic
  source 1..72: mol_type = other DNA
ctgctctgcccccttctttcctcaactgccttgctcctgacacactgccctgaggatggaacacgaccttga

SEQ ID NO: 8052 - DNA, 174 bp, synthetic construct
  misc_feature 1..174: note = Synthetic
  source 1..174: mol_type = other DNA
ctgaggatggaacacgaccttgagaggggcccaccgggcccgcgacggccccctcgaggaccccccctctcctcttccctaggccttgctctccttctcctcctcttggcgctactgttttggctgtacatcgttatgagtgactgcgactcggtccgcactagcctgaggtaa

SEQ ID NO: 8053 - DNA, 174 bp, synthetic construct
  source 1..174: mol_type = other DNA
  misc_feature 1..174: note = Synthetic
ctgagggccgaacacgaccttgagaggggcccaccgggcccgcgacggccccctcgaggaccccccctctcctcttccctaggccttgctctccttctcctcctcttggcgctactgttttggctgtacatcgttatgagtgactgcgactcggtccgcactagcctgaggtaa

SEQ ID NO: 8054 - DNA, 21 bp, synthetic construct
  source 1..21: mol_type = other DNA
  misc_feature 1..21: note = Synthetic
atggaatatatgggatggtaa

SEQ ID NO: 8055 - DNA, 51 bp, synthetic construct
  misc_feature 1..51: note = Synthetic
  source 1..51: mol_type = other DNA
attatagatatcgtctcgctgatccaagagtctgccactaaaggcggttga

SEQ ID NO: 8056 - DNA, 21 bp, synthetic construct
  misc_feature 1..21: note = Synthetic
  source 1..21: mol_type = other DNA
atgaacttaaacagatgttga

SEQ ID NO: 8057 - DNA, 141 bp, synthetic construct
  source 1..141: mol_type = other DNA
  misc_feature 1..141: note = Synthetic
ttgagagacagagatcctaatgataccaggaaccaattcaagaataatgctttacacgcatacctttttaatgagcattgtaataatgtcgaggtcgtcaaactactactagacagtggcactcgactcggtccgcactag

SEQ ID NO: 8058 - DNA, 84 bp, synthetic construct
  source 1..84: mol_type = other DNA
  misc_feature 1..84: note = Synthetic
atcaagtacaaaatatatcaactcatgtgtaaattcgtcactgagtttacagatagcggttgtcagaataccagtattgtttaa

SEQ ID NO: 8059 - DNA, 108 bp, synthetic construct
  source 1..108: mol_type = other DNA
  misc_feature 1..108: note = Synthetic
attactctaggatctgatttggaagcgtatttcatgtgtaagttacaggaacttaattgtgacgcgagtattctcttgaacaaggcatcacgactcggtccgcactag

SEQ ID NO: 8060 - DNA, 99 bp, synthetic construct
  misc_feature 1..99: note = Synthetic
  source 1..99: mol_type = other DNA
atgaatgagctcactttaattgacttctatttgtgctttttagcctttctgctattccttgttttaataatgcttattatacgactcggtccgcactag

SEQ ID NO: 8061 - DNA, 99 bp, synthetic construct
  source 1..99: mol_type = other DNA
  misc_feature 1..99: note = Synthetic
atgatacagtttatgatagcaatccaatatcttacatattttttgatgatatcagtttttatcacagacagatgttcgactcggtccgcactagcctga

SEQ ID NO: 8062 - DNA, 138 bp, synthetic construct
  misc_feature 1..138: note = Synthetic
  source 1..138: mol_type = other DNA
atgacttcgcatcttgctcagagtggtgccgaaagatgtgggaagagacattcgacgatgcgtacatcaagctgtatgaactttggaaatcgagaggtcaatgaggtcaccgtacgttggaaatcgaggcctcaatga

SEQ ID NO: 8063 - DNA, 39 bp, synthetic construct
  source 1..39: mol_type = other DNA
  misc_feature 1..39: note = Synthetic
ataatatcttcgacgacttccaggcaggggcgggcgtga

SEQ ID NO: 8064 - DNA, 75 bp, synthetic construct
  source 1..75: mol_type = other DNA
  misc_feature 1..75: note = Synthetic
gtgtacagtttgtcgtccattgcgaggaaaccggacatttttttatatataagccagttatttaaattattataa

SEQ ID NO: 8065 - DNA, 27 bp, synthetic construct
  misc_feature 1..27: note = Synthetic
  source 1..27: mol_type = other DNA
atcaacatacaaataagaaaaacttag

SEQ ID NO: 8066 - DNA, 54 bp, synthetic construct
  source 1..54: mol_type = other DNA
  misc_feature 1..54: note = Synthetic
acgactccggatccccttcgaaggaaagacctgatgcttttcgtgcgcgcataa

SEQ ID NO: 8067 - DNA, 33 bp, synthetic construct
  source 1..33: mol_type = other DNA
  misc_feature 1..33: note = Synthetic
ctgtgccggatgaaagcggttcgcgacgagtag

SEQ ID NO: 8068 - DNA, 66 bp, synthetic construct
  misc_feature 1..66: note = Synthetic
  source 1..66: mol_type = other DNA
atggcgctctgcagctgcgtgttctgcagcgtgtcgagcatcttcatctgctccatcacgctgtaa

SEQ ID NO: 8069 - DNA, 168 bp, synthetic construct
  misc_feature 1..168: note = Synthetic
  source 1..168: mol_type = other DNA
atgaggcgagtcgtgctaggcggagcggtggtgtatccggagggtcctcctccttcgtacgagagcgtgatgcagcagcagcaggcgacggcggtgatgcaatccccactggaggctccctttgtgcctccgcgatacctcgactcggtccgcactagcctgaggtaa

SEQ ID NO: 8070 - DNA, 180 bp, synthetic construct
  source 1..180: mol_type = other DNA
  misc_feature 1..180: note = Synthetic
gtgtctagtatagccaggcgagtcgtgctaggcggagcggtggtgtatccggagggtcctcctccttcgtacgagagcgtgatgcagcagcagcaggcgacggcggtgatgcaatccccactggaggctccctttgtgcctccgcgatacctcgactcggtccgcactagcctgaggtaa

SEQ ID NO: 8071 - DNA, 21 bp, synthetic construct
  source 1..21: mol_type = other DNA
  misc_feature 1..21: note = Synthetic
atacctaactcgagaagctaa

SEQ ID NO: 8072 - DNA, 45 bp, synthetic construct
  source 1..45: mol_type = other DNA
  misc_feature 1..45: note = Synthetic
attatgaggatccggcttcgatgccttcttgctatggttcgatga

SEQ ID NO: 8073 - DNA, 21 bp, synthetic construct
  source 1..21: mol_type = other DNA
  misc_feature 1..21: note = Synthetic
atggagttcctaggagtttga

SEQ ID NO: 8074 - DNA, 63 bp, synthetic construct
  misc_feature 1..63: note = Synthetic
  source 1..63: mol_type = other DNA
atcaggtggccacttctgattatgaggatccggcttcgatgccttcttgctatggttcgatga

SEQ ID NO: 8075 - DNA, 216 bp, synthetic construct
  misc_feature 1..216: note = Synthetic
  source 1..216: mol_type = other DNA
ctgctcacgacaagcagtacagtagacttcctcaagtgtccactcaatatggacaaatcatattacacagagcctgaagatcaaagaggtaactctcgaacatggagactattatttaggttgattgtattaacgttgctctgtctgatcgcatgtacctcagtaagtcaattgttctatccttggctcgactcggtccgcactagcctgaggtaa

SEQ ID NO: 8076 - DNA, 195 bp, synthetic construct
  misc_feature 1..195: note = Synthetic
  source 1..195: mol_type = other DNA
atctttgaggatcagcttcttccatttatgtctgacatgagctcaaaaaacatgaggtggagtcccagaattaaattccttgacctctgtgttttaattgatattaactcagaatccttgtcactcatttctcatgttgttaagtggaaaagggatgaacattacactgttccgactcggtccgcactagcctga

SEQ ID NO: 8077 - DNA, 195 bp, synthetic construct
  misc_feature 1..195: note = Synthetic
  source 1..195: mol_type = other DNA
atctttgaggatcagcttcttccatttatgtctgacatgagctcaaaaaacatgaggtggagtcccagaattaaattccttgacctctgtgttttaattgatattaactcagaatccttgtcactcgcctctcatgttgttaagtggaaaagggatgaacattacactgttccgactcggtccgcactagcctga

SEQ ID NO: 8078 - DNA, 168 bp, synthetic construct
  source 1..168: mol_type = other DNA
  misc_feature 1..168: note = Synthetic
atggcccaagccataattggtgcaattgctgcttccacagcaggtagtgctctgggagcgggcatacaggttggtggcgaagcggccctccaaagccaaaggtatcaacaaaatttgcaactgcaagaaaattcttttaacgactcggtccgcactagcctgaggtaa

SEQ ID NO: 8079 - DNA, 225 bp, synthetic construct
  source 1..225: mol_type = other DNA
  misc_feature 1..225: note = Synthetic
atcgtattaaaagccgtgtattcccccgcactaaagaataaatccccagtagacatcatgcgtactgttggtgtatttctggccacctgtcttgtcaccattttcgtcctcccaacatggggcaattgggcatacccatgttgtcacgtcactcagctccgcgctcaacaccttctcgcgttggaaaacattagcgacgactcggtccgcactagcctgaggtaa

SEQ ID NO: 8080 - DNA, 63 bp, synthetic construct
  misc_feature 1..63: note = Synthetic
  source 1..63: mol_type = other DNA
atacccatgttgtcacgtcactcagctccgcgctcaacaccttctcgcgttggaaaacattag

SEQ ID NO: 8081 - DNA, 210 bp, synthetic construct
  source 1..210: mol_type = other DNA
  misc_feature 1..210: note = Synthetic
gtgtattcccccgcactaaagaataaatccccagtagacatcatgcgtgctgttggtgtatttctggccacctgtcttgtcaccattttcgtcctcccaacatggggcaattgggcatacccatgttgtcacgtcactcagctccgcgctcaacaccttctcgcgttggaaaacattagcgacgactcggtccgcactagcctgaggtaa

SEQ ID NO: 8082 - DNA, 69 bp, synthetic construct
  misc_feature 1..69: note = Synthetic
  source 1..69: mol_type = other DNA
ttgggcatacccatgttgtcacgtcactcagctccgcgctcaacaccttctcgcgttggaaaacattag

SEQ ID NO: 8083 - DNA, 225 bp, synthetic construct
  source 1..225: mol_type = other DNA
  misc_feature 1..225: note = Synthetic
atcgtattaaaagccgtgtattcccccgcactaaagaataaatccccagtagacatcatgcgtgctgttggtgtatttctggccatctgtcttgtcaccattttcgtcctcccaacatggggcaattgggcatacccatgttgtcacgtcactcagctccgcgctcaacaccttctcgcgttggaaaacattagcgacgactcggtccgcactagcctgaggtaa

SEQ ID NO: 8084 - DNA, 57 bp, synthetic construct
  misc_feature 1..57: note = Synthetic
  source 1..57: mol_type = other DNA
atgttgtcacgtcactcagctccgcgctcaacaccttctcgcgttggaaaacattag

SEQ ID NO: 8085 - DNA, 15 bp, synthetic construct
  source 1..15: mol_type = other DNA
  misc_feature 1..15: note = Synthetic
ataaatccccagtag

SEQ ID NO: 8086 - DNA, 60 bp, synthetic construct
  source 1..60: mol_type = other DNA
  misc_feature 1..60: note = Synthetic
atggtgccgggaagaagcatccgttaccgccggagccccaaacgtcagcgagctggttga

SEQ ID NO: 8087 - DNA, 27 bp, synthetic construct
  misc_feature 1..27: note = Synthetic
  source 1..27: mol_type = other DNA
atggaaacgccttatcgacatacttaa

SEQ ID NO: 8088 - DNA, 204 bp, synthetic construct
  misc_feature 1..204: note = Synthetic
  source 1..204: mol_type = other DNA
ataaaaaatcaaaaaaaagtgcgcgtgcgggcgagcatgtaccgagaagagaaaacgcttcgcattgacctcccgcccagcgtggccagcttcatcaagcacggcttccggcaccacgtgcgctggcccacgctggcgctcggcgtggtgctggccaacactaccacagccattaacgactcggtccgcactagcctgaggtaa

SEQ ID NO: 8089 - DNA, 54 bp, synthetic construct
  misc_feature 1..54: note = Synthetic
  source 1..54: mol_type = other DNA
ctggccaacactaccacagccattaacgactcggtccgcactagcctgaggtaa

SEQ ID NO: 8090 - DNA, 168 bp, synthetic construct
  misc_feature 1..168: note = Synthetic
  source 1..168: mol_type = other DNA
atgagtagggttaatcgagcgattcaggcacaccacaaactaaaaaaagtgtaccggacactatattccggtttgcaaaacaaaaatgttcttaactacattcacaaaaagttacctctcgcgacttcttctttttctgtcgactcggtccgcactagcctgaggtaa

SEQ ID NO: 8091 - DNA, 78 bp, synthetic construct
  source 1..78: mol_type = other DNA
  misc_feature 1..78: note = Synthetic
atgttcttaactacattcacaaaaagttacctctcgcgacttcttctttttctgtcgactcggtccgcactagcctga

SEQ ID NO: 8092 - DNA, 24 bp, synthetic construct
  source 1..24: mol_type = other DNA
  misc_feature 1..24: note = Synthetic
atctctctttcatatgtgatatag

SEQ ID NO: 8093 - DNA, 153 bp, synthetic construct
  source 1..153: mol_type = other DNA
  misc_feature 1..153: note = Synthetic
gtgccgactgcaccacctgcctatgctgacattggctatcctatgagcatgcttcccatcaagtcaagcagggctgtgagtggaattcaacagaaacaagaggtccttcctggaatggatacacccgactcggtccgcactagcctgaggtaa

SEQ ID NO: 8094 - DNA, 105 bp, synthetic construct
  misc_feature 1..105: note = Synthetic
  source 1..105: mol_type = other DNA
atgggccactgtcaacgccgaaaagcgcttgtctggctgaggttggtgtcgctaatgccagttttttatctcgcttcaatgtcgactcggtccgcactagcctga

SEQ ID NO: 8095 - DNA, 33 bp, synthetic construct
  source 1..33: mol_type = other DNA
  misc_feature 1..33: note = Synthetic
attacagtctttatgattcatagtaatagttag

SEQ ID NO: 8096 - DNA, 144 bp, synthetic construct
  misc_feature 1..144: note = Synthetic
  source 1..144: mol_type = other DNA
atggcagcgacgcacacactccctctggcgtcaccgggcatggcgcgcatctgcctttacggggatttacaacgatttggtcgccgcatcgaccttcgtgtgaaaacgggggctgacgactcggtccgcactagcctgaggtaa

SEQ ID NO: 8097 - DNA, 174 bp, synthetic construct
  source 1..174: mol_type = other DNA
  misc_feature 1..174: note = Synthetic
ttgaacatgggagcccagttgagcagaaatactgccgggagccacactactggaacctacgctaccggaggctcaaccattaattataacaacattaactactacagccacgccgcttctgcagcgcagaacaaacaagacttcaccgactcggtccgcactagcctgaggtaa

SEQ ID NO: 8098 - DNA, 174 bp, synthetic construct
  misc_feature 1..174: note = Synthetic
  source 1..174: mol_type = other DNA
ttgaacgccggagcccagttgagcagaaatactgccgggagccacactactggaacctacgctaccggaggctcaaccattaattataacaacattaactactacagccacgccgcttctgcagcgcagaacaaacaagacttcaccgactcggtccgcactagcctgaggtaa

SEQ ID NO: 8099 - DNA, 57 bp, synthetic construct
  source 1..57: mol_type = other DNA
  misc_feature 1..57: note = Synthetic
acgttccggaagcactctaataagaggatgtggggaaggcagaagagcgtatggtga

SEQ ID NO: 8100 - DNA, 204 bp, synthetic construct
  misc_feature 1..204: note = Synthetic
  source 1..204: mol_type = other DNA
ttggcgatatcggtcaccggtatggccgtcatttattatctaataagccatgccaatagggaacattgtcacgctggaccagctcgagagctcggaatacgtcttccggctgctctccaccatcctgccgtcgctctgcctggactacaaggtggagcccgcgctgcagcacaccttcgtgcacgccgactcggtccgcactag

SEQ ID NO: 8101 - DNA, 12 bp, synthetic construct
  source 1..12: mol_type = other DNA
  misc_feature 1..12: note = Synthetic
atgcctgcctag

SEQ ID NO: 8102 - DNA, 177 bp, synthetic construct
  source 1..177: mol_type = other DNA
  misc_feature 1..177: note = Synthetic
atgagttacccgccgcccctcgcggttcactctctctggctgacactgctgtgtctgccacctccgcatctacactacgggggtccactactgtccctttatcaagtggtattgatgtgcctgtgtacaccggtcctgacattgaaccacccaatgttcctggcatgggacctctga

SEQ ID NO: 8103 - DNA, 111 bp, synthetic construct
  misc_feature 1..111: note = Synthetic
  source 1..111: mol_type = other DNA
atgagcatgcttcccatcaagtcaagcagggctgtgagtggaattcaacagaaacaagaggtccttcctggaatggatacacccgactcggtccgcactagcctgaggtaa

SEQ ID NO: 8104 - DNA, 144 bp, synthetic construct
  source 1..144: mol_type = other DNA
  misc_feature 1..144: note = Synthetic
atggcagcgacgcacacactccctctggcgtcaccgggcatggcgcgcatctgcctttacggggatttacaacgatttggtcgccgcatcgaccttcgtgtgaaaacggggggccacgactcggtccgcactagcctgaggtaa

SEQ ID NO: 8105 - DNA, 207 bp, synthetic construct
  misc_feature 1..207: note = Synthetic
  source 1..207: mol_type = other DNA
ctggacttcgagggcggcgtgtccaagtacgaccccgcgagccgcatgctgctggtccgcgacatggtgaccatgagcatcgttaactttttcggcgcgcgtgcgcagctcgacacctaccacgatttcgacatgcgtgtcgtggacaccgagcgcttcctgtccgcgctcgcggaggcttttgctacccgactcggtccgcactag

SEQ ID NO: 8106 - DNA, 54 bp, synthetic construct
  source 1..54: mol_type = other DNA
  misc_feature 1..54: note = Synthetic
atgttgatggtcactaccggaaggctatcctggaatcttactatcatcatttga

SEQ ID NO: 8107 - DNA, 219 bp, synthetic construct
  misc_feature 1..219: note = Synthetic
  source 1..219: mol_type = other DNA
ctggtgccactgccacgactggacgcgacacctcaaaaaagagacgcgagaatgcggttccggtaccgaaagtggagaagaccccgccgtctctttcgatctcgtagacgacgcggctatgctcgccgccgctggagacgccgagcctggggccgccggaggcgggtaaggagataccgaaggcggcgcggcgactcggtccgcactagcctgaggtaa

SEQ ID NO: 8108 - DNA, 147 bp, synthetic construct
  misc_feature 1..147: note = Synthetic
  source 1..147: mol_type = other DNA
acgcgacacctcaaaaaagagacgcgagaatgcggttccggtaccgaaagtggagaagaccccgccgtctctttcgatctcgtagacgacgcggctatgctcgccgccgctggagacgccgagcctggggccgccggaggcgggtaa

SEQ ID NO: 8109 - DNA, 219 bp, synthetic construct
  source 1..219: mol_type = other DNA
  misc_feature 1..219: note = Synthetic
ctggtgccactgccacgactggacgcgacacctcaaaaaagagacgcgagagcccggttccggtaccgaaagtggagaagaccccgccgtctctttcgatctcgtagacgacgcggctatgctcgccgccgctggagacgccgagcctggggccgccggaggcgggtaaggagataccgaaggcggcgcggcgactcggtccgcactagcctgaggtaa

SEQ ID NO: 8110 - DNA, 36 bp, synthetic construct
  misc_feature 1..36: note = Synthetic
  source 1..36: mol_type = other DNA
atgcttttcaattccggcaatattcaacaactgtag

SEQ ID NO: 8111 - DNA, 168 bp, synthetic construct
  source 1..168: mol_type = other DNA
  misc_feature 1..168: note = Synthetic
atggcgacacttcttcggagtctagctctgttcaagaggaacaaagatagaacacccctaattgcaggttcaggaggagccataagagggattaagcatgttatcgtagtcccagtacccggtgattcatcgattgtcaccgactcggtccgcactagcctgaggtaa

SEQ ID NO: 8112 - DNA, 162 bp, synthetic construct
  source 1..162: mol_type = other DNA
  misc_feature 1..162: note = Synthetic
attaggcagcacttggccaaccaccccgccgcgacccataccaaagccgtcgccttgggcaccgaagaaacacagacgactatccagcgaccaagatcagagccagacaccggaaacccctgccacaccactaagttgtcgactcggtccgcactagcctga

SEQ ID NO: 8113 - DNA, 165 bp, synthetic construct
  misc_feature 1..165: note = Synthetic
  source 1..165: mol_type = other DNA
attattaggcagcacttggccaaccaccccgccgcgacccataccaaagccgtcgccttgggcaccgaagaaacacagacgactatccagcgaccaagatcagagccagacaccggaaacccctgccacaccactaagttgtcgactcggtccgcactagcctga

SEQ ID NO: 8114 - DNA, 30 bp, synthetic construct
  source 1..30: mol_type = other DNA
  misc_feature 1..30: note = Synthetic
gtgctgccccttcctcttagggatttctga

SEQ ID NO: 8115 - DNA, 33 bp, synthetic construct
  misc_feature 1..33: note = Synthetic
  source 1..33: mol_type = other DNA
atgccaaagaaagcaatctacctgaaagcttga

SEQ ID NO: 8116 - DNA, 75 bp, synthetic construct
  misc_feature 1..75: note = Synthetic
  source 1..75: mol_type = other DNA
atagaaatcagactactacttctgcagaacaacatcttactggtaaaaagaacagcccacatgaaggaaaactaa

SEQ ID NO: 8117 - DNA, 21 bp, synthetic construct
  misc_feature 1..21: note = Synthetic
  source 1..21: mol_type = other DNA
atgctgccagcaatagtttaa

SEQ ID NO: 8118 - DNA, 198 bp, synthetic construct
  source 1..198: mol_type = other DNA
  misc_feature 1..198: note = Synthetic
atgaaaaaaacatgtaacaccactaacgcgatgaactttctccgcaagatagtgagaggttgcagggatgaggaggatcagaagcccgctctggtgtctgctcctccagatgatgatgacctatggctccctcctccagagtatgtccccttgacagagattacaggcagcgactcggtccgcactagcctgaggtaa

SEQ ID NO: 8119 - DNA, 87 bp, synthetic construct
  source 1..87: mol_type = other DNA
  misc_feature 1..87: note = Synthetic
atgaggaggatcagaagcccgctctggtgtctgctcctccagatgatgatgacctatggctccctcctccagagtatgtccccttga

SEQ ID NO: 8120 - DNA, 198 bp, synthetic construct
  misc_feature 1..198: note = Synthetic
  source 1..198: mol_type = other DNA
atgaaaaaaacatgtaacaccactaacgcggccaactttctccgcaagatagtgagaggttgcagggatgaggaggatcagaagcccgctctggtgtctgctcctccagatgatgatgacctatggctccctcctccagagtatgtccccttgacagagattacaggcagcgactcggtccgcactagcctgaggtaa

SEQ ID NO: 8121 - DNA, 57 bp, synthetic construct
  source 1..57: mol_type = other DNA
  misc_feature 1..57: note = Synthetic
acggttctgtttacgctcgacttcttctgccttcttgcagcgaaggcttccgagtga

SEQ ID NO: 8122 - DNA, 168 bp, synthetic construct
  source 1..168: mol_type = other DNA
  misc_feature 1..168: note = Synthetic
atggatcttaatcagatatctgaaacactaagtgccgtggcagaagaagagcctttaaccatgtttttacttgataaactgtacgccatacgggaaaagatcaagcaagttccattttcgattgttcgcttgtgtcatgtcgactcggtccgcactagcctgaggtaa

SEQ ID NO: 8123 - DNA, 132 bp, synthetic construct
  misc_feature 1..132: note = Synthetic
  source 1..132: mol_type = other DNA
gtggcagaagaagagcctttaaccatgtttttacttgataaactgtacgccatacgggaaaagatcaagcaagttccattttcgattgttcgcttgtgtcatgtcgactcggtccgcactagcctgaggtaa

SEQ ID NO: 8124 - DNA, 45 bp, synthetic construct
  source 1..45: mol_type = other DNA
  misc_feature 1..45: note = Synthetic
atgtccagaccaagagtgctgccccttcctcttagggatttctga

SEQ ID NO: 8125 - DNA, 33 bp, synthetic construct
  source 1..33: mol_type = other DNA
  misc_feature 1..33: note = Synthetic
ataacgacgataacgaagtatttatacttttag

SEQ ID NO: 8126 - DNA, 24 bp, synthetic construct
  source 1..24: mol_type = other DNA
  misc_feature 1..24: note = Synthetic
atgactttatcagatcaaaattaa

SEQ ID NO: 8127 - DNA, 39 bp, synthetic construct
  misc_feature 1..39: note = Synthetic
  source 1..39: mol_type = other DNA
atgtatttttttctgacgactcggtccgcactagcctga

SEQ ID NO: 8128 - DNA, 30 bp, synthetic construct
  misc_feature 1..30: note = Synthetic
  source 1..30: mol_type = other DNA
acgacgaccacgaagtatttatacttttag

SEQ ID NO: 8129 - DNA, 27 bp, synthetic construct
  source 1..27: mol_type = other DNA
  misc_feature 1..27: note = Synthetic
atgcacaatatactacccatctactaa

SEQ ID NO: 8130 - DNA, 120 bp, synthetic construct
  source 1..120: mol_type = other DNA
  misc_feature 1..120: note = Synthetic
ttgctattccacagttacgccatagacatcgaaaatgaaatcacagaattcttcaataaaatgagagatactctaccagctaaagactctaacgactcggtccgcactagcctgaggtaa

SEQ ID NO: 8131 - DNA, 30 bp, synthetic construct
  misc_feature 1..30: note = Synthetic
  source 1..30: mol_type = other DNA
atgaaatcacagaattcttcaataaaatga

SEQ ID NO: 8132 - DNA, 216 bp, synthetic construct
  misc_feature 1..216: note = Synthetic
  source 1..216: mol_type = other DNA
atgcacagagcatcagcaaattcgctgttgaactcggtttcgggatccgccatgtggcgaaaccaatcttccggcagacgcccctccaagcgtctttctgataacgaagccaccttatctacaatcaactctattttgggagccgaagacatgttaagcaaaaacttattatcgtatctacctccgaacgactcggtccgcactagcctgaggtaa

SEQ ID NO: 8133 - DNA, 168 bp, synthetic construct
  source 1..168: mol_type = other DNA
  misc_feature 1..168: note = Synthetic
atgttacgaaaccagtcagttggtaacggcgtctctaaacaggcatcagctaaagctgcaactttctcaacaatcaactccaccttagcagcagatgacatgtttaaaaggaattttgtgtcatatttaccattgaataacgactcggtccgcactagcctgaggtaa

SEQ ID NO: 8134 - DNA, 33 bp, synthetic construct
  source 1..33: mol_type = other DNA
  misc_feature 1..33: note = Synthetic
atgaatttcttcaaaattgctattaaattctaa

SEQ ID NO: 8135 - DNA, 168 bp, synthetic construct
  source 1..168: mol_type = other DNA
  misc_feature 1..168: note = Synthetic
atggtttccactaccacattccttatgcttactagtctcgcaactctgacttctgctcgctcacacctcactgtaactataggctcaaactgcacactaaaaggacctcaaggtggtcatgtcttttggtggagaatatacgactcggtccgcactagcctgaggtaa

SEQ ID NO: 8136 - DNA, 114 bp, synthetic construct
  misc_feature 1..114: note = Synthetic
  source 1..114: mol_type = other DNA
atgtctcgcgttgatacatcccgtatgaaatatttaaggtggttgaaatcacaccaatggtcacacacgcgatggaagaaccaaagacattcaacattccaactttcgtcttag

SEQ ID NO: 8137 - DNA, 168 bp, synthetic construct
  source 1..168: mol_type = other DNA
  misc_feature 1..168: note = Synthetic
atggtcacacacgcgatggaagaaccaaagacattcaacattccaactttcgtcttagacgaaaattgtaacttcatacccgaagttctctcacgcgccaacgctaaatatatcaaagatgtactcatccaagactcctacgactcggtccgcactagcctgaggtaa

SEQ ID NO: 8138 - DNA, 45 bp, synthetic construct
  source 1..45: mol_type = other DNA
  misc_feature 1..45: note = Synthetic
atgtactcatccaagactcctacgactcggtccgcactagcctga

SEQ ID NO: 8139 - DNA, 114 bp, synthetic construct
  source 1..114: mol_type = other DNA
  misc_feature 1..114: note = Synthetic
atgtctcgcgttgatacatcccgtatgaaatatttaaggtggttgaaatcacaccagccgtcacacacgcgatggaagaaccaaagacattcaacattccaactttcgtcttag

SEQ ID NO: 8140 - DNA, 153 bp, synthetic construct
  source 1..153: mol_type = other DNA
  misc_feature 1..153: note = Synthetic
atggaagaaccaaagacattcaacattccaactttcgtcttagacgaaaattgtaacttcatacccgaagttctctcacgcgccaacgctaaatatatcaaagatgtactcatccaagactcctacgactcggtccgcactagcctgaggtaa

SEQ ID NO: 8141 - DNA, 216 bp, synthetic construct
  misc_feature 1..216: note = Synthetic
  source 1..216: mol_type = other DNA
atgcacagagcatcagcaaattcgctgttgaactcggtttcgggatccatgatgtggcgaaaccaatcttccggcagacgcccctccaagcgtctttctgataacgaagccaccttatctacaatcaactctattttgggagccgaagacatgttaagcaaaaacttattatcgtatctacctccgaacgactcggtccgcactagcctgaggtaa

SEQ ID NO: 8142 - DNA, 69 bp, synthetic construct
  misc_feature 1..69: note = Synthetic
  source 1..69: mol_type = other DNA
ttggaccgttcgcctcctacgtgctctttgccttcatcacctgcatcgactcggtccgcactagcctga

SEQ ID NO: 8143 - DNA, 210 bp, synthetic construct
  source 1..210: mol_type = other DNA
  misc_feature 1..210: note = Synthetic
atgactggcagaatgtttcatcaaaagtgtctaaagagtatagcagctactcgcggtgttcctgtagttataggcaccacgaagttctatggcggttgggatgatatgttacgccgccttattaaagatgttgatagtcctgtactcatgggttgggactatcctaaatgtgatcgtgctatgccaaacatacgactcggtccgcactag

SEQ ID NO: 8144 - DNA, 198 bp, synthetic construct
  source 1..198: mol_type = other DNA
  misc_feature 1..198: note = Synthetic
atgtttcatcaaaagtgtctaaagagtatagcagctactcgcggtgttcctgtagttataggcaccacgaagttctatggcggttgggatgatatgttacgccgccttattaaagatgttgatagtcctgtactcatgggttgggactatcctaaatgtgatcgtgctatgccaaacatacgactcggtccgcactag

SEQ ID NO: 8145 - DNA, 48 bp, synthetic construct
  misc_feature 1..48: note = Synthetic
  source 1..48: mol_type = other DNA
attaccaagatgctaatgatgtatggcacaaagtacaaggacttgtag

SEQ ID NO: 8146 - DNA, 147 bp, synthetic construct
  source 1..147: mol_type = other DNA
  misc_feature 1..147: note = Synthetic
ctggtggtgaccaagtatactttgcactatttgatgcagatgatcaaaggtttggaggcaccggaatatggagtgtgcattttaaaaataaaactctttccgcccctagcagctctgcacgactcggtccgcactagcctgaggtaa

SEQ ID NO: 8147 - DNA, 60 bp, synthetic construct
  misc_feature 1..60: note = Synthetic
  source 1..60: mol_type = other DNA
atgtctcgcgttgatacatcccgtatgaaatatttaaggtggttgaaatcacaccaatga

SEQ ID NO: 8148 - DNA, 168 bp, synthetic construct
  misc_feature 1..168: note = Synthetic
  source 1..168: mol_type = other DNA
atgatcacacacgcgatggaagggtcgaagacattcaacattcccactttcgtcttagacgaaaattgtaacttcatacccgatgttctctcacgcgccaacgctaaatttatcaaagaggtactcatccgagactcctacgactcggtccgcactagcctgaggtaa

SEQ ID NO: 8149 - DNA, 183 bp, synthetic construct
  source 1..183: mol_type = other DNA
  misc_feature 1..183: note = Synthetic
ataacaattcatccaatggataaattggaactagtcaatgatggcctcaatattattgactttattcagaagaaccaaaaagaaatacagaagacatacggacgatcaagtattcaacaacccagcatcaaagatcaaacaaaagcctgggaagacgactcggtccgcactagcctgaggtaa

SEQ ID NO: 8150 - DNA, 138 bp, synthetic construct
  misc_feature 1..138: note = Synthetic
  source 1..138: mol_type = other DNA
atggcctcaatattattgactttattcagaagaaccaaaaagaaatacagaagacatacggacgatcaagtattcaacaacccagcatcaaagatcaaacaaaagcctgggaagacgactcggtccgcactagcctga

SEQ ID NO: 8151 - DNA, 159 bp, synthetic construct
  source 1..159: mol_type = other DNA
  misc_feature 1..159: note = Synthetic
ttggaactagtcaatgatggcctcaatattattgactttattcagaagaaccaaaaagaaatacagaagacatacggacgatcaagtattcaacaacccagcatcaaagatcaaacaaaagcctgggaagacgactcggtccgcactagcctgaggtaa

SEQ ID NO: 8152 - DNA, 177 bp, synthetic construct
  misc_feature 1..177: note = Synthetic
  source 1..177: mol_type = other DNA
ataggaatcatgggaaattgctttgtaaaaaaaatctcttctgacatcttcaactctaactaccagatgctctattctgagctctcagagcaagaggatttactggattttttagagacaaaatatacagattttggaattttaaaaaccgactcggtccgcactagcctgaggtaa

SEQ ID NO: 8153 - DNA, 177 bp, synthetic construct
  misc_feature 1..177: note = Synthetic
  source 1..177: mol_type = other DNA
ataggaatcgccggaaattgctttgtaaaaaaaatctcttctgacatcttcaactctaactaccagatgctctattctgagctctcagagcaagaggatttactggattttttagagacaaaatatacagattttggaattttaaaaaccgactcggtccgcactagcctgaggtaa

SEQ ID NO: 8154 - DNA, 36 bp, synthetic construct
  source 1..36: mol_type = other DNA
  misc_feature 1..36: note = Synthetic
atgaaaattattttgcatctaagtgccgtaagatga

SEQ ID NO: 8155 - DNA, 138 bp, synthetic construct
  misc_feature 1..138: note = Synthetic
  source 1..138: mol_type = other DNA
atgaatttgacagtcagcataggggacatgtggggaccaaccattctagtccatgcaggcggtcacattccgacaactgcaaaacctttcttcaactcaagaggctgggtctgtcacccccgactcggtccgcactag

SEQ ID NO: 8156 - DNA, 39 bp, synthetic construct
  source 1..39: mol_type = other DNA
  misc_feature 1..39: note = Synthetic
acggccaaaattattttgcatctaagtgccgtaagatga

SEQ ID NO: 8157 - DNA, 105 bp, synthetic construct
  misc_feature 1..105: note = Synthetic
  source 1..105: mol_type = other DNA
atggtagcgcagacacaaatccttgtatcgggcccggaccgcgtccggggagctccccgccgggagcccgagaacttcatgcggatccatgcgtgcggttggtga

SEQ ID NO: 8158 - DNA, 75 bp, synthetic construct
  misc_feature 1..75: note = Synthetic
  source 1..75: mol_type = other DNA
atcagtttaatgcagtcgtgtcccgccatgaatccaattactttgtgtgtatcgactcggtccgcactagcctga

SEQ ID NO: 8159 - DNA, 33 bp, synthetic construct
  source 1..33: mol_type = other DNA
  misc_feature 1..33: note = Synthetic
ctgtctcaactatcaagtgaatacatgatctaa

SEQ ID NO: 8160 - DNA, 165 bp, synthetic construct
  misc_feature 1..165: note = Synthetic
  source 1..165: mol_type = other DNA
atggctgattccaaattggtaagcctgaacaataatctatctggtaaaatcaaggatcaaggtaaagttatcaagaattattacggcacaatggacatcaagaaaattaacgatgggttattagatagtaagatactcgactcggtccgcactagcctgaggtaa

SEQ ID NO: 8161 - DNA, 144 bp, synthetic construct
  misc_feature 1..144: note = Synthetic
  source 1..144: mol_type = other DNA
atgcttactagtctcgcaactctgacttctgctcgctcacacctcactgtaactataggctcaaactgcacactaaaaggacctcaaggtggtcatgtcttttggtggagaatatacgactcggtccgcactagcctgaggtaa

SEQ ID NO: 8162 - DNA, 90 bp, synthetic construct
  misc_feature 1..90: note = Synthetic
  source 1..90: mol_type = other DNA
atgccaataatccagaattacgtgcgtattatgagtcaaaacaaaataaaatatacgtggaagtatatgatattatttccaatgcgatag

SEQ ID NO: 8163 - DNA, 60 bp, synthetic construct
  source 1..60: mol_type = other DNA
  misc_feature 1..60: note = Synthetic
atcgtcttcactctgctgctcggcgtcatggtcagtatcgtcgcttggtacttcacgtga

SEQ ID NO: 8164 - DNA, 33 bp, synthetic construct
  source 1..33: mol_type = other DNA
  misc_feature 1..33: note = Synthetic
attaggggccggtcagagtcgtacgtgaggtaa

SEQ ID NO: 8165 - DNA, 210 bp, synthetic construct
  source 1..210: mol_type = other DNA
  misc_feature 1..210: note = Synthetic
atgggggcccttaccgacctgggacagaacatgctctatgccaactcagcccatgcgctggacatgacttttgaggtggatcccatggatgagcccaccctgctttatcttcttttcgaagtcttcgacgtggtcagagtgcaccagccacaccgcggcgtcatcgaggccgtctacctgcgcacaccgttccgactcggtccgcactag

SEQ ID NO: 8166 - DNA, 132 bp, synthetic construct
  source 1..132: mol_type = other DNA
  misc_feature 1..132: note = Synthetic
atgagcccaccctgctttatcttcttttcgaagtcttcgacgtggtcagagtgcaccagccacaccgcggcgtcatcgaggccgtctacctgcgcacaccgttccgactcggtccgcactagcctgaggtaa

SEQ ID NO: 8167 - DNA, 216 bp, synthetic construct
  misc_feature 1..216: note = Synthetic
  source 1..216: mol_type = other DNA
atgtctatgggggcccttacagacttgggacagaatatgctctatgccaactcagctcatgctctggacatgacctttgaggtggatcccatggatgagcccaccctgctttatcttctcttcgaagttttcgacgtggtcagagtgcatcagccacaccgcggcatcatcgaggcagtctacctgcgtacaccgttccgactcggtccgcactag

SEQ ID NO: 8168 - DNA, 78 bp, synthetic construct
  source 1..78: mol_type = other DNA
  misc_feature 1..78: note = Synthetic
atcagccacaccgcggcatcatcgaggcagtctacctgcgtacaccgttccgactcggtccgcactagcctgaggtaa

SEQ ID NO: 8169 - DNA, 60 bp, synthetic construct
  misc_feature 1..60: note = Synthetic
  source 1..60: mol_type = other DNA
atgaaaaaaactagaatggaagcagaaatccaacaggaatcaaaatggattttgatctaa

SEQ ID NO: 8170 - DNA, 168 bp, synthetic construct
  misc_feature 1..168: note = Synthetic
  source 1..168: mol_type = other DNA
atggattttgatctaatagaagattctgataactggggagatgatgagtcggactttttcctgcgagacattctatctcaagaagatcagatgtcttacttaaacaccgcagattataatttgaattccccgctcatttccgactcggtccgcactagcctgaggtaa

SEQ ID NO: 8171 - DNA, 60 bp, synthetic construct
  source 1..60: mol_type = other DNA
  misc_feature 1..60: note = Synthetic
atgaaaaaaactagaatggaagcagaaatccaacaggaatcaaagccgattttgatctaa

SEQ ID NO: 8172 - DNA, 204 bp, synthetic construct
  source 1..204: mol_type = other DNA
  misc_feature 1..204: note = Synthetic
ataaaacaaaaaagctattatcaaatactgtacggaatggattcattctcttctctttttatgaaactctgttgtatatctactgataaaactggaagcaaaaaatctgatagaaagaataagaataagatcaaggattatatggaacacgattattataaaataacaatagttcccgactcggtccgcactagcctgaggtaa

SEQ ID NO: 8173 - DNA, 204 bp, synthetic construct
  source 1..204: mol_type = other DNA
  misc_feature 1..204: note = Synthetic
ataaaacaaaaaagctattatcaaatactgtacggagccgattcattctcttctctttttatgaaactctgttgtatatctactgataaaactggaagcaaaaaatctgatagaaagaataagaataagatcaaggattatatggaacacgattattataaaataacaatagttcccgactcggtccgcactagcctgaggtaa

SEQ ID NO: 8174 - DNA, 168 bp, synthetic construct
  misc_feature 1..168: note = Synthetic
  source 1..168: mol_type = other DNA
atgatggctgattccaaattggtaagcctgaacaataatctatctggtaaaatcaaggatcaaggtaaagttatcaagaattattacggcacaatggacatcaagaaaattaacgatgggttattagatagtaagatactcgactcggtccgcactagcctgaggtaa

SEQ ID NO: 8175 - DNA, 51 bp, synthetic construct
  misc_feature 1..51: note = Synthetic
  source 1..51: mol_type = other DNA
atggaacagctttcttgtggaggatcatgggttcggggtatttcacactag

SEQ ID NO: 8176 - DNA, 75 bp, synthetic construct
  source 1..75: mol_type = other DNA
  misc_feature 1..75: note = Synthetic
atgggtgctggtgtgtgtgtggggcagtgttctcacgacccatctacctcaactgaacacacggacaacggctag

SEQ ID NO: 8177 - DNA, 147 bp, synthetic construct
  misc_feature 1..147: note = Synthetic
  source 1..147: mol_type = other DNA
atagaattctcaagcaaattctggccttactttacactaatacacatgataacaacaataatctctttgctaatcataatctccatcatgattgcaatactgaacaaactctgtgaatacgactcggtccgcactagcctgaggtaa

SEQ ID NO: 8178 - DNA, 102 bp, synthetic construct
  misc_feature 1..102: note = Synthetic
  source 1..102: mol_type = other DNA
atgataacaacaataatctctttgctaatcataatctccatcatgattgcaatactgaacaaactctgtgaatacgactcggtccgcactagcctgaggtaa

SEQ ID NO: 8179 - DNA, 36 bp, synthetic construct
  source 1..36: mol_type = other DNA
  misc_feature 1..36: note = Synthetic
atggtcaccagagaaaacagaaatcgccagagttaa

SEQ ID NO: 8180 - DNA, 45 bp, synthetic construct
  source 1..45: mol_type = other DNA
  misc_feature 1..45: note = Synthetic
atgactgcgaagtttcgcttaccaataccacctggctctcggtag

SEQ ID NO: 8181 - DNA, 51 bp, synthetic construct
  source 1..51: mol_type = other DNA
  misc_feature 1..51: note = Synthetic
atgaaaataaagaggcttactgcaatggtagacgacgatgcaaacatgtag

SEQ ID NO: 8182 - DNA, 51 bp, synthetic construct
  source 1..51: mol_type = other DNA
  misc_feature 1..51: note = Synthetic
atgaaaataaagaggcttactgcaatggtagacgacggcccaaacatgtag

SEQ ID NO: 8183 - DNA, 96 bp, synthetic construct
  source 1..96: mol_type = other DNA
  misc_feature 1..96: note = Synthetic
atggcgttgtgcgcggtaatggtttcgtgcgcaggtgacgtctttgtcgaggtcagtacaaatgagaccgactcggtccgcactagcctgaggtaa

SEQ ID NO: 8184 - DNA, 33 bp, synthetic construct
  misc_feature 1..33: note = Synthetic
  source 1..33: mol_type = other DNA
atggagccgtccatattctccccatggcaatga

SEQ ID NO: 8185 - DNA, 171 bp, synthetic construct
  source 1..171: mol_type = other DNA
  misc_feature 1..171: note = Synthetic
aagatggataaagttttaaacagagaggaatctttgcagctaatggaccttctaggtcttgaaaggagtgcctgggggaatattcctctgatgagaaaggcatatttaaaaaaatgcaaggagtttcatcctgataaaggaggcgactcggtccgcactagcctgaggtaa

SEQ ID NO: 8186 - DNA, 147 bp, synthetic construct
  misc_feature 1..147: note = Synthetic
  source 1..147: mol_type = other DNA
atagaattctcaagcaaattctggccttactttacactaatacacatgatcacaacaataatctctttgctaatcataatctccatcatgattgcaatactaaacaaactttgtgaatacgactcggtccgcactagcctgaggtaa

SEQ ID NO: 8187 - DNA, 102 bp, synthetic construct
  source 1..102: mol_type = other DNA
  misc_feature 1..102: note = Synthetic
atgatcacaacaataatctctttgctaatcataatctccatcatgattgcaatactaaacaaactttgtgaatacgactcggtccgcactagcctgaggtaa

SEQ ID NO: 8188 - DNA, 51 bp, synthetic construct
  misc_feature 1..51: note = Synthetic
  source 1..51: mol_type = other DNA
atgatgaagaagacagataattttttcttcctaactgatttctctgtttaa

SEQ ID NO: 8189 - DNA, 99 bp, synthetic construct
  source 1..99: mol_type = other DNA
  misc_feature 1..99: note = Synthetic
atgctgctacaaatgaaaaaaaagctgttactaaatactattcagagccaattcattcttctcttctctttttatgaaactctgttgtatatctactga

SEQ ID NO: 8190 - DNA, 225 bp, synthetic construct
  source 1..225: mol_type = other DNA
  misc_feature 1..225: note = Synthetic
atccgcattagtaacaacactttcattttttctgaaatgtgcgatctggccatgttcatgagcagacagtatgacctatggcctcccagcaaagagaacattgtggcattttccattgcttattgcttggtaacatgcatcatcactgctatcatttgtgtgtgcatacacttgcttatagttattcgccctagacacgactcggtccgcactagcctgaggtaa

SEQ ID NO: 8191 - DNA, 180 bp, synthetic construct
  misc_feature 1..180: note = Synthetic
  source 1..180: mol_type = other DNA
atgtccggtgtcatgctgccaccttctgctctgcggctttctgtttcaggaatccaagagcttttactgcttcggcctgtgtcagttctgacgatgcacgaatgtcgcggcgaaatatctgggaacagagcggcaataagtcgtcatcccatcgactcggtccgcactagcctgaggtaa

SEQ ID NO: 8192 - DNA, 27 bp, synthetic construct
  source 1..27: mol_type = other DNA
  misc_feature 1..27: note = Synthetic
atgattagctcgagtcctgcgacgtaa

SEQ ID NO: 8193 - DNA, 183 bp, synthetic construct
  source 1..183: mol_type = other DNA
  misc_feature 1..183: note = Synthetic
ctgccgttttttcagatggctttgacttgccggtttcgcattcccgttccgtcctaccgaggaagatctcgccgtaggagaggcatggcgggcagtggccgccgacgcgctttgcgcaggcgaataaaaggcggatttttgcccgcgttgattcccgactcggtccgcactagcctgaggtaa

SEQ ID NO: 8194 - DNA, 162 bp, synthetic construct
  source 1..162: mol_type = other DNA
  misc_feature 1..162: note = Synthetic
ttgacttgccggtttcgcattcccgttccgtcctaccgaggaagatctcgccgtaggagaggcatggcgggcagtggccgccgacgcgctttgcgcaggcgaataaaaggcggatttttgcccgcgttgattcccgactcggtccgcactagcctgaggtaa

SEQ ID NO: 8195 - DNA, 90 bp, synthetic construct
  misc_feature 1..90: note = Synthetic
  source 1..90: mol_type = other DNA
ctgtaccttccattcccccagatgtatcaggatttagtattactacttcaactgataccacacctgctatatcgactcggtccgcactag

SEQ ID NO: 8196 - DNA, 90 bp, synthetic construct
  misc_feature 1..90: note = Synthetic
  source 1..90: mol_type = other DNA
ctgtaccttccattcccccagatgtatcaggatttagtattactacttcaagccataccacacctgctatatcgactcggtccgcactag

SEQ ID NO: 8197 - DNA, 36 bp, synthetic construct
  misc_feature 1..36: note = Synthetic
  source 1..36: mol_type = other DNA
atgtataaaagggtggaggcgttcccccaggagtag

SEQ ID NO: 8198 - DNA, 135 bp, synthetic construct
  source 1..135: mol_type = other DNA
  misc_feature 1..135: note = Synthetic
atcgctctgcaggcgaaaaaggtgggctcgggctgcatcatcttatcaagaccttctaaggtcagctctgcctgcaggtgcgagttggtggccagacagcagaatatttccagctgtgattcccaagtcgcttga

SEQ ID NO: 8199 - DNA, 72 bp, synthetic construct
  source 1..72: mol_type = other DNA
  misc_feature 1..72: note = Synthetic
atatttccagctgtgattcccaagtcgcttgataacacgtggtccgactcggtccgcactagcctgaggtaa

SEQ ID NO: 8200 - DNA, 45 bp, synthetic construct
  misc_feature 1..45: note = Synthetic
  source 1..45: mol_type = other DNA
atggcgacggcaacctttagtatcttaaggacgattcgtgcatag

SEQ ID NO: 8201 - DNA, 78 bp, synthetic construct
  source 1..78: mol_type = other DNA
  misc_feature 1..78: note = Synthetic
atggcaccaactcactcactgttacttgtctcctccacctgcggcgactggcttttcggccgaagtaatgtgatctga

SEQ ID NO: 8202 - DNA, 210 bp, synthetic construct
  source 1..210: mol_type = other DNA
  misc_feature 1..210: note = Synthetic
gtggcggcgggcccccccagtgtgacgtccgtggagcgcaacgccgggtgttcaactgatcaaaccatttgttctccagtcgtgggggccgactataatacctcctcgggctgccgggccttaaatgggagctaccactgcggtggtggctcttgccggtcaccaagtcgtgtgcaggtcgccgactcggtccgcactagcctgaggtaa

SEQ ID NO: 8203 - DNA, 210 bp, synthetic construct
  misc_feature 1..210: note = Synthetic
  source 1..210: mol_type = other DNA
gtggcggcgggcccccccagtgtgacgtccgtggagcgcaacgccgggtgttcaactgatcaaaccatttgttctccagtcgtgggggccgactataatacctcctcgggctgccgggccttaaatgggagctaccactgcggtggtggctcttgccggtcaccaagtcgtgtgcaggttgccgactcggtccgcactagcctgaggtaa

SEQ ID NO: 8204 - DNA, 171 bp, synthetic construct
  source 1..171: mol_type = other DNA
  misc_feature 1..171: note = Synthetic
atgagaacctcaagatcggtgttcttccctgcaaagacgccttcaagtctctgtgcgatctcggctttgagggggcctgacgggatgatagagagaacgtacgtttcgacctcggttagaagactcatctttcaatatctacctgctttcgctcgactcggtccgcactag

SEQ ID NO: 8205 - DNA, 36 bp, synthetic construct
  source 1..36: mol_type = other DNA
  misc_feature 1..36: note = Synthetic
gtgacagggccggtcttgtctttagccattccatga

SEQ ID NO: 8206 - DNA, 171 bp, synthetic construct
  misc_feature 1..171: note = Synthetic
  source 1..171: mol_type = other DNA
atgagaacctcaagatcggtgttcttccctgcaaagacatcttcaagtctctgtgcgatctcggctttgagggggcctgacgggatgatagagagaacgtacgtttcgacctcggttagaagactcatctttcaatatctacctgctttcgctcgactcggtccgcactag

SEQ ID NO: 8207 - DNA, 27 bp, synthetic construct
  misc_feature 1..27: note = Synthetic
  source 1..27: mol_type = other DNA
atgacttcgccttcttcccatttctga

SEQ ID NO: 8208 - DNA, 81 bp, synthetic construct
  misc_feature 1..81: note = Synthetic
  source 1..81: mol_type = other DNA
atatcctgcattcccgaacccatcgacgaactgtttcaaggcttcttggacgtcgctggcgtgcgactcggtccgcactag

SEQ ID NO: 8209 - DNA, 210 bp, synthetic construct
  misc_feature 1..210: note = Synthetic
  source 1..210: mol_type = other DNA
gtgggggctcgtccgggatacctacccctgccctctcgcattatgggacaaacctacggcctctcgtccagcccaatccccaaggcccccagggggttatcaacccaccattggttaaacttcctccaagccgcctaccggctacaacctgggccctccgactttgattttcagcaactacgcgactcggtccgcactagcctgaggtaa

SEQ ID NO: 8210 - DNA, 78 bp, synthetic construct
  source 1..78: mol_type = other DNA
  misc_feature 1..78: note = Synthetic
aagccgcctaccggctacaacctgggccctccgactttgattttcagcaactacgcgactcggtccgcactagcctga

SEQ ID NO: 8211 - DNA, 210 bp, synthetic construct
  source 1..210: mol_type = other DNA
  misc_feature 1..210: note = Synthetic
gtgggggctcgtccgggatacctacccctgccctctcgcattgccggacaaacctacggcctctcgtccagcccaatccccaaggcccccagggggttatcaacccaccattggttaaacttcctccaagccgcctaccggctacaacctgggccctccgactttgattttcagcaactacgcgactcggtccgcactagcctgaggtaa

SEQ ID NO: 8212 - DNA, 213 bp, synthetic construct
  source 1..213: mol_type = other DNA
  misc_feature 1..213: note = Synthetic
aagccgcagacgtatacagacggtgcctgcaccattgtgcccgctatgttaatgggactgggggtgcgcggggatgacgcgcgaatgacacctgggattcacgggctcctcctgaagatgctaaagaactggccgctttgcgctctgcgcgaggacgagctcaggtttttgcacctatccctgaccgactcggtccgcactagcctgaggtaa

SEQ ID NO: 8213 - DNA, 213 bp, synthetic construct
  source 1..213: mol_type = other DNA
  misc_feature 1..213: note = Synthetic
aagccgcagacgtatacagacggtgcctgcaccattgtgcccgctgccttaatgggactgggggtgcgcggggatgacgcgcgaatgacacctgggattcacgggctcctcctgaagatgctaaagaactggccgctttgcgctctgcgcgaggacgagctcaggtttttgcacctatccctgaccgactcggtccgcactagcctgaggtaa

SEQ ID NO: 8214 - DNA, 33 bp, synthetic construct
  source 1..33: mol_type = other DNA
  misc_feature 1..33: note = Synthetic
acggtgcctgcaccattgtgcccgctgccttaa

SEQ ID NO: 8215 - DNA, 216 bp, synthetic construct
  misc_feature 1..216: note = Synthetic
  source 1..216: mol_type = other DNA
acgaagccgcagacgtatacagacggtgcctgcaccattgtgcccgctatgttaatgggactgggggtgcgcggggatgacgcgcgaatgacacctgggattcacgggctcctcctgaagatgctaaagaactggccgctttgcgctctgcgcgaggacgagctcaggtttttgcacctatccctgaccgactcggtccgcactagcctgaggtaa

SEQ ID NO: 8216 - DNA, 216 bp, synthetic construct
  misc_feature 1..216: note = Synthetic
  source 1..216: mol_type = other DNA
acgaagccgcagacgtatacagacggtgcctgcaccattgtgcccgctatgttaatgggactgggggttcgcggggatgacgcgcgaatgacacctgggattcacgggctcctcctgaagatgctaaagaactggccgctttgcgctctgcgcgaggacgagctcaggtttttgcacctatccctgaccgactcggtccgcactagcctgaggtaa

SEQ ID NO: 8217 - DNA, 216 bp, synthetic construct
  misc_feature 1..216: note = Synthetic
  source 1..216: mol_type = other DNA
acgaagccgcagacgtatacagacggtgcctgcaccattgtgcccgctgccttaatgggactgggggtgcgcggggatgacgcgcgaatgacacctgggattcacgggctcctcctgaagatgctaaagaactggccgctttgcgctctgcgcgaggacgagctcaggtttttgcacctatccctgaccgactcggtccgcactagcctgaggtaa

SEQ ID NO: 8218 - DNA, 216 bp, synthetic construct
  source 1..216: mol_type = other DNA
  misc_feature 1..216: note = Synthetic
acgaagccgcagacgtatacagacggtgcctgcaccattgtgcccgctgccttaatgggactgggggttcgcggggatgacgcgcgaatgacacctgggattcacgggctcctcctgaagatgctaaagaactggccgctttgcgctctgcgcgaggacgagctcaggtttttgcacctatccctgaccgactcggtccgcactagcctgaggtaa

SEQ ID NO: 8219 - DNA, 210 bp, synthetic construct
  misc_feature 1..210: note = Synthetic
  source 1..210: mol_type = other DNA
gtggcggcgggcccccccagtgtgacgtccgtggagcgcaacatggggtgttcaactgatcaaaccatttgttctccagtcgtgggggccgactataatacctcctcgggctgccgggccttaaatgggagctaccactgcggtggtggctcttgccggtcaccaagtcgtgtgcaggtcgccgactcggtccgcactagcctgaggtaa

SEQ ID NO: 8220 - DNA, 210 bp, synthetic construct
  source 1..210: mol_type = other DNA
  misc_feature 1..210: note = Synthetic
gtggcggcgggcccccccagtgtgacgtccgtggagcgcaacatggggtgttcaactgatcaaaccatttgttctccagtcgtgggggccgactataatacctcctcgggctgccgggccttaaatgggagctaccactgcggtggtggctcttgccggtcaccaagtcgtgtgcaggttgccgactcggtccgcactagcctgaggtaa

SEQ ID NO: 8221 - DNA, 21 bp, synthetic construct
  source 1..21: mol_type = other DNA
  misc_feature 1..21: note = Synthetic
atgttgttcccgtcgtgttaa

SEQ ID NO: 8222 - DNA, 174 bp, synthetic construct
  misc_feature 1..174: note = Synthetic
  source 1..174: mol_type = other DNA
ataaccatggaacttttactatttgtaatgtcactcatattactaaccttctcgaaagcgatgcctcttttcgaccacaattctttctattttgaaaaacttgacgactgtatcgcagctgtaataaattgcacgagatccgaagtcgactcggtccgcactagcctgaggtaa

SEQ ID NO: 8223 - DNA, 174 bp, synthetic construct
  source 1..174: mol_type = other DNA
  misc_feature 1..174: note = Synthetic
ataaccgccgaacttttactatttgtaatgtcactcatattactaaccttctcgaaagcgatgcctcttttcgaccacaattctttctattttgaaaaacttgacgactgtatcgcagctgtaataaattgcacgagatccgaagtcgactcggtccgcactagcctgaggtaa

SEQ ID NO: 8224 - DNA, 168 bp, synthetic construct
  misc_feature 1..168: note = Synthetic
  source 1..168: mol_type = other DNA
atgggggcacaggtctcaactcagcgctccggttcccatgaaacgagcaacgtagcacgagacggatccaccatcaacttcaccaacataaactattacaaggactcctatgctgcttcagcggctaaacatgatttcaccgactcggtccgcactagcctgaggtaa

SEQ ID NO: 8225 - DNA, 120 bp, synthetic construct
  misc_feature 1..120: note = Synthetic
  source 1..120: mol_type = other DNA
atgtacacgagcgtgacacacgctggtttagctcacacaatacagcttcccggcttttttcatttagcttcacgagacatctcatattggctgaggctcaagccgacgttcaagccgtag

SEQ ID NO: 8226 - DNA, 87 bp, synthetic construct
  misc_feature 1..87: note = Synthetic
  source 1..87: mol_type = other DNA
atgacgctaacacccctagtcgcgttctggagctatcaccgacgtcagtttacttcgcaacaccgacgatatactccatcggagtag

SEQ ID NO: 8227 - DNA, 108 bp, synthetic construct
  misc_feature 1..108: note = Synthetic
  source 1..108: mol_type = other DNA
aggagtgcctgggggaatattcctctgatgagaaaggcatatttaaaaaaatgcaaggagtttcatcctgataaaggaggcgactcggtccgcactagcctgaggtaa

SEQ ID NO: 8228 - DNA, 168 bp, synthetic construct
  misc_feature 1..168: note = Synthetic
  source 1..168: mol_type = other DNA
atggaaacaatcaaagcgttggagaaatttatggagttcgatcgccttcagaaagactgctctgataaactcgatagagagaaggagagacgcatgaaggctgaacgtgaaatcgctcgtaaaaactgcggaggtaaccccgactcggtccgcactagcctgaggtaa

SEQ ID NO: 8229 - DNA, 24 bp, synthetic construct
  misc_feature 1..24: note = Synthetic
  source 1..24: mol_type = other DNA
atgcgcccatctacaccaacgtga

SEQ ID NO: 8230 - DNA, 78 bp, synthetic construct
  source 1..78: mol_type = other DNA
  misc_feature 1..78: note = Synthetic
aaggccagacgcgaattatttttgatggcgtcgggatctgatccggatttcgactcggtccgcactagcctgaggtaa

SEQ ID NO: 8231 - DNA, 102 bp, synthetic construct
  source 1..102: mol_type = other DNA
  misc_feature 1..102: note = Synthetic
atgttgatgaaagctggctacaggaaggccagacgcgaattatttttgatggcgtcgggatctgatccggatttcgactcggtccgcactagcctgaggtaa

SEQ ID NO: 8232 - DNA, 195 bp, synthetic construct
  source 1..195: mol_type = other DNA
  misc_feature 1..195: note = Synthetic
attggtcttgtctttagccattccatgagaacctcaagatcggtgttcttccctgcaaagacatcttcaagtctctgtgcgatctcggctttgagggggcctgacgggatgatagagagaacgtacgtttcgacctcggttagaagactcatctttcaatgcctacctgctttcgctcgactcggtccgcactag

SEQ ID NO: 8233 - DNA, 219 bp, synthetic construct
  misc_feature 1..219: note = Synthetic
  source 1..219: mol_type = other DNA
atgacgacagctatctcgatgatgaagatgcagactggactgcgaccgggcaggggcagaaatctgccggagataccagcttcacgctggcgtggatgcccggagagcaggggcagcaggcgctgctggcgtggtttaatgaaggcgatacccgtgcctataaaatccgcttcccgaacggcacggtcgatgtgttcgactcggtccgcactagcctga

SEQ ID NO: 8234 - DNA, 219 bp, synthetic construct
  source 1..219: mol_type = other DNA
  misc_feature 1..219: note = Synthetic
atgacgacagctatctcgatgatgaagatgcagactggactgcgaccgggcaggggcagaaatctgccggagataccagcttcacgctggcgtggatgcccggagagcaggggcagcaggcgctgctggcgtggtttaatgaaggcgatacccgtgcctataaaatccgcttcccgaacggcacggtcggcctgttcgactcggtccgcactagcctga

SEQ ID NO: 8235 - DNA, 171 bp, synthetic construct
  misc_feature 1..171: note = Synthetic
  source 1..171: mol_type = other DNA
ctgcacgtattgccgccgcttctgccgcacttttgctctgcgatgctgataccgcacttcccgcagcctctgtcgccttcgtggatgccgttgacgcactccccgccgccgctgtttttgcgtctgccgcggcagaggcgctccgttccgactcggtccgcactagcctga

SEQ ID NO: 8236 - DNA, 168 bp, synthetic construct
  source 1..168: mol_type = other DNA
  misc_feature 1..168: note = Synthetic
atggatcccacccgaggtctgtgtgccctctccacgcacgacctggcaaaatttcacagtctccccccggctagaaaggcggcaggtaagcgagcgcaccttaggtgttactccaagctgctctctcttaagagctgggacgactcggtccgcactagcctgaggtaa

SEQ ID NO: 8237 - DNA, 15 bp, synthetic construct
  source 1..15: mol_type = other DNA
  misc_feature 1..15: note = Synthetic
atccgccggtggtag

SEQ ID NO: 8238 - DNA, 69 bp, synthetic construct
  misc_feature 1..69: note = Synthetic
  source 1..69: mol_type = other DNA
atgagacgcgcgaaaacgccggcgtggcgctctacgcggtcgcctttgcctgggttctttccatcgtag

SEQ ID NO: 8239 - DNA, 210 bp, synthetic construct
  source 1..210: mol_type = other DNA
  misc_feature 1..210: note = Synthetic
ctgatactggatcgtctgtcggccatatcttacggccgtgatccctggcatcatgagacgcgcgaaaacgccggcgtggcgctctacgcggtcgcctttgcctgggttctttccatcgtagccgctgtgcccaccgccgctacgggttcactggactaccgttggctaggctgtcagatccctatacagtatcgactcggtccgcactag

SEQ ID NO: 8240 - DNA, 96 bp, synthetic construct
  misc_feature 1..96: note = Synthetic
  source 1..96: mol_type = other DNA
atgggccatgtttctgatttgttctcaaagaactctttggtcgcctctttctctttgacagaggactcagcttcaatcatactctcaatttgttga

SEQ ID NO: 8241 - DNA, 30 bp, synthetic construct
  misc_feature 1..30: note = Synthetic
  source 1..30: mol_type = other DNA
aagaacacgactcggtccgcactagcctga

SEQ ID NO: 8242 - DNA, 180 bp, synthetic construct
  misc_feature 1..180: note = Synthetic
  source 1..180: mol_type = other DNA
ataaattttgatgccgccagttccagcaattacaacacatacatgcaatacttgaacccccctccttatgctgatcacggtgcaaaccagttgatcccggcggatcagctatcaaatcagcagggtataactccaaattacgtgggtgatttcgactcggtccgcactagcctgaggtaa

SEQ ID NO: 8243 - DNA, 60 bp, synthetic construct
  source 1..60: mol_type = other DNA
  misc_feature 1..60: note = Synthetic
atgttgaccaccaccgccatgaccaccaaaaagctagccgtcacgactagaaatgtgtag

SEQ ID NO: 8244 - DNA, 48 bp, synthetic construct
  source 1..48: mol_type = other DNA
  misc_feature 1..48: note = Synthetic
ctgatactggatcgtctgtcggccatatcttacggccgtgatctctga

SEQ ID NO: 8245 - DNA, 54 bp, synthetic construct
  source 1..54: mol_type = other DNA
  misc_feature 1..54: note = Synthetic
acgccggcgtggcgctctacgcggtcgcctttgcctgggttctttccatcgtag

SEQ ID NO: 8246 - DNA, 84 bp, synthetic construct
  misc_feature 1..84: note = Synthetic
  source 1..84: mol_type = other DNA
gtgatctctggcatcatgagacgcacgaaaacgccggcgtggcgctctacgcggtcgcctttgcctgggttctttccatcgtag

SEQ ID NO: 8247 - DNA, 69 bp, synthetic construct
  source 1..69: mol_type = other DNA
  misc_feature 1..69: note = Synthetic
atgagacgcgtgaaaacgccggcgtggcgctctacgcggtcgcctttgcctgggttctttccatcgtag

SEQ ID NO: 8248 - DNA, 69 bp, synthetic construct
  misc_feature 1..69: note = Synthetic
  source 1..69: mol_type = other DNA
atgagacgggcgaaaacgccggcgtggcgctctacgcggtcgcctttgcctgggttctttccatcgtag

SEQ ID NO: 8249 - DNA, 69 bp, synthetic construct
  misc_feature 1..69: note = Synthetic
  source 1..69: mol_type = other DNA
atgagatgcgcgaaaacgccggcgtggcgctctacgcggtcgcctttgcctgggttctttccatcgtag

SEQ ID NO: 8250 - DNA, 36 bp, synthetic construct
  misc_feature 1..36: note = Synthetic
  source 1..36: mol_type = other DNA
gtgactctgcttgtggtacagcaaatccaaaactaa

SEQ ID NO: 8251 - DNA, 39 bp, synthetic construct
  source 1..39: mol_type = other DNA
  misc_feature 1..39: note = Synthetic
attatctcaagggacacgccaattaacgtcatccaatga

SEQ ID NO: 8252 - DNA, 36 bp, synthetic construct
  source 1..36: mol_type = other DNA
  misc_feature 1..36: note = Synthetic
atgagtcacaaaccgactcggtccgcactagcctga

SEQ ID NO: 8253 - DNA, 96 bp, synthetic construct
  source 1..96: mol_type = other DNA
  misc_feature 1..96: note = Synthetic
atgggccatgtttctgatttgttctcaaagaactctttggtcatgtctttctctttgacagaggactcagcttcaatcatactctcaatttgttga

SEQ ID NO: 8254 - DNA, 30 bp, synthetic construct
  misc_feature 1..30: note = Synthetic
  source 1..30: mol_type = other DNA
atgcaccgaacatccatttctagaatttag

SEQ ID NO: 8255 - DNA, 168 bp, synthetic construct
  misc_feature 1..168: note = Synthetic
  source 1..168: mol_type = other DNA
atgaatcccaaacattggggaagagccgtatggaccattatttttatagtactttctcaagcgggtttagacggcaacatagaagcgtgtaaacgaaaactatatactatagtcagcacgcttccatgtcctgcatgtagcgactcggtccgcactagcctgaggtaa

SEQ ID NO: 8256 - DNA, 54 bp, synthetic construct
  source 1..54: mol_type = other DNA
  misc_feature 1..54: note = Synthetic
ctggcctgcatacctttggatatagagggtcaccaatttttattttgtttttag

SEQ ID NO: 8257 - DNA, 168 bp, synthetic construct
  misc_feature 1..168: note = Synthetic
  source 1..168: mol_type = other DNA
atgctacgtacctgcgacataacccacataaaaaacaactatgaagcgatcatatggaaaggcgaaagaaactgctctacgatatctaccaaataccccaacagtgccatcttctataagaagcgttttataatgctcaccgactcggtccgcactagcctgaggtaa

SEQ ID NO: 8258 - DNA, 93 bp, synthetic construct
  source 1..93: mol_type = other DNA
  misc_feature 1..93: note = Synthetic
atgaagcgatcatatggaaaggcgaaagaaactgctctacgatatctaccaaataccccaacagtgccatcttctataagaagcgttttataa

SEQ ID NO: 8259 - DNA, 60 bp, synthetic construct
  misc_feature 1..60: note = Synthetic
  source 1..60: mol_type = other DNA
acggccgcgctgcgaggcatacagcatgttcaacgcggtcaaggccgatatgcccgatga

SEQ ID NO: 8260 - DNA, 168 bp, synthetic construct
  misc_feature 1..168: note = Synthetic
  source 1..168: mol_type = other DNA
atgttcaacgcggtcaaggccgatatgcccgatgacccgatgctcgcccgcaggtatgggcagtgtctggaactggcactggaggcctgccaggacacgcccgagcaatttaagctggtggagacgccactcaagagcttcgactcggtccgcactagcctgaggtaa

SEQ ID NO: 8261 - DNA, 60 bp, synthetic construct
  source 1..60: mol_type = other DNA
  misc_feature 1..60: note = Synthetic
acggccgcgctgcgaggcatacagcgccttcaacgcggtcaaggccgatatgcccgatga

SEQ ID NO: 8262 - DNA, 153 bp, synthetic construct
  misc_feature 1..153: note = Synthetic
  source 1..153: mol_type = other DNA
aaggccgatatgcccgatgacccgatgctcgcccgcaggtatgggcagtgtctggaactggcactggaggcctgccaggacacgcccgagcaatttaagctggtggagacgccactcaagagcttcgactcggtccgcactagcctgaggtaa

SEQ ID NO: 8263 - DNA, 216 bp, synthetic construct
  misc_feature 1..216: note = Synthetic
  source 1..216: mol_type = other DNA
gtggctggagaagcgcagcgtcggcgagcgaaggtagaggagtccgtcatggacgacctacgggacacgctgatggcctacggctgcatcgccatccgagccggggacttcaacggtctcaacgactttctggagcaggaatgcggcacccggctgcacgtggcctggcccgaacgctgcttcatccacgactcggtccgcactagcctgaggtaa

SEQ ID NO: 8264 - DNA, 216 bp, synthetic construct
  misc_feature 1..216: note = Synthetic
  source 1..216: mol_type = other DNA
gtggctggagaagcgcagcgtcggcgagcgaaggtagaggagtccgtcgccgacgacctacgggacacgctgatggcctacggctgcatcgccatccgagccggggacttcaacggtctcaacgactttctggagcaggaatgcggcacccggctgcacgtggcctggcccgaacgctgcttcatccacgactcggtccgcactagcctgaggtaa

SEQ ID NO: 8265 - DNA, 171 bp, synthetic construct
  source 1..171: mol_type = other DNA
  misc_feature 1..171: note = Synthetic
ctgatgaacaaccaacggaagaagacgggaaaaccgtctatcaatatgctgaaacgcgtgagaaaccgtgtgtcaactggatcacagttggcgaagagattctcaaaaggactgctgaacggccagggaccaatgaaattggtcgactcggtccgcactagcctgaggtaa

SEQ ID NO: 8266 - DNA, 171 bp, synthetic construct
  misc_feature 1..171: note = Synthetic
  source 1..171: mol_type = other DNA
ctggccaacaaccaacggaagaagacgggaaaaccgtctatcaatatgctgaaacgcgtgagaaaccgtgtgtcaactggatcacagttggcgaagagattctcaaaaggactgctgaacggccagggaccaatgaaattggtcgactcggtccgcactagcctgaggtaa

SEQ ID NO: 8267 - DNA, 75 bp, synthetic construct
  misc_feature 1..75: note = Synthetic
  source 1..75: mol_type = other DNA
attaggataccaatcagcattttgaagcccaaacgctttttagtgaagggcgatctgcgggcgaagttctattaa

SEQ ID NO: 8268 - DNA, 168 bp, synthetic construct
  misc_feature 1..168: note = Synthetic
  source 1..168: mol_type = other DNA
atgcaggctttaggaatcaagacagaacattttataattatgtgtctacttagcggacatgctgtttttaccctatggtataccgctcgtgtaaagtttgaacatgagtgtgtgtatgcaaccacggtgattaatggtggcgactcggtccgcactagcctgaggtaa

SEQ ID NO: 8269 - DNA, 33 bp, synthetic construct
  source 1..33: mol_type = other DNA
  misc_feature 1..33: note = Synthetic
ctgacgccttcatacccaactttgacgcagtga

SEQ ID NO: 8270 - DNA, 42 bp, synthetic construct
  misc_feature 1..42: note = Synthetic
  source 1..42: mol_type = other DNA
atcggaagcttgcttaacgtagttctaacagttttttattag

SEQ ID NO: 8271 - DNA, 171 bp, synthetic construct
  misc_feature 1..171: note = Synthetic
  source 1..171: mol_type = other DNA
ctgatgaacaaccaacggaaaaagacgggtcgaccgtctttcaatatgctgaaacgcgcgagaaaccgcgtgtcaactgtttcacagttggcgaagagattctcaaaaggattgctttcaggccaaggacccatgaaattggtcgactcggtccgcactagcctgaggtaa

SEQ ID NO: 8272 - DNA, 171 bp, synthetic construct
  source 1..171: mol_type = other DNA
  misc_feature 1..171: note = Synthetic
ctggccaacaaccaacggaaaaagacgggtcgaccgtctttcaatatgctgaaacgcgcgagaaaccgcgtgtcaactgtttcacagttggcgaagagattctcaaaaggattgctttcaggccaaggacccatgaaattggtcgactcggtccgcactagcctgaggtaa

SEQ ID NO: 8273 - DNA, 51 bp, synthetic construct
  source 1..51: mol_type = other DNA
  misc_feature 1..51: note = Synthetic
atgatgaagcggcacgttggaacagaattggcatcactgaagagctggtga

SEQ ID NO: 8274 - DNA, 111 bp, synthetic construct
  misc_feature 1..111: note = Synthetic
  source 1..111: mol_type = other DNA
aagtggatgcccctgcgagacgcatacgatatcaggtcagacacttttctccacacgcatccgaaatcggacattatgggcactgattacatttcggagatgccagcctaa

SEQ ID NO: 8275 - DNA, 204 bp, synthetic construct
  source 1..204: mol_type = other DNA
  misc_feature 1..204: note = Synthetic
gtgtctgtaattaaatcgcgggccctcatcccagagatggatcgggtagaatcagaagaacccatggatggattcgaatcgcccgtattctccgaaaatacatcttctaattccggatggtgttccgacgcattttccgattcgtacatcgcttataatccagcccttctgctaaacgactcggtccgcactagcctgaggtaa

SEQ ID NO: 8276 - DNA, 204 bp, synthetic construct
  misc_feature 1..204: note = Synthetic
  source 1..204: mol_type = other DNA
gtgtctgtaattaaatcgcgggccctcatcccagaggccgatcgggtagaatcagaagaacccatggatggattcgaatcgcccgtattctccgaaaatacatcttctaattccggatggtgttccgacgcattttccgattcgtacatcgcttataatccagcccttctgctaaacgactcggtccgcactagcctgaggtaa

SEQ ID NO: 8277 - DNA, 198 bp, synthetic construct
  misc_feature 1..198: note = Synthetic
  source 1..198: mol_type = other DNA
ctgattttgagaggggaaatcgggactaggatgcagttgctctgtgttttttgcctggtgttgctatgggaggtgggggctgccagcctcagcgaggttaagctgcacctggacatagaggggcatgcttcgcattacaccatcccatggaccgaactgatggcaaaggtcgactcggtccgcactagcctgaggtaa

SEQ ID NO: 8278 - DNA, 198 bp, synthetic construct
  misc_feature 1..198: note = Synthetic
  source 1..198: mol_type = other DNA
ctgattttgagaggggaaatcgggactaggatgcagttgctctgtgttttttgcctggtgttgctatgggaggtgggggctgccagccttagcgaggttaagctgcacctggacatagaggggcatgcttcgcattacaccatcccatggaccgaactgatggcaaaggtcgactcggtccgcactagcctgaggtaa

SEQ ID NO: 8279 - DNA, 198 bp, synthetic construct
  source 1..198: mol_type = other DNA
  misc_feature 1..198: note = Synthetic
ctgattttgagaggggaaatcgggactaggatgcagttgctctgtgttttttgcctggtgttgctatgggaggtgggggctgccagtctcagcgaggttaagctgcacctggacatagaggggcatgcttcgcattacaccatcccatggaccgaactgatggcaaaggtcgactcggtccgcactagcctgaggtaa

SEQ ID NO: 8280 - DNA, 144 bp, synthetic construct
  misc_feature 1..144: note = Synthetic
  source 1..144: mol_type = other DNA
atagctatctcgtctctcaacaaactacgaggattcaaaaagagagtcaatgtttttgaaactagaatcgtaatggataatgacgataacattctaggaatgttgttttcggatagagttccgactcggtccgcactagcctga

SEQ ID NO: 8281 - DNA, 30 bp, synthetic construct
  misc_feature 1..30: note = Synthetic
  source 1..30: mol_type = other DNA
ctgatgctttttccagggaatattctatga

SEQ ID NO: 8282 - DNA, 138 bp, synthetic construct
  source 1..138: mol_type = other DNA
  misc_feature 1..138: note = Synthetic
atctcgtctctcaacaaactacgaggattcaaaaagagagtcaatgtttttgaaaccagaatcgtaatggataatgacgataacattctaggaatgttgttttcggatagagttccgactcggtccgcactagcctga

SEQ ID NO: 8283 - DNA, 45 bp, synthetic construct
  misc_feature 1..45: note = Synthetic
  source 1..45: mol_type = other DNA
atgttccttctaattaccattattgcccgtcaagctcagatttaa

SEQ ID NO: 8284 - DNA, 177 bp, synthetic construct
  source 1..177: mol_type = other DNA
  misc_feature 1..177: note = Synthetic
attttgcacattaagccgcattctcggacagtgcctccgcggacgcgccctggagcgcagtcccagcaccgcgccgcgacgagaccacggtcctgggcgacgaaatctactttaactacgtgtacgggcagctcgagctcagcgacagttggatcgactcggtccgcactagcctga

SEQ ID NO: 8285 - DNA, 27 bp, synthetic construct
  misc_feature 1..27: note = Synthetic
  source 1..27: mol_type = other DNA
ttgctcattgatgaagtggaaatctga

SEQ ID NO: 8286 - DNA, 198 bp, synthetic construct
  misc_feature 1..198: note = Synthetic
  source 1..198: mol_type = other DNA
ctgattttgagaggggaaatcgggactagggcccagttgctctgtgttttttgcctggtgttgctatgggaggtgggggctgccagcctcagcgaggttaagctgcacctggacatagaggggcatgcttcgcattacaccatcccatggaccgaactgatggcaaaggtcgactcggtccgcactagcctgaggtaa

SEQ ID NO: 8287 - DNA, 198 bp, synthetic construct
  misc_feature 1..198: note = Synthetic
  source 1..198: mol_type = other DNA
ctgattttgagaggggaaatcgggactagggcccagttgctctgtgttttttgcctggtgttgctatgggaggtgggggctgccagccttagcgaggttaagctgcacctggacatagaggggcatgcttcgcattacaccatcccatggaccgaactgatggcaaaggtcgactcggtccgcactagcctgaggtaa

SEQ ID NO: 8288 - DNA, 198 bp, synthetic construct
  misc_feature 1..198: note = Synthetic
  source 1..198: mol_type = other DNA
ctgattttgagaggggaaatcgggactagggcccagttgctctgtgttttttgcctggtgttgctatgggaggtgggggctgccagtctcagcgaggttaagctgcacctggacatagaggggcatgcttcgcattacaccatcccatggaccgaactgatggcaaaggtcgactcggtccgcactagcctgaggtaa

SEQ ID NO: 8289 - DNA, 36 bp, synthetic construct
  source 1..36: mol_type = other DNA
  misc_feature 1..36: note = Synthetic
atggccttgtggactaaaatcaatgaaaatcaatga

SEQ ID NO: 8290 - DNA, 168 bp, synthetic construct
  misc_feature 1..168: note = Synthetic
  source 1..168: mol_type = other DNA
atgaaccagcacaacgtggagtacctggccaagatcctgtgtctgaaggccgaggtcgcgcgaaacccgtacgtggtcgtcagcaaggagctcctgagtaggtacgacgtgcgcacgcgttacggagacctggtcacactcgactcggtccgcactagcctgaggtaa

SEQ ID NO: 8291 - DNA, 153 bp, synthetic construct
  misc_feature 1..153: note = Synthetic
  source 1..153: mol_type = other DNA
gtggagtacctggccaagatcctgtgtctgaaggccgaggtcgcgcgaaacccgtacgtggtcgtcagcaaggagctcctgagtaggtacgacgtgcgcacgcgttacggagacctggtcacactcgactcggtccgcactagcctgaggtaa

SEQ ID NO: 8292 - DNA, 60 bp, synthetic construct
  misc_feature 1..60: note = Synthetic
  source 1..60: mol_type = other DNA
acgacgtgcgcacgcgttacggagacctggtcacactcgactcggtccgcactagcctga

SEQ ID NO: 8293 - DNA, 27 bp, synthetic construct
  misc_feature 1..27: note = Synthetic
  source 1..27: mol_type = other DNA
atgcattttccagggaatattctatga

SEQ ID NO: 8294 - DNA, 138 bp, synthetic construct
  source 1..138: mol_type = other DNA
  misc_feature 1..138: note = Synthetic
atctcgtctctcaacaaactacgaggattcaaaaagagagtcaatgtttttgaaactagaatcgtaatggataatgacgataacattctaggaatgttgttttctgacagagttccgactcggtccgcactagcctga

SEQ ID NO: 8295 - DNA, 69 bp, synthetic construct
  misc_feature 1..69: note = Synthetic
  source 1..69: mol_type = other DNA
atgatacgcgcgaaaacgccggcgtggcgctctacgcggtcgcctttgcctgggttctttccatcgtag

SEQ ID NO: 8296 - DNA, 69 bp, synthetic construct
  misc_feature 1..69: note = Synthetic
  source 1..69: mol_type = other DNA
atgggacgcgcgaaaacgccggcgtggcgctctacgcggtcgcctttgcctgggttctttccatcgtag

SEQ ID NO: 8297 - DNA, 36 bp, synthetic construct
  misc_feature 1..36: note = Synthetic
  source 1..36: mol_type = other DNA
acgcggtcgcctttgcctgggttctttccatcgtag

SEQ ID NO: 8298 - DNA, 63 bp, synthetic construct
  misc_feature 1..63: note = Synthetic
  source 1..63: mol_type = other DNA
atggtgaaactgtccaatttttttccgaatatcaggcaaacctgtcaaagacatgttatttga

SEQ ID NO: 8299 - DNA, 39 bp, synthetic construct
  misc_feature 1..39: note = Synthetic
  source 1..39: mol_type = other DNA
atgttatttgacggggaaaaaaagacgcggagaatttag

SEQ ID NO: 8300 - DNA, 39 bp, synthetic construct
  misc_feature 1..39: note = Synthetic
  source 1..39: mol_type = other DNA
atgttatttcacgggaaaaaaaagacacggagaatttag

SEQ ID NO: 8301 - DNA, 114 bp, synthetic construct
  source 1..114: mol_type = other DNA
  misc_feature 1..114: note = Synthetic
atggaccccaacaaccccatctcgtacgtgcccaagcagctggtggtggtgtgcacggacctacaccgtgtgacctacgacccctacatacgggtgagcaaggtcagcgagtga

SEQ ID NO: 8302 - DNA, 168 bp, synthetic construct
  misc_feature 1..168: note = Synthetic
  source 1..168: mol_type = other DNA
atggaccacgaaaagtacgtcttgtcgatgttcttggaggaagataactccttcttctcgttcgtcgccgcgctgtccgacgacgaggcgctcggcgccgtgcagtccgccgccgccctcctggacttcctgctctctgtcgactcggtccgcactagcctgaggtaa

SEQ ID NO: 8303 - DNA, 102 bp, synthetic construct
  source 1..102: mol_type = other DNA
  misc_feature 1..102: note = Synthetic
ctggacgggcggcccgtcgcgttcccggggtgcgagagccttttgtaccgcataagccgaccacgaaaagtacgtcttgtcgatgttcttggaggaagataa

SEQ ID NO: 8304 - DNA, 156 bp, synthetic construct
  misc_feature 1..156: note = Synthetic
  source 1..156: mol_type = other DNA
aagtacgtcttgtcgatgttcttggaggaagataactccttcttctcgttcgtcgccgcgctgtccgacgacgaggcgctcggcgccgtgcagtccgccgccgccctcctggacttcctgctctctgtcgactcggtccgcactagcctgaggtaa

SEQ ID NO: 8305 - DNA, 168 bp, synthetic construct
  misc_feature 1..168: note = Synthetic
  source 1..168: mol_type = other DNA
atggggcagcttatcagcttctttcaggagattcctgtttttctacaggaagctctgaacatcgctttagtggctgttagtctcatagctgtcatcaaaggcatcattaacctttacaaaagtggtctcttccagttcatcgactcggtccgcactagcctgaggtaa

SEQ ID NO: 8306 - DNA, 156 bp, synthetic construct
  source 1..156: mol_type = other DNA
  misc_feature 1..156: note = Synthetic
atcagcttctttcaggagattcctgtttttctacaggaagctctgaacatcgctttagtggctgttagtctcatagctgtcatcaaaggcatcattaacctttacaaaagtggtctcttccagttcatcgactcggtccgcactagcctgaggtaa

SEQ ID NO: 8307 - DNA, 129 bp, synthetic construct
  misc_feature 1..129: note = Synthetic
  source 1..129: mol_type = other DNA
atggcatccggggtttccccggcccacccccaaaccccggttggggcgggcagccgagacctttccttaaaaggcaccccatccgacggcatgcagcccagaggagcgactcggtccgcactagcctga

SEQ ID NO: 8308 - DNA, 27 bp, synthetic construct
  source 1..27: mol_type = other DNA
  misc_feature 1..27: note = Synthetic
atggtcatgggtggcttcacaaggtaa

SEQ ID NO: 8309 - DNA, 81 bp, synthetic construct
  source 1..81: mol_type = other DNA
  misc_feature 1..81: note = Synthetic
ttgctaaacaagatggtcaggaacacaacaagcggggctttgcctggtaggatttcctgtggaaacaataaccggatgtga

SEQ ID NO: 8310 - DNA, 120 bp, synthetic construct
  source 1..120: mol_type = other DNA
  misc_feature 1..120: note = Synthetic
ttgtggaacaagagacgaaagacgtttgcttttttagttttgacgggcttggctatcgcaatgattttgtttattgcttttgttatttacgttttcaatgtgaatcgtcgaaaaaaatga

SEQ ID NO: 8311 - DNA, 36 bp, synthetic construct
  misc_feature 1..36: note = Synthetic
  source 1..36: mol_type = other DNA
atgaacgttgaaaaatctcgactcggtccgcactag

SEQ ID NO: 8312 - DNA, 60 bp, synthetic construct
  misc_feature 1..60: note = Synthetic
  source 1..60: mol_type = other DNA
atggcggacgagagaaaatggcgtcgagagcctaggagcgttttcgctccaggcgggtaa

SEQ ID NO: 8313 - DNA, 48 bp, synthetic construct
  misc_feature 1..48: note = Synthetic
  source 1..48: mol_type = other DNA
atggccttgtggactaaaatcaatgaaaatcagccacagaaaaattga

SEQ ID NO: 8314 - DNA, 45 bp, synthetic construct
  source 1..45: mol_type = other DNA
  misc_feature 1..45: note = Synthetic
atactatccctccaggagaaagcgactcggtccgcactagcctga

SEQ ID NO: 8315 - DNA, 24 bp, synthetic construct
  source 1..24: mol_type = other DNA
  misc_feature 1..24: note = Synthetic
atcaccgtacgccgccggatatga

SEQ ID NO: 8316 - DNA, 69 bp, synthetic construct
  source 1..69: mol_type = other DNA
  misc_feature 1..69: note = Synthetic
atgatttatatagcgcttatgattatactatccctccaggagaaagcgactcggtccgcactagcctga

SEQ ID NO: 8317 - DNA, 96 bp, synthetic construct
  misc_feature 1..96: note = Synthetic
  source 1..96: mol_type = other DNA
atgttcaaaaccttcaggcaaataaacaattggcagctcagcaatttggttataattcttccctgcttgcaaccgactcggtccgcactagcctga

SEQ ID NO: 8318 - DNA, 222 bp, synthetic construct
  source 1..222: mol_type = other DNA
  misc_feature 1..222: note = Synthetic
gtgtccaaaactgaaatcttagcttcagaacggaggacagcggaagaaacagccatgtgtcttgtggcgccgatgcagtgcggatgtgctagctgcgtgcgtatcctcgacgcgctgctctcggccatggaggcgctagtgcagatgaggctgctctccgaagaagaaaagacgagctgtgcgagccagtttctcgactcggtccgcactagcctgaggtaa

SEQ ID NO: 8319 - DNA, 96 bp, synthetic construct
  misc_feature 1..96: note = Synthetic
  source 1..96: mol_type = other DNA
atggaggcgctagtgcagatgaggctgctctccgaagaagaaaagacgagctgtgcgagccagtttctcgactcggtccgcactagcctgaggtaa

SEQ ID NO: 8320 - DNA, 45 bp, synthetic construct
  source 1..45: mol_type = other DNA
  misc_feature 1..45: note = Synthetic
atgcttaattttaaggcatccatcagcaggaatttggaccgctga

SEQ ID NO: 8321 - DNA, 33 bp, synthetic construct
  misc_feature 1..33: note = Synthetic
  source 1..33: mol_type = other DNA
gtggtgttgttttcaaaaaaggttcaattctag

SEQ ID NO: 8322 - DNA, 30 bp, synthetic construct
  misc_feature 1..30: note = Synthetic
  source 1..30: mol_type = other DNA
attctagcatttacttctttggacatttga

SEQ ID NO: 8323 - DNA, 75 bp, synthetic construct
  misc_feature 1..75: note = Synthetic
  source 1..75: mol_type = other DNA
atctcgatactcccactcatccccctgcggcagcaacagcaaccaatcgactcggtccgcactagcctgaggtaa

SEQ ID NO: 8324 - DNA, 39 bp, synthetic construct
  source 1..39: mol_type = other DNA
  misc_feature 1..39: note = Synthetic
atgaaacggcggaagcgtaaatattcagacttactttaa

SEQ ID NO: 8325 - DNA, 24 bp, synthetic construct
  source 1..24: mol_type = other DNA
  misc_feature 1..24: note = Synthetic
atgcctcttctgaaagattattaa

SEQ ID NO: 8326 - DNA, 183 bp, synthetic construct
  misc_feature 1..183: note = Synthetic
  source 1..183: mol_type = other DNA
atggtcgcgcgtggctttgtcggtgtgctttttgtagcaatgcgtgcgtgcgctgcgcgcggcgtgttttgtgtcgcgagtgtgcgcgcccccgtgctgtgttttgttctgtcgcttgctgtcccaagactctgccggcgcaatctcgcggtgacaggcacgactcggtccgcactagcctga

SEQ ID NO: 8327 - DNA, 213 bp, synthetic construct
  misc_feature 1..213: note = Synthetic
  source 1..213: mol_type = other DNA
atgaggctccaactcccttttgcttacttgctccttttgttcctttccggcgttaatgggggcggatgggaccctcgttcccctcaaggacctgccccccgctggcgcggcccgcgtcgcggtcggtcaggtggctcccgccctcagggagccaatcagacctctgccacaccgctcacaacccgcgcatctgcgcgactcggtccgcactag

SEQ ID NO: 8328 - DNA, 213 bp, synthetic construct
  misc_feature 1..213: note = Synthetic
  source 1..213: mol_type = other DNA
atgaggctccaactcccttttgcttacttgctccttttgttcctttccggcgttagccggggcggatgggaccctcgttcccctcaaggacctgccccccgctggcgcggcccgcgtcgcggtcggtcaggtggctcccgccctcagggagccaatcagacctctgccacaccgctcacaacccgcgcatctgcgcgactcggtccgcactag

SEQ ID NO: 8329 - DNA, 168 bp, synthetic construct
  misc_feature 1..168: note = Synthetic
  source 1..168: mol_type = other DNA
atggcctgcggatcccaaaacggctccagcgagcaagagctcagagccattgtccaagacctgggttgcggaccctattttttgggaacctacgataagcgcttcccggggttcatggcccccgataagctcgcctgtgccgactcggtccgcactagcctgaggtaa

SEQ ID NO: 8330 - DNA, 141 bp, synthetic construct
  misc_feature 1..141: note = Synthetic
  source 1..141: mol_type = other DNA
atgaggctccaactcccttttgcttacttgctccttttgttcctttccggcgttaatgggggcggatgggaccctcgttcccctcaaggacctgccccccgctggcgcggccccgactcggtccgcactagcctgaggtaa

SEQ ID NO: 8331 - DNA, 39 bp, synthetic construct
  misc_feature 1..39: note = Synthetic
  source 1..39: mol_type = other DNA
atcttctccataaaactgatgaaatatataaagaaataa

SEQ ID NO: 8332 - DNA, 66 bp, synthetic construct
  misc_feature 1..66: note = Synthetic
  source 1..66: mol_type = other DNA
aggcgtatctccatagagaaattagtggtaaaatggccaagaacgactcggtccgcactagcctga

SEQ ID NO: 8333 - DNA, 156 bp, synthetic construct
  source 1..156: mol_type = other DNA
  misc_feature 1..156: note = Synthetic
atgcgcacgacctcggcttgtacggactccgagcccgaggactctgcagggccatcgtgcgcgggcatggccttgtccatgtttgggcgcgcgaaatcggtgtcgtcgcttcttctgcgaacgaaagccgactcggtccgcactagcctgaggtaa

SEQ ID NO: 8334 - DNA, 150 bp, synthetic construct
  misc_feature 1..150: note = Synthetic
  source 1..150: mol_type = other DNA
atttggtattcattccaagattcagaatgcaacagcctcgtgggagaagccgaaatcgtagccaccaagttgcactatccacataccatgaaaatcaattaccctctaaacctcagtacattaaccatcatccacgtgcaagatcaatga

SEQ ID NO: 8335 - DNA, 81 bp, synthetic construct
  source 1..81: mol_type = other DNA
  misc_feature 1..81: note = Synthetic
atgcagcagtctctcagtggaaagaagttatcccagagaaagacgcctatcgattggaaatcgttacagctggcgccctga

SEQ ID NO: 8336 - DNA, 18 bp, synthetic construct
  source 1..18: mol_type = other DNA
  misc_feature 1..18: note = Synthetic
ttggaggctgtgtattaa

SEQ ID NO: 8337 - DNA, 168 bp, synthetic construct
  misc_feature 1..168: note = Synthetic
  source 1..168: mol_type = other DNA
atgcccggaacatgcaggaagaagatgagcacggccaaggtcaaggagaaagcgggcggcagttcgccgcgtgacgaaaaccacagtttggcccttgcggggctcgtgtccggactccttgtcttgggcgcgatctgtgtcgactcggtccgcactagcctgaggtaa

SEQ ID NO: 8338 - DNA, 30 bp, synthetic construct
  source 1..30: mol_type = other DNA
  misc_feature 1..30: note = Synthetic
acgcgtccgcctcttcctcgtgcaaattga

SEQ ID NO: 8339 - DNA, 159 bp, synthetic construct
  source 1..159: mol_type = other DNA
  misc_feature 1..159: note = Synthetic
atcagagagatttcggccatcatcggactttgtgcatacgctgctacttactggggaggtgaagaccatcccactagtaacagtctgaacgcattgtttgtgatgcttgagatgctcaattacgtggattataacatcatattccggcgtatgaattga

SEQ ID NO: 8340 - DNA, 42 bp, synthetic construct
  source 1..42: mol_type = other DNA
  misc_feature 1..42: note = Synthetic
ctgacgatccgcgcccctagagtctacagtcgtatcgtttaa

SEQ ID NO: 8341 - DNA, 207 bp, synthetic construct
  misc_feature 1..207: note = Synthetic
  source 1..207: mol_type = other DNA
ttgaacattaaacaaaacttatcccacaacgccgcaacaatggaagtgctggtgatcatctctattatcgtcgccgtaatattcttaaccggagcggcgatatacctccttattgaactcggcttagccgccgagcgcgcgaacaaacgcgcgcgcgtgaagaaaaatatgcgcaaattcgactcggtccgcactagcctgaggtaa

SEQ ID NO: 8342 - DNA, 207 bp, synthetic construct
  source 1..207: mol_type = other DNA
  misc_feature 1..207: note = Synthetic
ttgaacattaaacaaaacttatcccacaacgccgcaacagccgaagtgctggtgatcatctctattatcgtcgccgtaatattcttaaccggagcggcgatatacctccttattgaactcggcttagccgccgagcgcgcgaacaaacgcgcgcgcgtgaagaaaaatatgcgcaaattcgactcggtccgcactagcctgaggtaa

SEQ ID NO: 8343 - DNA, 207 bp, synthetic construct
  source 1..207: mol_type = other DNA
  misc_feature 1..207: note = Synthetic
atcccggcaagcatggcacgccagtcgggtcgccccatctcacgcgccagtttcagggcaaaactcagctcaccgtcgaacactttcccgcagaaacaggctctgcgggcccggcgtcctctgtctgttcaggggcattattcaccacaaactcatacataccagacagccggtacacccgactcggtccgcactagcctgaggtaa

SEQ ID NO: 8344 - DNA, 69 bp, synthetic construct
  misc_feature 1..69: note = Synthetic
  source 1..69: mol_type = other DNA
atggtctcgtcgaaggacggaaacccggcgcagaaggccaggtcctcgactcggtccgcactagcctga

SEQ ID NO: 8345 - DNA, 39 bp, synthetic construct
  misc_feature 1..39: note = Synthetic
  source 1..39: mol_type = other DNA
ctgtgcagaatcacgacgaatacagtaaagaaggggtaa

SEQ ID NO: 8346 - DNA, 51 bp, synthetic construct
  misc_feature 1..51: note = Synthetic
  source 1..51: mol_type = other DNA
atggcttggtttagcccatgcatcctgtgtggatactctgcgctttattaa

SEQ ID NO: 8347 - DNA, 168 bp, synthetic construct
  misc_feature 1..168: note = Synthetic
  source 1..168: mol_type = other DNA
atggtggacagcggcacgcacgacgtggactccgccgcgcaggagcgcacgcccaaccagcagaccttcttcaccaaggggctcagtccgctgatgcgccacacctacatctacaacaactacgcctacggctggattcccgactcggtccgcactagcctgaggtaa

SEQ ID NO: 8348 - DNA, 120 bp, synthetic construct
  misc_feature 1..120: note = Synthetic
  source 1..120: mol_type = other DNA
acgcccaaccagcagaccttcttcaccaaggggctcagtccgctgatgcgccacacctacatctacaacaactacgcctacggctggattcccgactcggtccgcactagcctgaggtaa

SEQ ID NO: 8349 - DNA, 84 bp, synthetic construct
  misc_feature 1..84: note = Synthetic
  source 1..84: mol_type = other DNA
acgcagctgataatggtaatacgacataatacgtcaattgtgaaaccgcctccagaccgctttattgtggtgctaacaatttag

SEQ ID NO: 8350 - DNA, 33 bp, synthetic construct
  misc_feature 1..33: note = Synthetic
  source 1..33: mol_type = other DNA
ttggactacgtcacgacggaatggccggcttag

SEQ ID NO: 8351 - DNA, 39 bp, synthetic construct
  source 1..39: mol_type = other DNA
  misc_feature 1..39: note = Synthetic
atggtctgctcttatacgactcggtccgcactagcctga

SEQ ID NO: 8352 - DNA, 207 bp, synthetic construct
  source 1..207: mol_type = other DNA
  misc_feature 1..207: note = Synthetic
atcccggcaagcatggcacgccagtcgggtcgccccatctcacgcgccagtttcagggcaaaactcagctcaccgtcgaacactttcccgcagaaacaggctctgcgggcccggcgtcctctgtctgttcaggggcattattcaccacaaactcatacgccccagacagccggtacacccgactcggtccgcactagcctgaggtaa

SEQ ID NO: 8353 - DNA, 105 bp, synthetic construct
  misc_feature 1..105: note = Synthetic
  source 1..105: mol_type = other DNA
aggctctgcgggcccggcgtcctctgtctgttcaggggcattattcaccacaaactcatacgccccagacagccggtacacccgactcggtccgcactagcctga

SEQ ID NO: 8354 - DNA, 15 bp, synthetic construct
  source 1..15: mol_type = other DNA
  misc_feature 1..15: note = Synthetic
atgaaggtgccgtaa

SEQ ID NO: 8355 - DNA, 168 bp, synthetic construct
  source 1..168: mol_type = other DNA
  misc_feature 1..168: note = Synthetic
atgacggccccaaacgtgcacatggccttgcaccatgtggagggcgcggaatacatgttccagctcgtctccaccgtgctccccacgctgtgttcggacttcaagcccagctacgacgtcagccgcacgtacgtgcaccccgactcggtccgcactagcctgaggtaa

SEQ ID NO: 8356 - DNA, 21 bp, synthetic construct
  misc_feature 1..21: note = Synthetic
  source 1..21: mol_type = other DNA
atgagatatataaagaaataa

SEQ ID NO: 8357 - DNA, 21 bp, synthetic construct
  source 1..21: mol_type = other DNA
  misc_feature 1..21: note = Synthetic
ttgaaaatactaattgtttaa

SEQ ID NO: 8358 - DNA, 21 bp, synthetic construct
  source 1..21: mol_type = other DNA
  misc_feature 1..21: note = Synthetic
atcctgccagaactgttttag

SEQ ID NO: 8359 - DNA, 78 bp, synthetic construct
  misc_feature 1..78: note = Synthetic
  source 1..78: mol_type = other DNA
atgccgtatataagacgtatctccataaagaaattagtggtaaaatggccaagaacgactcggtccgcactagcctga

SEQ ID NO: 8360 - DNA, 48 bp, synthetic construct
  source 1..48: mol_type = other DNA
  misc_feature 1..48: note = Synthetic
ttgttaccaatggatacctttccgttacattggaacctcatgagctga

SEQ ID NO: 8361 - DNA, 15 bp, synthetic construct
  source 1..15: mol_type = other DNA
  misc_feature 1..15: note = Synthetic
acgaatcgcagatga

SEQ ID NO: 8362 - DNA, 93 bp, synthetic construct
  source 1..93: mol_type = other DNA
  misc_feature 1..93: note = Synthetic
atgataaacaagagggtaaaaagaaaaaagctacagacatttgggtacctcagctttccgataactcgaacgactcggtccgcactagcctga

SEQ ID NO: 8363 - DNA, 33 bp, synthetic construct
  source 1..33: mol_type = other DNA
  misc_feature 1..33: note = Synthetic
aagagaatgagaatgagaatgatatcgtattag

SEQ ID NO: 8364 - DNA, 168 bp, synthetic construct
  source 1..168: mol_type = other DNA
  misc_feature 1..168: note = Synthetic
atgtggactatcttgctgttttgcgttcctgtgatttatggagaactctatccggatttctgtcccttagcagttgtggattttgatgtgaatgctacagtggatgatttgctattgttcgacatatctttgagcaaacacgactcggtccgcactagcctgaggtaa

SEQ ID NO: 8365 - DNA, 33 bp, synthetic construct
  source 1..33: mol_type = other DNA
  misc_feature 1..33: note = Synthetic
atggagaactctatccggatttctgtcccttag

SEQ ID NO: 8366 - DNA, 156 bp, synthetic construct
  source 1..156: mol_type = other DNA
  misc_feature 1..156: note = Synthetic
ttgctgttttgcgttcctgtgatttatggagaactctatccggatttctgtcccttagcagttgtggattttgatgtgaatgctacagtggatgatttgctattgttcgacatatctttgagcaaacacgactcggtccgcactagcctgaggtaa

SEQ ID NO: 8367 - DNA, 33 bp, synthetic construct
  source 1..33: mol_type = other DNA
  misc_feature 1..33: note = Synthetic
atgtttaccagctccatgacttatgaatactaa

SEQ ID NO: 8368 - DNA, 222 bp, synthetic construct
  misc_feature 1..222: note = Synthetic
  source 1..222: mol_type = other DNA
ctgcccttctcctgttccctccgcccccaaaactgtcagcgacgctcagacgtcatgtgcgacgcctcgggcgcctgtgacatgaggcacgtccagaacgcgtttaccgaggagatccagttacactcgctctacgcgtgcacgcgctgctttcgcacgcacctgtgtgatctgggcagcggctgcgcgctcgtcgactcggtccgcactagcctgaggtaa

SEQ ID NO: 8369 - DNA, 153 bp, synthetic construct
  misc_feature 1..153: note = Synthetic
  source 1..153: mol_type = other DNA
atgaataagtctcgggctcgatcccgaggcgtcaatatggtagcggctagagtgaagaacctagccgttaaagtaaaaaacaaaacaaaacaaagtgcaagaggtttgcgagggttcctcttgttcgactcggtccgcactagcctgaggtaa

SEQ ID NO: 8370 - DNA, 42 bp, synthetic construct
  source 1..42: mol_type = other DNA
  misc_feature 1..42: note = Synthetic
atgcttacaggatctataccatatgaaaattacgcgtcctag

SEQ ID NO: 8371 - DNA, 168 bp, synthetic construct
  source 1..168: mol_type = other DNA
  misc_feature 1..168: note = Synthetic
atgagttaccggcaggagcacgtgctgcggagacttcgccaggacagacacgggaatttggagaccgcgcgggatctggaacgtccagggtggaggtggatccaggaacaaagggaagcgctcaacgtaccagcacggagcgactcggtccgcactagcctgaggtaa

SEQ ID NO: 8372 - DNA, 147 bp, synthetic construct
  misc_feature 1..147: note = Synthetic
  source 1..147: mol_type = other DNA
gtgctgcggagacttcgccaggacagacacgggaatttggagaccgcgcgggatctggaacgtccagggtggaggtggatccaggaacaaagggaagcgctcaacgtaccagcacggagcgactcggtccgcactagcctgaggtaa

SEQ ID NO: 8373 - DNA, 150 bp, synthetic construct
  misc_feature 1..150: note = Synthetic
  source 1..150: mol_type = other DNA
gtgagggtgccattgtttaccgccatcgcacttgttattgttctactcctggcatactttttgccacccagggtaagaggaggagggcgggtggcagccgcggccatcacctgggtacccaacgactcggtccgcactagcctgaggtaa

SEQ ID NO: 8374 - DNA, 213 bp, synthetic construct
  misc_feature 1..213: note = Synthetic
  source 1..213: mol_type = other DNA
atattaataaatatcttcctgttggctctctttgaagtggttgccatggtttcgtttaagcaggtgagggtgccattgtttaccgccatcgcacttgttattgttctactcctggcatactttttgccacccagggtaagaggaggagggcgggtggcagccgcggccatcacctgggttcccaacgactcggtccgcactagcctgaggtaa

SEQ ID NO: 8375 - DNA, 213 bp, synthetic construct
  source 1..213: mol_type = other DNA
  misc_feature 1..213: note = Synthetic
atattaataaatatcttcctgttggctctctttgaagtggttgccgccgtttcgtttaagcaggtgagggtgccattgtttaccgccatcgcacttgttattgttctactcctggcatactttttgccacccagggtaagaggaggagggcgggtggcagccgcggccatcacctgggttcccaacgactcggtccgcactagcctgaggtaa

SEQ ID NO: 8376 - DNA, 15 bp, synthetic construct
  source 1..15: mol_type = other DNA
  misc_feature 1..15: note = Synthetic
atgtacaataactga

SEQ ID NO: 8377 - DNA, 168 bp, synthetic construct
  source 1..168: mol_type = other DNA
  misc_feature 1..168: note = Synthetic
atggctacacaagaggtcaggctaaagtgtttgctctgtgggatcatagttctggttttgtcattagaagggctagggatactacattatgagaaacttagtaagatagggctggttaaaggtattacaagaaagtacaacgactcggtccgcactagcctgaggtaa

SEQ ID NO: 8378 - DNA, 96 bp, synthetic construct
  misc_feature 1..96: note = Synthetic
  source 1..96: mol_type = other DNA
atggtgactgcagaggccaaagaggggggaatggagatctttgtgccatcacaccgctccatgtttgcttggacgactcggtccgcactagcctga

SEQ ID NO: 8379 - DNA, 18 bp, synthetic construct
  source 1..18: mol_type = other DNA
  misc_feature 1..18: note = Synthetic
atgccacttactaaatag

SEQ ID NO: 8380 - DNA, 168 bp, synthetic construct
  misc_feature 1..168: note = Synthetic
  source 1..168: mol_type = other DNA
atggcaacaaaggggatgaataagtctcgggctcgatcccgaggcgtcaatatggtagcggctagagtgaagaacctagccgttaaagtaaaaaacaaaacaaaacaaagtgcaagaggtttgcgagggttcctcttgttcgactcggtccgcactagcctgaggtaa

SEQ ID NO: 8381 - DNA, 213 bp, synthetic construct
  misc_feature 1..213: note = Synthetic
  source 1..213: mol_type = other DNA
atattaataaatatcttcctgttggctctctttgaagtggttgccgccgtttcgtttaagcaggtgagggtgccattgtttaccgccatcgcacttgttattgttctactcctggcatactttttgccacccagggtaagaggaggagggcgggtgtcggcagcggccatcacctgggtacccaacgactcggtccgcactagcctgaggtaa

SEQ ID NO: 8382 - DNA, 168 bp, synthetic construct
  source 1..168: mol_type = other DNA
  misc_feature 1..168: note = Synthetic
atgttttgtcgctctccgtttctcggtatatcttcttggagtctggcctctgcggctctctgcccttcttcgtgctctttccctgcgggacgtgatctgcggtgcgatgcggcagtgccggaggttaaatggacggcgttcgactcggtccgcactagcctgaggtaa

SEQ ID NO: 8383 - DNA, 15 bp, synthetic construct
  source 1..15: mol_type = other DNA
  misc_feature 1..15: note = Synthetic
atagcaatcagttaa

SEQ ID NO: 8384 - DNA, 57 bp, synthetic construct
  misc_feature 1..57: note = Synthetic
  source 1..57: mol_type = other DNA
atgtttggacaagaaccgttacctaaaaaagaatctctcaaacagcagcctttgtga

SEQ ID NO: 8385 - DNA, 222 bp, synthetic construct
  misc_feature 1..222: note = Synthetic
  source 1..222: mol_type = other DNA
ctgcccttctcctgttccctccgcccccaaaactgtcagcgacgctcagacgtcgcctgcgacgcctcgggcgcctgtgacatgaggcacgtccagaacgcgtttaccgaggagatccagttacactcgctctacgcgtgcacgcgctgctttcgcacgcacctgtgtgatctgggcagcggctgcgcgctcgtcgactcggtccgcactagcctgaggtaa

SEQ ID NO: 8386 - DNA, 168 bp, synthetic construct
  source 1..168: mol_type = other DNA
  misc_feature 1..168: note = Synthetic
atgtcgtgggccctggaaatggcggacaccttcctggacaccatgcgggttgggcccaggacgtacgccgacgtacgcgatgagatcaataaaagggggcgtgaggaccgggaggcggccagaaccgccgtgcacgaccccgactcggtccgcactagcctgaggtaa

SEQ ID NO: 8387 - DNA, 150 bp, synthetic construct
  misc_feature 1..150: note = Synthetic
  source 1..150: mol_type = other DNA
atggcggacaccttcctggacaccatgcgggttgggcccaggacgtacgccgacgtacgcgatgagatcaataaaagggggcgtgaggaccgggaggcggccagaaccgccgtgcacgaccccgactcggtccgcactagcctgaggtaa

SEQ ID NO: 8388 - DNA, 90 bp, synthetic construct
  misc_feature 1..90: note = Synthetic
  source 1..90: mol_type = other DNA
atggatattatgatggatatgatggatattatgatggatatgatggatatgatggatatgatggatatgataaatatgataaaaatataa

SEQ ID NO: 8389 - DNA, 39 bp, synthetic construct
  misc_feature 1..39: note = Synthetic
  source 1..39: mol_type = other DNA
atgatggatatgatggcgactcggtccgcactagcctga

SEQ ID NO: 8390 - DNA, 30 bp, synthetic construct
  misc_feature 1..30: note = Synthetic
  source 1..30: mol_type = other DNA
attgtgatcatgcagattatcataatgtaa

SEQ ID NO: 8391 - DNA, 114 bp, synthetic construct
  source 1..114: mol_type = other DNA
  misc_feature 1..114: note = Synthetic
atgatcctgaccacaaaggaagtaaaaattttaaaaagatgtatgtcagtgtgcctgtgtcccgctaccctggatctggtgagagcccagacgactcggtccgcactagcctga

SEQ ID NO: 8392 - DNA, 195 bp, synthetic construct
  source 1..195: mol_type = other DNA
  misc_feature 1..195: note = Synthetic
atggcaatcaatgtatttacgaattcacagatatttaatattatttcttacattattttgtttattctgttctttgcatatgtgatgaacatcgaaagacaggactataaaagaataaatataaccattcctgaacatcatacatgtaacaaaccttataatgcgggcgactcggtccgcactagcctgaggtaa

SEQ ID NO: 8393 - DNA, 183 bp, synthetic construct
  source 1..183: mol_type = other DNA
  misc_feature 1..183: note = Synthetic
ttgagtgttagcagaatggaaaacaagatcgaggtgaataacaaagatgagatgaacaggtggtttgaagagttcaaaaaaggaaatggacttgtggacaccttcacaaactcctattccttttgcgagagtgttcccaatttggacaggtttgtgtttccgactcggtccgcactagcctga

SEQ ID NO: 8394 - DNA, 159 bp, synthetic construct
  source 1..159: mol_type = other DNA
  misc_feature 1..159: note = Synthetic
aagatcgaggtgaataacaaagatgagatgaacaggtggtttgaagagttcaaaaaaggaaatggacttgtggacaccttcacaaactcctattccttttgcgagagtgttcccaatttggacaggtttgtgtttccgactcggtccgcactagcctga

SEQ ID NO: 8395 - DNA, 57 bp, synthetic construct
  source 1..57: mol_type = other DNA
  misc_feature 1..57: note = Synthetic
atagctagtacaattatggcaattgctgcaacaatacggaagaacagtttaatataa

SEQ ID NO: 8396 - DNA, 48 bp, synthetic construct
  misc_feature 1..48: note = Synthetic
  source 1..48: mol_type = other DNA
ttgtattcttgcaagagttgtctagagagcatcctgaggttttggtga

SEQ ID NO: 8397 - DNA, 156 bp, synthetic construct
  source 1..156: mol_type = other DNA
  misc_feature 1..156: note = Synthetic
acggaccacccccctatacacaggtataactcctggctggtgttgctttcactcgatctgttattatctataaaaaacttagggtcaatgcctttccctgctgttattgtggtggcttttttgttggtttattcgactcggtccgcactagcctga

SEQ ID NO: 8398 - DNA, 201 bp, synthetic construct
  source 1..201: mol_type = other DNA
  misc_feature 1..201: note = Synthetic
atattagtgttggccgccgccttccccgtcttgatggcttctgagctcttctcctcactccctggcggggttgcctccgctgccatttctgccggggctcaggctgccttgcaggaccaggcctaccggcagagtttggagttgcaggcccgctctttttcccatgattccgccgactcggtccgcactagcctgaggtaa

SEQ ID NO: 8399 - DNA, 108 bp, synthetic construct
  misc_feature 1..108: note = Synthetic
  source 1..108: mol_type = other DNA
ctgccggggctcaggctgccttgcaggaccaggcctaccggcagagtttggagttgcaggcccgctctttttcccatgattccgccgactcggtccgcactagcctga

SEQ ID NO: 8400 - DNA, 201 bp, synthetic construct
  misc_feature 1..201: note = Synthetic
  source 1..201: mol_type = other DNA
atattagtgttggccgccgccttccccgtcttggccgcttctgagctcttctcctcactccctggcggggttgcctccgctgccatttctgccggggctcaggctgccttgcaggaccaggcctaccggcagagtttggagttgcaggcccgctctttttcccatgattccgccgactcggtccgcactagcctgaggtaa

SEQ ID NO: 8401 - DNA, 135 bp, synthetic construct
  source 1..135: mol_type = other DNA
  misc_feature 1..135: note = Synthetic
ctggcggggttgcctccgctgccatttctgccggggctcaggctgccttgcaggaccaggcctaccggcagagtttggagttgcaggcccgctctttttcccatgattccgccgactcggtccgcactagcctga

SEQ ID NO: 8402 - DNA, 54 bp, synthetic construct
  misc_feature 1..54: note = Synthetic
  source 1..54: mol_type = other DNA
ataacaaaaaagaacgaacgcacgctcggtcgccatggccttgagcgtcaatga

SEQ ID NO: 8403 - DNA, 114 bp, synthetic construct
  misc_feature 1..114: note = Synthetic
  source 1..114: mol_type = other DNA
atgaactacttcatgccgctgcgcaacatctggaaccgcgtgcgcgagttcccacgtgcatccaccaccgcctccggtatcacctgcgactcggtccgcactagcctgaggtaa

SEQ ID NO: 8404 - DNA, 168 bp, synthetic construct
  source 1..168: mol_type = other DNA
  misc_feature 1..168: note = Synthetic
atggccttggttcaagctcacggggccggtagctttcacccagaggcgtcagatccaggatgtcaaccgccgcgtcgtcgcgcatgcgagtcttctcagggcgcagtaccagaacctacccgcgcgcggcgccgacgtaccgactcggtccgcactagcctgaggtaa

SEQ ID NO: 8405 - DNA, 189 bp, synthetic construct
  misc_feature 1..189: note = Synthetic
  source 1..189: mol_type = other DNA
acgaacgcacgctcggtcgccgccgccttggttcaagctcacggggccggtagctttcacccagaggcgtcagatccaggatgtcaaccgccgcgtcgtcgcgcatgcgagtcttctcagggcgcagtaccagaacctacccgcgcgcggcgccgacgtaccgactcggtccgcactagcctgaggtaa

SEQ ID NO: 8406 - DNA, 168 bp, synthetic construct
  source 1..168: mol_type = other DNA
  misc_feature 1..168: note = Synthetic
atgtcgcgacttcaaatactgacctcatttggacaaatctacgcacccgacgaagctcggctgcgcgagatcgcgcgtgacttgggaatatgcaccataaaacgcgcattcggcgacatgctgtacggctttatagacttcgactcggtccgcactagcctgaggtaa

SEQ ID NO: 8407 - DNA, 168 bp, synthetic construct
  source 1..168: mol_type = other DNA
  misc_feature 1..168: note = Synthetic
atgtctattctcatctcgcccagcaataacaccggctggggtcttactagacccagcaccatgtacggaggagccaagaagcgctcccagcagcaccccgtccgcgtccgcggccacttccgcgctccctggggcgcttacgactcggtccgcactagcctgaggtaa

SEQ ID NO: 8408 - DNA, 156 bp, synthetic construct
  misc_feature 1..156: note = Synthetic
  source 1..156: mol_type = other DNA
atctcgcccagcaataacaccggctggggtcttactagacccagcaccatgtacggaggagccaagaagcgctcccagcagcaccccgtccgcgtccgcggccacttccgcgctccctggggcgcttacgactcggtccgcactagcctgaggtaa

SEQ ID NO: 8409 - DNA, 201 bp, synthetic construct
  source 1..201: mol_type = other DNA
  misc_feature 1..201: note = Synthetic
atgggacaaacacctcagcctacccaagcgctacttgacacaggagccgaccttacggttataccccagacactcgtgcccgggccggtaaagctccacgacaccctgatcctaggcgccagtgggcaaaccaacacccagttcaaactcctccaaacccccctacacatattcttgccgactcggtccgcactagcctga

SEQ ID NO: 8410 - DNA, 75 bp, synthetic construct
  source 1..75: mol_type = other DNA
  misc_feature 1..75: note = Synthetic
gtgggcaaaccaacacccagttcaaactcctccaaacccccctacacatattcttgccgactcggtccgcactag

SEQ ID NO: 8411 - DNA, 27 bp, synthetic construct
  misc_feature 1..27: note = Synthetic
  source 1..27: mol_type = other DNA
atggatactgccttgttaagagcttaa

SEQ ID NO: 8412 - DNA, 141 bp, synthetic construct
  misc_feature 1..141: note = Synthetic
  source 1..141: mol_type = other DNA
atgctggaagtagaagctcctctggaaatcgttcaggaatcctcaagaaaacttcttgggctgaccaatctgagcgaaattaccaaacctttaatagaggcagaaaaacccaacctaacgactcggtccgcactagcctga

SEQ ID NO: 8413 - DNA, 168 bp, synthetic construct
  source 1..168: mol_type = other DNA
  misc_feature 1..168: note = Synthetic
atgaattcaacaccagtctctgaattatcgcaattaattcagtttactgtggattttaatgatttgcagccagaactcaatttttctcccgcagagattacctgcatactttcgcacgaaagacctgtactgttgctaatcgactcggtccgcactagcctgaggtaa

SEQ ID NO: 8414 - DNA, 78 bp, synthetic construct
  source 1..78: mol_type = other DNA
  misc_feature 1..78: note = Synthetic
atttgcagccagaactcaatttttctcccgcagagattacctgcatactttcgcacgaaagacctgtactgttgctaa

SEQ ID NO: 8415 - DNA, 63 bp, synthetic construct
  misc_feature 1..63: note = Synthetic
  source 1..63: mol_type = other DNA
atactttcgcacgaaagacctgtactgttgctaatcgactcggtccgcactagcctgaggtaa

SEQ ID NO: 8416 - DNA, 54 bp, synthetic construct
  source 1..54: mol_type = other DNA
  misc_feature 1..54: note = Synthetic
acggttaccttcttgcccacgccgtccgactcggtccgcactagcctgaggtaa

SEQ ID NO: 8417 - DNA, 177 bp, synthetic construct
  misc_feature 1..177: note = Synthetic
  source 1..177: mol_type = other DNA
atggagaatcagatcaaggcaaacaataaaaaagagtttgatgagtggtttaaaccttttagtgaaaagctccaattaaggtcaaacctcacaaactctgcatccctgtgtgatagagtacctgacctagctctagcagaaatgaaaatcgactcggtccgcactagcctgaggtaa

SEQ ID NO: 8418 - DNA, 48 bp, synthetic construct
  source 1..48: mol_type = other DNA
  misc_feature 1..48: note = Synthetic
acgttttcacagacctttgagcaccagagaggcttagcccttgagtga

SEQ ID NO: 8419 - DNA, 144 bp, synthetic construct
  misc_feature 1..144: note = Synthetic
  source 1..144: mol_type = other DNA
atggagaacaagattgtcgcagagtcccgggaggagttccacgcctggttcaaggcctattcagataagcacaaactcagtaaaacacacaccgagtcggcctctttctgcagagaggttccgactcggtccgcactagcctga

SEQ ID NO: 8420 - DNA, 135 bp, synthetic construct
  misc_feature 1..135: note = Synthetic
  source 1..135: mol_type = other DNA
attctaatcataataacactactcgggtgcacagcagaggaaagcaccaccgaggctgtgactgaagctacaacaactgcaaatcctctagccacggacactccactaaggccgactcggtccgcactagcctga

SEQ ID NO: 8421 - DNA, 81 bp, synthetic construct
  source 1..81: mol_type = other DNA
  misc_feature 1..81: note = Synthetic
atggcaactgcttctaccatagccttgctgagctctatataccaaaaaagactcgactcggtccgcactagcctgaggtaa

SEQ ID NO: 8422 - DNA, 153 bp, synthetic construct
  source 1..153: mol_type = other DNA
  misc_feature 1..153: note = Synthetic
atgattggagaagtaggaaacaggaacaagacgacgattactacattattaaatcatgaagtccgtattatactcgtatatattgtttctctcatgtataataataaacggaagagatatagcaccgcatgcaccatccgatggaaagtgtaa

SEQ ID NO: 8423 - DNA, 168 bp, synthetic construct
  misc_feature 1..168: note = Synthetic
  source 1..168: mol_type = other DNA
atgaagtccgtattatactcgtatatattgtttctctcatgtataataataaacggaagagatatagcaccgcatgcaccatccgatggaaagtgtaaagacaacgaatacaaacgccataatttgtgtccgggaacatacgactcggtccgcactagcctgaggtaa

SEQ ID NO: 8424 - DNA, 90 bp, synthetic construct
  source 1..90: mol_type = other DNA
  misc_feature 1..90: note = Synthetic
atgcaccatccgatggaaagtgtaaagacaacgaatacaaacgccataatttgtgtccgggaacatacgactcggtccgcactagcctga

SEQ ID NO: 8425 - DNA, 153 bp, synthetic construct
  source 1..153: mol_type = other DNA
  misc_feature 1..153: note = Synthetic
atgattggagaagtaggaaacaggaacaagacgacgattactacattattaaatcgccaagtccgtattatactcgtatatattgtttctctcatgtataataataaacggaagagatatagcaccgcatgcaccatccgatggaaagtgtaa

SEQ ID NO: 8426 - DNA, 141 bp, synthetic construct
  misc_feature 1..141: note = Synthetic
  source 1..141: mol_type = other DNA
ttgtttctctcatgtataataataaacggaagagatatagcaccgcatgcaccatccgatggaaagtgtaaagacaacgaatacaaacgccataatttgtgtccgggaacatacgactcggtccgcactagcctgaggtaa

SEQ ID NO: 8427 - DNA, 18 bp, synthetic construct
  source 1..18: mol_type = other DNA
  misc_feature 1..18: note = Synthetic
atagacagttgcttgtga

SEQ ID NO: 8428 - DNA, 102 bp, synthetic construct
  misc_feature 1..102: note = Synthetic
  source 1..102: mol_type = other DNA
atagtctcctccttgagaatgtggatttgtttgttaagcggcgcgctgaatttgcttgcaaattcgccacctgtggagatggtcttgtacccctcctactag

SEQ ID NO: 8429 - DNA, 186 bp, synthetic construct
  source 1..186: mol_type = other DNA
  misc_feature 1..186: note = Synthetic
atgtctgagctgaactttaaggatttgaacggcctcaacaactggtttgaggagttcaaaaaagatgtacccatttacacatcaggtgcaaattcagcctgtctgagttccggtttagttgacttaagtcaattcaaactggagattgatgctcaatcatcagcgactcggtccgcactagcctga

SEQ ID NO: 8430 - DNA, 45 bp, synthetic construct
  misc_feature 1..45: note = Synthetic
  source 1..45: mol_type = other DNA
aagaaagacgtgccgcttacccgtaagcaaacgcctctgagctga

SEQ ID NO: 8431 - DNA, 177 bp, synthetic construct
  source 1..177: mol_type = other DNA
  misc_feature 1..177: note = Synthetic
ctgaactttaaggatttgaacggcctcaacaactggtttgaggagttcaaaaaagatgtacccatttacacatcaggtgcaaattcagcctgtctgagttccggtttagttgacttaagtcaattcaaactggagattgatgctcaatcatcagcgactcggtccgcactagcctga

SEQ ID NO: 8432 - DNA, 180 bp, synthetic construct
  source 1..180: mol_type = other DNA
  misc_feature 1..180: note = Synthetic
ttgagagttgtcagaatggtgtcgttggaaaaagggttgatcctcttgctgctgatgcacatcgcaattgcctccaccggagggtcccttgggttgcctggcctaaatggtgaggaccacactgacgatccagaggttggtggcgatggtccaactgaggagcgactcggtccgcactag

SEQ ID NO: 8433 - DNA, 84 bp, synthetic construct
  misc_feature 1..84: note = Synthetic
  source 1..84: mol_type = other DNA
atggtgaggaccacactgacgatccagaggttggtggcgatggtccaactgaggagcgactcggtccgcactagcctgaggtaa

SEQ ID NO: 8434 - DNA, 156 bp, synthetic construct
  source 1..156: mol_type = other DNA
  misc_feature 1..156: note = Synthetic
ttggaaaaagggttgatcctcttgctgctgatgcacatcgcaattgcctccaccggagggtcccttgggttgcctggcctaaatggtgaggaccacactgacgatccagaggttggtggcgatggtccaactgaggagcgactcggtccgcactag

SEQ ID NO: 8435 - DNA, 93 bp, synthetic construct
  misc_feature 1..93: note = Synthetic
  source 1..93: mol_type = other DNA
atgtgtccaaccctaggttcaacatttctgattattttgagattgtgcggcagcctggtgatgggaactgcttctcgactcggtccgcactag

SEQ ID NO: 8436 - DNA, 168 bp, synthetic construct
  source 1..168: mol_type = other DNA
  misc_feature 1..168: note = Synthetic
atggacttcgtgcggcggaagtacatgatacacgccatcgaccgcaacctcgacttcatgaaggccgaggtccagcagaaggtctccatcttctccctcgggcacgtgctcgcgctccactacctggtcaccgcctttcccgactcggtccgcactagcctgaggtaa

SEQ ID NO: 8437 - DNA, 150 bp, synthetic construct
  misc_feature 1..150: note = Synthetic
  source 1..150: mol_type = other DNA
aagtacatgatacacgccatcgaccgcaacctcgacttcatgaaggccgaggtccagcagaaggtctccatcttctccctcgggcacgtgctcgcgctccactacctggtcaccgcctttcccgactcggtccgcactagcctgaggtaa

SEQ ID NO: 8438 - DNA, 168 bp, synthetic construct
  source 1..168: mol_type = other DNA
  misc_feature 1..168: note = Synthetic
atgtcctcggtcctcaccgcctttgagcgcttcactatcgagcaggagctccaggatagaggagccgagggtagcattccccccgaaaccctcaaaacccgcattcaagtcttcgtattgaatgacgaggacccgcacctcgactcggtccgcactagcctgaggtaa

SEQ ID NO: 8439 - DNA, 42 bp, synthetic construct
  source 1..42: mol_type = other DNA
  misc_feature 1..42: note = Synthetic
atgacgaggacccgcacctcgactcggtccgcactagcctga

SEQ ID NO: 8440 - DNA, 168 bp, synthetic construct
  source 1..168: mol_type = other DNA
  misc_feature 1..168: note = Synthetic
atggaggagcagccgcgtaagcaggagcaggaggaggacttaaccacccacgagcaacccaaaatcgagcaggacctgggcttcgaagagccggctcgtctagaacccccacaggatgaacaggagcacgagcaagacgccgactcggtccgcactagcctgaggtaa

SEQ ID NO: 8441 - DNA, 168 bp, synthetic construct
  misc_feature 1..168: note = Synthetic
  source 1..168: mol_type = other DNA
atgtcgtctccatggtacacctggacgtgttgcggtataaacctttttggacgcggcaaccacgcttacaagcgcctcggtgaccctctggaaggctgtccagagcgctggcggcaagagatagatttgggcctcccccccgactcggtccgcactagcctgaggtaa

SEQ ID NO: 8442 - DNA, 135 bp, synthetic construct
  misc_feature 1..135: note = Synthetic
  source 1..135: mol_type = other DNA
ctgtcgccactcgtacaaaaaataacccttactgtcagcgcctcgcggcggtgcctcgtctccatggtacacctggacgtgttgcggtataaacctttttggacgcggcaaccacgcttacaagcgcctcggtga

SEQ ID NO: 8443 - DNA, 189 bp, synthetic construct
  source 1..189: mol_type = other DNA
  misc_feature 1..189: note = Synthetic
ctgtcagcgcctcgcggcggtgcctcgtctccatggtacacctggacgtgttgcggtataaacctttttggacgcggcaaccacgcttacaagcgcctcggtgaccctctggaaggctgtccagagcgctggcggcaagagatagatttgggcctcccccccgactcggtccgcactagcctgaggtaa

SEQ ID NO: 8444 - DNA, 168 bp, synthetic construct
  source 1..168: mol_type = other DNA
  misc_feature 1..168: note = Synthetic
atggaggagcagccgcgtaagcaggagcaggaggaggagaacttaaccacccacgagcaacccaaaatcaagcaggacctgggcttggaagagccggctcgtctagaacccccacaggatgaacagaaggaaaccaacgccgactcggtccgcactagcctgaggtaa

SEQ ID NO: 8445 - DNA, 45 bp, synthetic construct
  source 1..45: mol_type = other DNA
  misc_feature 1..45: note = Synthetic
atgaacagaaggaaaccaacgccgactcggtccgcactagcctga

SEQ ID NO: 8446 - DNA, 144 bp, synthetic construct
  source 1..144: mol_type = other DNA
  misc_feature 1..144: note = Synthetic
ttgcccagggacaaatttcggaaaagctctttctttgtttgggtcatcatcttattccaaaaggccttttccatgcctttgggtgttgtgactaacagcactttagaagtaacagacgactcggtccgcactagcctgaggtaa

SEQ ID NO: 8447 - DNA, 72 bp, synthetic construct
  source 1..72: mol_type = other DNA
  misc_feature 1..72: note = Synthetic
atcaccacccagccttccagctacgtagtcctgaatagaaactccgactcggtccgcactagcctgaggtaa

SEQ ID NO: 8448 - DNA, 108 bp, synthetic construct
  misc_feature 1..108: note = Synthetic
  source 1..108: mol_type = other DNA
ttgtcttccgatctccctgtctcttctcccttggaaccgatgaccaatctagagactaacttggaaactttatattcatacgactcggtccgcactagcctgaggtaa

SEQ ID NO: 8449 - DNA, 222 bp, synthetic construct
  misc_feature 1..222: note = Synthetic
  source 1..222: mol_type = other DNA
atctctaaatacctcataaaacgaaaaaaaagctattatcaaatactgtacggaatggattcattctcttctctttttatgaaactctgttgtatatctactgataaaactggaagcaaaaaatctgataaaaagaataagaataagatcaaggattatatggaacacgattattataaaataacaatagttcccgactcggtccgcactagcctgaggtaa

SEQ ID NO: 8450 - DNA, 24 bp, synthetic construct
  misc_feature 1..24: note = Synthetic
  source 1..24: mol_type = other DNA
atgcccccacaaaaagagacatag

SEQ ID NO: 8451 - DNA, 174 bp, synthetic construct
  source 1..174: mol_type = other DNA
  misc_feature 1..174: note = Synthetic
atcgctatggtctactccctctcgcgatgcgctctctgttcgctgaaggggtcctctggaggtgatttctctgttctactccgtgtggcttcctccctctggggtactctcaacccttcgggccggagtgtcctccaaacttggcccgactcggtccgcactagcctgaggtaa

SEQ ID NO: 8452 - DNA, 216 bp, synthetic construct
  misc_feature 1..216: note = Synthetic
  source 1..216: mol_type = other DNA
aggtggaagccatctctggatcccgtggcgtctcctaaagaggggtatatgcccaagacccgaaagcaacgcagtcgccgacccagaaaccaaagaccatcaactccatggcccatttcccaggtttcggacagagccttctctacgggtaccctgtctacgttttcggcgactgtgtacaggccgatcgactcggtccgcactagcctgaggtaa

SEQ ID NO: 8453 - DNA, 135 bp, synthetic construct
  source 1..135: mol_type = other DNA
  misc_feature 1..135: note = Synthetic
atgaatgagctcactttaattgacttctatttgtgctttttagcctttctgctattccttgttttaataatgcttattatattttggttttcactcgaaatccaggatctagaagaaccttgtaccaaagtctaa

SEQ ID NO: 8454 - DNA, 165 bp, synthetic construct
  source 1..165: mol_type = other DNA
  misc_feature 1..165: note = Synthetic
atggagggctctaacggattttcgagttcgttggctggcctttcctcatcacgctcttcacttcgcctcctcactcatcttctttccctcccccccccgaatcgcgacgcccgccgccactctggctggtaccgctccgactcggtccgcactagcctgaggtaa

SEQ ID NO: 8455 - DNA, 216 bp, synthetic construct
  source 1..216: mol_type = other DNA
  misc_feature 1..216: note = Synthetic
ctggctatccggagaaacagcacacgacttggcgttctgtgtgtcgcgatgtctctgcgcgcagtctggcatctggggcttttgggaagcctcgtgggggctgttcttgccgccacccatcggggacctgcggccaacacaacggaccccttaacgcacgccccagtgtcccctcaccccagccccctcgactcggtccgcactagcctgaggtaa

SEQ ID NO: 8456 - DNA, 189 bp, synthetic construct
  source 1..189: mol_type = other DNA
  misc_feature 1..189: note = Synthetic
atttccaatccttttatgtcggagtcgccgctgcaacacgggtttcacgatctgtgctcgctgctgtggctcactctgccgctcaccgcacctaccacactgtccttgactgctatgataggctttacctcaacaccaacccccatctctcttatccccttcccaacgactcggtccgcactagcctga

SEQ ID NO: 8457 - DNA, 219 bp, synthetic construct
  source 1..219: mol_type = other DNA
  misc_feature 1..219: note = Synthetic
atgctgtttccctgcagacaatgcgagagaatgaatcagaattcaaatatctgcttcactcacggacagaaagactgtttagagtgctttcccgtgtcagaatctcaacccgtttctgtcgtcaaaaaggcgtatcagaaactgtgctacattcatcatatcatgggaaaggtgccagacgcttgcactgcctgcgcgactcggtccgcactagcctga

SEQ ID NO: 8458 - DNA, 15 bp, synthetic construct
  source 1..15: mol_type = other DNA
  misc_feature 1..15: note = Synthetic
atgggcggagcgtag

SEQ ID NO: 8459 - DNA, 168 bp, synthetic construct
  source 1..168: mol_type = other DNA
  misc_feature 1..168: note = Synthetic
atgggtgcgagtggatccaagaagctttccaagcattcgcgaggactacgagagagactcttgcgggcgcgtggggatggttatgggaagcagcgcgacgcatcgggaggggaatactcgcagttccaagaagaatcaggcgactcggtccgcactagcctgaggtaa

SEQ ID NO: 8460 - DNA, 129 bp, synthetic construct
  misc_feature 1..129: note = Synthetic
  source 1..129: mol_type = other DNA
attcgcgaggactacgagagagactcttgcgggcgcgtggggatggttatgggaagcagcgcgacgcatcgggaggggaatactcgcagttccaagaagaatcaggcgactcggtccgcactagcctga

SEQ ID NO: 8461 - DNA, 165 bp, synthetic construct
  source 1..165: mol_type = other DNA
  misc_feature 1..165: note = Synthetic
atgccggtgcgagtggatccaagaagctttccaagcattcgcgaggactacgagagagactcttgcgggcgcgtggggatggttatgggaagcagcgcgacgcatcgggaggggaatactcgcagttccaagaagaatcaggcgactcggtccgcactagcctga

SEQ ID NO: 8462 - DNA, 150 bp, synthetic construct
  source 1..150: mol_type = other DNA
  misc_feature 1..150: note = Synthetic
aagaagctttccaagcattcgcgaggactacgagagagactcttgcgggcgcgtggggatggttatgggaagcagcgcgacgcatcgggaggggaatactcgcagttccaagaagaatcaggcgactcggtccgcactagcctgaggtaa

SEQ ID NO: 8463 - DNA, 63 bp, synthetic construct
  source 1..63: mol_type = other DNA
  misc_feature 1..63: note = Synthetic
ctgtctacttcaaccccttctccggatctcctgggcattacgactcggtccgcactagcctga

SEQ ID NO: 8464 - DNA, 36 bp, synthetic construct
  source 1..36: mol_type = other DNA
  misc_feature 1..36: note = Synthetic
atgtttgctcttcgtcgttttctggtgtcatcatga

SEQ ID NO: 8465 - DNA, 30 bp, synthetic construct
  source 1..30: mol_type = other DNA
  misc_feature 1..30: note = Synthetic
atgttctcaccaagtgcccactttagctga

SEQ ID NO: 8466 - DNA, 36 bp, synthetic construct
  misc_feature 1..36: note = Synthetic
  source 1..36: mol_type = other DNA
atgtcctgcagttctgcccgactcggtccgcactag

SEQ ID NO: 8467 - DNA, 39 bp, synthetic construct
  source 1..39: mol_type = other DNA
  misc_feature 1..39: note = Synthetic
gtggttcttcttgcttccatttctttcttctgttcatga

SEQ ID NO: 8468 - DNA, 81 bp, synthetic construct
  misc_feature 1..81: note = Synthetic
  source 1..81: mol_type = other DNA
ataggacaaacaggcgcactcgagcacaatggcgtgtcttatcgaatgggtcgactccatcttcaaccgacgccaccgtaa

SEQ ID NO: 8469 - DNA, 168 bp, synthetic construct
  misc_feature 1..168: note = Synthetic
  source 1..168: mol_type = other DNA
atggcgtgtcttatcgaatgggtcgactccatcttcaaccgacgccaccgtaatttcgggccggaagacatgtacaggccctccgaccccaccccgccctccaaatctcgcactccccgcaccccgcaccaacacacccccgactcggtccgcactagcctgaggtaa

SEQ ID NO: 8470 - DNA, 81 bp, synthetic construct
  misc_feature 1..81: note = Synthetic
  source 1..81: mol_type = other DNA
ataggacaaacaggcgcactcgagcacagccgcgtgtcttatcgaatgggtcgactccatcttcaaccgacgccaccgtaa

SEQ ID NO: 8471 - DNA, 156 bp, synthetic construct
  misc_feature 1..156: note = Synthetic
  source 1..156: mol_type = other DNA
atcgaatgggtcgactccatcttcaaccgacgccaccgtaatttcgggccggaagacatgtacaggccctccgaccccaccccgccctccaaatctcgcactccccgcaccccgcaccaacacacccccgactcggtccgcactagcctgaggtaa

SEQ ID NO: 8472 - DNA, 81 bp, synthetic construct
  misc_feature 1..81: note = Synthetic
  source 1..81: mol_type = other DNA
acgcagggggtgggaagccctcaaatattggtggaatctcctacagtattggagtcaggaactaaagagccgtgctgttag

SEQ ID NO: 8473 - DNA, 69 bp, synthetic construct
  source 1..69: mol_type = other DNA
  misc_feature 1..69: note = Synthetic
atcatcgtgcctcccttacggaaaccagttatcgcttattacaacatactacggcagagagctgactaa

SEQ ID NO: 8474 - DNA, 21 bp, synthetic construct
  misc_feature 1..21: note = Synthetic
  source 1..21: mol_type = other DNA
atgttggatttatttgcatag

SEQ ID NO: 8475 - DNA, 93 bp, synthetic construct
  misc_feature 1..93: note = Synthetic
  source 1..93: mol_type = other DNA
atcgatacaattagtaagttgaagtcgatccaagttagagaggaggtcaaatcgtacaacgccaggtgtctaagacgacgctgtcgagtgtaa

SEQ ID NO: 8476 - DNA, 195 bp, synthetic construct
  source 1..195: mol_type = other DNA
  misc_feature 1..195: note = Synthetic
ctgtttggaactttaacattgcttatcatggcagacaacggtactattaccgttgaggagcttaaacaactcctggaacaatggaacctagtaataggtttcctattcctagcctggattatgttactacaatttgcctattctaatcggaacaggtttttgtacatcgactcggtccgcactagcctgaggtaa

SEQ ID NO: 8477 - DNA, 207 bp, synthetic construct
  source 1..207: mol_type = other DNA
  misc_feature 1..207: note = Synthetic
attattattattctgtttggaactttaacattgcttatcgccgcagacaacggtactattaccgttgaggagcttaaacaactcctggaacaatggaacctagtaataggtttcctattcctagcctggattatgttactacaatttgcctattctaatcggaacaggtttttgtacatcgactcggtccgcactagcctgaggtaa

SEQ ID NO: 8478 - DNA, 186 bp, synthetic construct
  misc_feature 1..186: note = Synthetic
  source 1..186: mol_type = other DNA
atgaccgggaagagcatccagccagagaatctggagtaccggataatgctgtcagttcatggctcccagcacagtgggatgatcgttaatgacacaggacatgaaactgatgagaatagagcgaaggttgagataacgcccaattcaccaagagccgaagccacgactcggtccgcactagcctga

SEQ ID NO: 8479 - DNA, 204 bp, synthetic construct
  misc_feature 1..204: note = Synthetic
  source 1..204: mol_type = other DNA
ttgatcaaacccagcttcagcttgcctgctccagagatgaccggctcaaccatcgcgcccacaacggactatcgcaacaccactgctaccggactaacatctgccctaaatttaccccaagttcatgcctttgtcaatgactgggcgagcttggacatgtggtggttttccatagccgactcggtccgcactagcctgaggtaa

SEQ ID NO: 8480 - DNA, 153 bp, synthetic construct
  source 1..153: mol_type = other DNA
  misc_feature 1..153: note = Synthetic
atcgcgcccacaacggactatcgcaacaccactgctaccggactaacatctgccctaaatttaccccaagttcatgcctttgtcaatgactgggcgagcttggacatgtggtggttttccatagccgactcggtccgcactagcctgaggtaa

SEQ ID NO: 8481 - DNA, 195 bp, synthetic construct
  misc_feature 1..195: note = Synthetic
  source 1..195: mol_type = other DNA
ctgccggtcgccgatctcccgaaagccatggacaccaagcccaaaacgacgaccaccgtcaaggttcctccggggccgatggggtacgtgtatggccgcgcctgtccggccgaaggcctggagctgctgtcgctactgtcggcgcgcagcggcgacgcggacgtcgccgactcggtccgcactagcctgaggtaa

SEQ ID NO: 8482 - DNA, 195 bp, synthetic construct
  misc_feature 1..195: note = Synthetic
  source 1..195: mol_type = other DNA
ctgccggtcgccgatctcccgaaagccgccgacaccaagcccaaaacgacgaccaccgtcaaggttcctccggggccgatggggtacgtgtatggccgcgcctgtccggccgaaggcctggagctgctgtcgctactgtcggcgcgcagcggcgacgcggacgtcgccgactcggtccgcactagcctgaggtaa

SEQ ID NO: 8483 - DNA, 60 bp, synthetic construct
  source 1..60: mol_type = other DNA
  misc_feature 1..60: note = Synthetic
gtgaaactactagtatccgctttattcgtaattgaccacgccattacgatacaaacttaa

SEQ ID NO: 8484 - DNA, 213 bp, synthetic construct
  source 1..213: mol_type = other DNA
  misc_feature 1..213: note = Synthetic
gtgacctatcaagcaagaacgaaattaaacctggggcaaataaccatggagctgctgatccacaggttaagtgcaatcttcctaactcttgctattaatgcattgtacctcacctcaagtcagaacataactgaggagttttaccaatcgacatgtagtgcagttagcagaggttattttagtgccgactcggtccgcactagcctgaggtaa

SEQ ID NO: 8485 - DNA, 213 bp, synthetic construct
  source 1..213: mol_type = other DNA
  misc_feature 1..213: note = Synthetic
gtgacctatcaagcaagaacgaaattaaacctggggcaaataaccgccgagctgctgatccacaggttaagtgcaatcttcctaactcttgctattaatgcattgtacctcacctcaagtcagaacataactgaggagttttaccaatcgacatgtagtgcagttagcagaggttattttagtgccgactcggtccgcactagcctgaggtaa

SEQ ID NO: 8486 - DNA, 174 bp, synthetic construct
  source 1..174: mol_type = other DNA
  misc_feature 1..174: note = Synthetic
atgcgcgcgtacttgccgagctcctcgaagacgggaaactcggttagctgcagccagagcacgaacagcgaggccgcgagcgtgagcgtgaagaacaccagcgtggaggtgcgcgcagcgcgcaggctgcgcagggcgcgctcgcgcgcgaactcccgactcggtccgcactag

SEQ ID NO: 8487 - DNA, 72 bp, synthetic construct
  misc_feature 1..72: note = Synthetic
  source 1..72: mol_type = other DNA
gtggtgtacttcttgttgatggccataagattgctactcgtgttcaagtgggtcagttgcctaaatatgtaa

SEQ ID NO: 8488 - DNA, 168 bp, synthetic construct
  source 1..168: mol_type = other DNA
  misc_feature 1..168: note = Synthetic
atggatcgtagcaacagagaacaccatagtcaccgagatcatcgcgaacatcgagattccaaagagcctcccaccatggcttttcacatgaaaacttggaaaacaatcaataagcctctaagagcttttgcaaagcttttcgactcggtccgcactagcctgaggtaa

SEQ ID NO: 8489 - DNA, 186 bp, synthetic construct
  misc_feature 1..186: note = Synthetic
  source 1..186: mol_type = other DNA
atctatttttggtgcagcgccgatcgtagcaacagagaacaccatagtcaccgagatcatcgcgaacatcgagattccaaagagcctcccaccatggcttttcacatgaaaacttggaaaacaatcaataagcctctaagagcttttgcaaagcttttcgactcggtccgcactagcctgaggtaa

SEQ ID NO: 8490 - DNA, 192 bp, synthetic construct
  source 1..192: mol_type = other DNA
  misc_feature 1..192: note = Synthetic
ctgttcaacgactgccgctgtttttttcgcatcactttccgtaccagaaaaatgacgcctgactctggccatctgctcgtcaaatctggccgcatccagactcaaatcaacgaccagatcgcctaccggttcagccataccggactcctcctgcgatcccttctgataccgactcggtccgcactagcctga

SEQ ID NO: 8491 - DNA, 141 bp, synthetic construct
  source 1..141: mol_type = other DNA
  misc_feature 1..141: note = Synthetic
atgacgcctgactctggccatctgctcgtcaaatctggccgcatccagactcaaatcaacgaccagatcgcctaccggttcagccataccggactcctcctgcgatcccttctgataccgactcggtccgcactagcctga

SEQ ID NO: 8492 - DNA, 102 bp, synthetic construct
  source 1..102: mol_type = other DNA
  misc_feature 1..102: note = Synthetic
ctggccatctgctcgtcaaatctggccgcatccagactcaaatcaacgaccagatcgcctaccggttcagccataccggactcctcctgcgatcccttctga

SEQ ID NO: 8493 - DNA, 195 bp, synthetic construct
  source 1..195: mol_type = other DNA
  misc_feature 1..195: note = Synthetic
ctgtaccgtcgggtcataaacggcaagatgcggcgtggcggttatctgaaaatagcccggcgtcagctcaatcctcgacggtgctgccggtgcggcaatccggaacgataccgacgccggatcgccctgctgcccccacgcatttaccgcccggactgtcagcctgtagttccgactcggtccgcactagcctga

SEQ ID NO: 8494 - DNA, 27 bp, synthetic construct
  source 1..27: mol_type = other DNA
  misc_feature 1..27: note = Synthetic
ataatattaaacattcgttcgacctaa

SEQ ID NO: 8495 - DNA, 60 bp, synthetic construct
  misc_feature 1..60: note = Synthetic
  source 1..60: mol_type = other DNA
gtgaaactactagtatccgctttattcgtaattgaccacgccattacaatacaaacttaa

SEQ ID NO: 8496 - DNA, 90 bp, synthetic construct
  source 1..90: mol_type = other DNA
  misc_feature 1..90: note = Synthetic
ctgtgtgaggtgggtcttaagaaaatgcgtgcaataactgggcatatccccgacgggcaggggttgagttaccgagacttcgttacctaa

SEQ ID NO: 8497 - DNA, 30 bp, synthetic construct
  source 1..30: mol_type = other DNA
  misc_feature 1..30: note = Synthetic
atgcaatctaagttggccgctaaggtctga

SEQ ID NO: 8498 - DNA, 30 bp, synthetic construct
  misc_feature 1..30: note = Synthetic
  source 1..30: mol_type = other DNA
ctggcatttttgtcgcgctgggctttgtag

SEQ ID NO: 8499 - DNA, 18 bp, synthetic construct
  misc_feature 1..18: note = Synthetic
  source 1..18: mol_type = other DNA
atggcgttatcacggtaa

SEQ ID NO: 8500 - DNA, 207 bp, synthetic construct
  misc_feature 1..207: note = Synthetic
  source 1..207: mol_type = other DNA
ctgtctttcagaccttgttggacatcccgtacaatcaagatgttcctgtatgttgtttgcagtctggcggtttgctttcgaggactattaagcctttctctgcaatcgtctccaaatttgtgccctggagtgatttcaacgccttacacgttgacctgtccgtctaatacatccttgcccgactcggtccgcactagcctgaggtaa

SEQ ID NO: 8501 - DNA, 207 bp, synthetic construct
  source 1..207: mol_type = other DNA
  misc_feature 1..207: note = Synthetic
ctgtctttcagaccttgttggacatcccgtacaatcaaggccttcctgtatgttgtttgcagtctggcggtttgctttcgaggactattaagcctttctctgcaatcgtctccaaatttgtgccctggagtgatttcaacgccttacacgttgacctgtccgtctaatacatccttgcccgactcggtccgcactagcctgaggtaa

SEQ ID NO: 8502 - DNA, 93 bp, synthetic construct
  source 1..93: mol_type = other DNA
  misc_feature 1..93: note = Synthetic
atgacgacggtgacgagcgcctatttcgcgatccgctcaccacgtacgagtatctcgacgactgtcgtgacgactcggtccgcactagcctga

SEQ ID NO: 8503 - DNA, 90 bp, synthetic construct
  source 1..90: mol_type = other DNA
  misc_feature 1..90: note = Synthetic
acgacggtgacgagcgcctatttcgcgatccgctcaccacgtacgagtatctcgacgactgtcgtgacgactcggtccgcactagcctga

SEQ ID NO: 8504 - DNA, 120 bp, synthetic construct
  source 1..120: mol_type = other DNA
  misc_feature 1..120: note = Synthetic
ctgtgcctcttcagctaccaccgcttgagagacttactcttgattgtaacgaggattgtggaacttctgggacgcagggggtgggaagccctcaaatattggtggaatctcctacagtag

SEQ ID NO: 8505 - DNA, 18 bp, synthetic construct
  misc_feature 1..18: note = Synthetic
  source 1..18: mol_type = other DNA
atgcatttaaagttctag

SEQ ID NO: 8506 - DNA, 132 bp, synthetic construct
  misc_feature 1..132: note = Synthetic
  source 1..132: mol_type = other DNA
atgtaccatttgcccctggatgttctgcactatagggtaattttggctgacctgattgctgtgtcctgtgtcagctgctgcttgctgtgcttttttcttacttttgttttgctcttcctctatcttgtctaa

SEQ ID NO: 8507 - DNA, 93 bp, synthetic construct
  source 1..93: mol_type = other DNA
  misc_feature 1..93: note = Synthetic
atgaagcgatcatatggaaaggcgaaagagactgctcgacaatatctaccaagtaccccaacagtgccatcttctataagaagcgttttataa

SEQ ID NO: 8508 - DNA, 75 bp, synthetic construct
  source 1..75: mol_type = other DNA
  misc_feature 1..75: note = Synthetic
ataccagactcctgtttgtgtgcatcaatctcgctatctttgttggtgttaatggtaggctgtaagcggaactga

SEQ ID NO: 8509 - DNA, 36 bp, synthetic construct
  source 1..36: mol_type = other DNA
  misc_feature 1..36: note = Synthetic
atgcacagcgcaacgcttcgactcggtccgcactag

SEQ ID NO: 8510 - DNA, 219 bp, synthetic construct
  source 1..219: mol_type = other DNA
  misc_feature 1..219: note = Synthetic
attagaattagttttagagatcccttcttcgggtgcaactcaagatcaattatgaaggtaactattttgacagcctacattgcagcaagtgttttcacctgttgccactcccagttggccctcagtgagctcaccaagattggcattatccctgggaggtcatatgatctcaaaacctcgactcaagcttccgactcggtccgcactagcctgaggtaa

SEQ ID NO: 8511 - DNA, 90 bp, synthetic construct
  source 1..90: mol_type = other DNA
  misc_feature 1..90: note = Synthetic
gtgagctcaccaagattggcattatccctgggaggtcatatgatctcaaaacctcgactcaagcttccgactcggtccgcactagcctga

SEQ ID NO: 8512 - DNA, 219 bp, synthetic construct
  misc_feature 1..219: note = Synthetic
  source 1..219: mol_type = other DNA
attagaattagttttagagatcccttcttcgggtgcaactcaagatcaattgccaaggtaactattttgacagcctacattgcagcaagtgttttcacctgttgccactcccagttggccctcagtgagctcaccaagattggcattatccctgggaggtcatatgatctcaaaacctcgactcaagcttccgactcggtccgcactagcctgaggtaa

SEQ ID NO: 8513 - DNA, 147 bp, synthetic construct
  source 1..147: mol_type = other DNA
  misc_feature 1..147: note = Synthetic
atagcccggaatgcgatggagcaagactctacaggttgtatccctcgccttcagactgcgtggtatagccccaaaactaatcacccgaaacgagcagctgatctaatcgatcgaggggacttaatctatttctggcacataatgtaa

SEQ ID NO: 8514 - DNA, 129 bp, synthetic construct
  source 1..129: mol_type = other DNA
  misc_feature 1..129: note = Synthetic
acggatcttctgccaaaatatatgttaaaccagtcatgcaatccagcacaatcatcgaagaagcctgagaaaatatcattcattatgtatgataattccttcgactcggtccgcactagcctgaggtaa

SEQ ID NO: 8515 - DNA, 54 bp, synthetic construct
  misc_feature 1..54: note = Synthetic
  source 1..54: mol_type = other DNA
ctgttatctttgcagaaaactaaaaagaacgagccgagtatcatcacttcttga

SEQ ID NO: 8516 - DNA, 63 bp, synthetic construct
  misc_feature 1..63: note = Synthetic
  source 1..63: mol_type = other DNA
ctgtctacttcaaccccttctccggctctcctggccagtacgactcggtccgcactagcctga

SEQ ID NO: 8517 - DNA, 168 bp, synthetic construct
  misc_feature 1..168: note = Synthetic
  source 1..168: mol_type = other DNA
atggccgcgcccacgggcttcgctgcgcaggtgcacgcgctggtgcgcgacgggctctgtgcggacatgcccttctacgagacgttgccggagctgaacctggtcttcggaaagaaccatacgcctagcctgcagtacggcgactcggtccgcactagcctgaggtaa

SEQ ID NO: 8518 - DNA, 156 bp, synthetic construct
  misc_feature 1..156: note = Synthetic
  source 1..156: mol_type = other DNA
acgggcttcgctgcgcaggtgcacgcgctggtgcgcgacgggctctgtgcggacatgcccttctacgagacgttgccggagctgaacctggtcttcggaaagaaccatacgcctagcctgcagtacggcgactcggtccgcactagcctgaggtaa

SEQ ID NO: 8519 - DNA, 63 bp, synthetic construct
  source 1..63: mol_type = other DNA
  misc_feature 1..63: note = Synthetic
gtgtttggagtggagtggtgtgtttcagttgccgataccacgccagcgtcgcctcccagttaa

SEQ ID NO: 8520 - DNA, 201 bp, synthetic construct
  source 1..201: mol_type = other DNA
  misc_feature 1..201: note = Synthetic
atgtggctctcggaaattgagccagccagaattgcatgtgtcctcattgttgtgttcctattgctggtggtgctcatacctgagccagaaaagcaaagatctccccaggacaaccaaatggcaatcatcatcatggtagcagtaggtcttctgggcttgattaccgccaatgaactcgcgactcggtccgcactagcctga

SEQ ID NO: 8521 - DNA, 180 bp, synthetic construct
  misc_feature 1..180: note = Synthetic
  source 1..180: mol_type = other DNA
atggatgagaacacgtatgctatggagttgcttactgggtacgcccctgtatctccgatcgttatagcgagaactcataccgcacttatatttttgatgggtaagccaacaacatccagacgtgacgtgtatagaacgtgtagagatcacgctaccccgactcggtccgcactagcctga

SEQ ID NO: 8522 - DNA, 39 bp, synthetic construct
  misc_feature 1..39: note = Synthetic
  source 1..39: mol_type = other DNA
ttggtcagaaatattgtattgtatatactaactctctaa

SEQ ID NO: 8523 - DNA, 180 bp, synthetic construct
  misc_feature 1..180: note = Synthetic
  source 1..180: mol_type = other DNA
atggatgagaacacgtatgctatggagttgcttactgggtacgcccctgtatctccgatcgttattgcgagaactcataccgcacttatatttttgatgggtaagccaacaacatccagacgtgatgtgtatagaacgtgtagagatcacgctaccccgactcggtccgcactagcctga

SEQ ID NO: 8524 - DNA, 180 bp, synthetic construct
  source 1..180: mol_type = other DNA
  misc_feature 1..180: note = Synthetic
atggatgagaacacgtatgctatggagttgcttactgggtacgcccctgtatctccgatcgttatagcgagaactcataccgcacttatatttttgatgggtaagccaacaacatccagacgtgatgtgtatagaacatgtagagatcacgctaccccgactcggtccgcactagcctga

SEQ ID NO: 8525 - DNA, 201 bp, synthetic construct
  misc_feature 1..201: note = Synthetic
  source 1..201: mol_type = other DNA
attgtatatactaactctctaatggatgagaacacgtatgctatggagttgcttactgggtacgcccctgtatctccgatcgttatagcgagaactcataccgcacttatatttttgatgggtaagccaacaacatctagacgtgatgtgtatagaacgtgtagagatcacgctaccccgactcggtccgcactagcctga

SEQ ID NO: 8526 - DNA, 42 bp, synthetic construct
  misc_feature 1..42: note = Synthetic
  source 1..42: mol_type = other DNA
acgcggagtacgtggaaattgaaagcgaacccagactgttaa

SEQ ID NO: 8527 - DNA, 168 bp, synthetic construct
  source 1..168: mol_type = other DNA
  misc_feature 1..168: note = Synthetic
atggtgttcccgatcgtgtgctcgacgtgcggccgcgacctgtcgcacgagcggtttctgctcatcgtgcgacagcggccgctaaaggttgttttgcggacggtgcgcaacgtctgctgccgtataaagttgtctacacacgactcggtccgcactagcctgaggtaa

SEQ ID NO: 8528 - DNA, 165 bp, synthetic construct
  misc_feature 1..165: note = Synthetic
  source 1..165: mol_type = other DNA
gtgttcccgatcgtgtgctcgacgtgcggccgcgacctgtcgcacgagcggtttctgctcatcgtgcgacagcggccgctaaaggttgttttgcggacggtgcgcaacgtctgctgccgtataaagttgtctacacacgactcggtccgcactagcctgaggtaa

SEQ ID NO: 8529 - DNA, 48 bp, synthetic construct
  misc_feature 1..48: note = Synthetic
  source 1..48: mol_type = other DNA
atggaggcactatgctcagacgactcggtccgcactagcctgaggtaa

SEQ ID NO: 8530 - DNA, 201 bp, synthetic construct
  misc_feature 1..201: note = Synthetic
  source 1..201: mol_type = other DNA
atgtggctctcggaaattgagccagccagaattgcatgtgtcctcattgttgtgttcctattgctggtggtgctcatacctgagccagaaaagcaaagatctccccaggacaaccaagccgcaatcatcatcatggtagcagtaggtcttctgggcttgattaccgccaatgaactcgcgactcggtccgcactagcctga

SEQ ID NO: 8531 - DNA, 213 bp, synthetic construct
  source 1..213: mol_type = other DNA
  misc_feature 1..213: note = Synthetic
atggactctgacgctcctggtcctgtgatgtgttttcgtagacagatggaagacatcaatttttcgtccctggctccgcgacacggcacgcggccgttcatgggcacctggagcgacatcggcaccagccaactgaacgggggcgccttcaattggagcagtctctggagcgggcttaagaatttcgactcggtccgcactagcctgaggtaa

SEQ ID NO: 8532 - DNA, 213 bp, synthetic construct
  misc_feature 1..213: note = Synthetic
  source 1..213: mol_type = other DNA
atggactctgacgctcctggtcctgtgatgtgttttcgtagacaggccgaagacatcaatttttcgtccctggctccgcgacacggcacgcggccgttcatgggcacctggagcgacatcggcaccagccaactgaacgggggcgccttcaattggagcagtctctggagcgggcttaagaatttcgactcggtccgcactagcctgaggtaa

SEQ ID NO: 8533 - DNA, 102 bp, synthetic construct
  misc_feature 1..102: note = Synthetic
  source 1..102: mol_type = other DNA
ttgaggatacatggggatctgatggtaatccaattacaaaaactacatccgattatcaagattctgatgtatcacaagacgactcggtccgcactagcctga

SEQ ID NO: 8534 - DNA, 60 bp, synthetic construct
  source 1..60: mol_type = other DNA
  misc_feature 1..60: note = Synthetic
atgctaaagcaaattgcgccacagaatcatcaacactacccaataaatctgatgtcttga

SEQ ID NO: 8535 - DNA, 96 bp, synthetic construct
  source 1..96: mol_type = other DNA
  misc_feature 1..96: note = Synthetic
atgacagtaactccaatactcatgtccgctgactcgttgctcccagacacaccaaaactgggaagctccatgctgaaattggcaacaaacccataa

SEQ ID NO: 8536 - DNA, 63 bp, synthetic construct
  source 1..63: mol_type = other DNA
  misc_feature 1..63: note = Synthetic
ttgtccatgcattcgttgaattgcatgaaccacgcactcccttccagcgttgcacctcattga

SEQ ID NO: 8537 - DNA, 111 bp, synthetic construct
  source 1..111: mol_type = other DNA
  misc_feature 1..111: note = Synthetic
acgcactcccttccagcgttgcacctcattgagcccccaagataccagttgaggacaagccgtatgatatccggtcagacccacttctcaagaacagccattcagcgatga

SEQ ID NO: 8538 - DNA, 63 bp, synthetic construct
  misc_feature 1..63: note = Synthetic
  source 1..63: mol_type = other DNA
atgatacgacgcgtaccgcgctacatcgtcacgccgctgcacgcgcgactcggtccgcactag

SEQ ID NO: 8539 - DNA, 168 bp, synthetic construct
  misc_feature 1..168: note = Synthetic
  source 1..168: mol_type = other DNA
atgtccctggaaagggccctggcgagactgactggagtgccaatgagtactcatgccccgaagactcgcgagtcagaagaggcctgtcccgtatacccccaccctgtggtgccccgccttgtcctggaagtgcataggaacgactcggtccgcactagcctgaggtaa

SEQ ID NO: 8540 - DNA, 162 bp, synthetic construct
  source 1..162: mol_type = other DNA
  misc_feature 1..162: note = Synthetic
ctggaaagggccctggcgagactgactggagtgccaatgagtactcatgccccgaagactcgcgagtcagaagaggcctgtcccgtatacccccaccctgtggtgccccgccttgtcctggaagtgcataggaacgactcggtccgcactagcctgaggtaa

SEQ ID NO: 8541 - DNA, 78 bp, synthetic construct
  source 1..78: mol_type = other DNA
  misc_feature 1..78: note = Synthetic
ttgatcatcgataacacgttatcaaccattgagtttgtatacatggtagtcgactcggtccgcactagcctgaggtaa

SEQ ID NO: 8542 - DNA, 93 bp, synthetic construct
  misc_feature 1..93: note = Synthetic
  source 1..93: mol_type = other DNA
aggtacctacacgtattgatcatcgataacacgttatcaaccattgagtttgtatacatggcagtcgactcggtccgcactagcctgaggtaa

SEQ ID NO: 8543 - DNA, 216 bp, synthetic construct
  misc_feature 1..216: note = Synthetic
  source 1..216: mol_type = other DNA
ctgcggagttgttgctttgttcaggagacgacgacgggagcgaacggggccgcgctggatacgctagcggggctggctatctgcgtgggtctagtcatgggggttaccgtgatcgcgtcgtgcgcgctgctggtgttttattattgcgatgagagggaggatggccgtccgtcgaagctgttgcaacgcgactcggtccgcactagcctgaggtaa

SEQ ID NO: 8544 - DNA, 93 bp, synthetic construct
  source 1..93: mol_type = other DNA
  misc_feature 1..93: note = Synthetic
atggtacccacaaaagctttcactttaattacccttttaacgacctttgtcaaacaaccagcgctctacaatataatgacaatgtccaggtag

SEQ ID NO: 8545 - DNA, 42 bp, synthetic construct
  misc_feature 1..42: note = Synthetic
  source 1..42: mol_type = other DNA
atagacctcacccccgtgtcgcgaaaaggtcaatttcagtaa

SEQ ID NO: 8546 - DNA, 192 bp, synthetic construct
  misc_feature 1..192: note = Synthetic
  source 1..192: mol_type = other DNA
aagtgtattccggtgggcatgatgaacggctcgtggggtctcaccagtatcggacactcatttgtcagtctgagtctggcttcatttgctctcgacgtcattctaaatttgcttgtttcgaacacatattccaccctgggtagaggggcagagtcggactgcattgcagagtgtcgactcggtccgcactag

SEQ ID NO: 8547 - DNA, 60 bp, synthetic construct
  source 1..60: mol_type = other DNA
  misc_feature 1..60: note = Synthetic
ataagctttgataaagccttcctcgcaaattccggatacatgaacatgtcgccgacatga

SEQ ID NO: 8548 - DNA, 30 bp, synthetic construct
  misc_feature 1..30: note = Synthetic
  source 1..30: mol_type = other DNA
ataaaaaacttaggattaacgtattcctga

SEQ ID NO: 8549 - DNA, 168 bp, synthetic construct
  source 1..168: mol_type = other DNA
  misc_feature 1..168: note = Synthetic
atggaattcgaaatccaaaacagaactacatctgatatactgtatccagaatgccatttgaattctcctatagtcaaagggaaaatagcacaattacatacgattatgagcttaccccaaccatatgatatggatgacagcgactcggtccgcactagcctgaggtaa

SEQ ID NO: 8550 - DNA, 15 bp, synthetic construct
  source 1..15: mol_type = other DNA
  misc_feature 1..15: note = Synthetic
ttggctctattctga

SEQ ID NO: 8551 - DNA, 12 bp, synthetic construct
  source 1..12: mol_type = other DNA
  misc_feature 1..12: note = Synthetic
atgaaattgtag

SEQ ID NO: 8552 - DNA, 60 bp, synthetic construct
  misc_feature 1..60: note = Synthetic
  source 1..60: mol_type = other DNA
ttgcagaatttgttaaagaaaatgagagagttaatgtatctagagtggttgaatgtttga

SEQ ID NO: 8553 - DNA, 21 bp, synthetic construct
  source 1..21: mol_type = other DNA
  misc_feature 1..21: note = Synthetic
atgacatgtgtaaagacctaa

SEQ ID NO: 8554 - DNA, 216 bp, synthetic construct
  source 1..216: mol_type = other DNA
  misc_feature 1..216: note = Synthetic
ctgcggagttgttgctttgttcaggagacgacgacgggagcgaacgggatggcgctggatacgctagcggggctggctatctgcgtgggtctagtcatgggggttaccgtgatcgcgtcgtgcgcgctgctggtgttttattattgcgatgagagggaggatggccgtccgtcgaagctgttgcaacgcgactcggtccgcactagcctgaggtaa

SEQ ID NO: 8555 - DNA, 27 bp, synthetic construct
  source 1..27: mol_type = other DNA
  misc_feature 1..27: note = Synthetic
atgatgaggaagcgtgggccgagctaa

SEQ ID NO: 8556 - DNA, 33 bp, synthetic construct
  source 1..33: mol_type = other DNA
  misc_feature 1..33: note = Synthetic
atgattctatttcctcaccatacaataaattag

SEQ ID NO: 8557 - DNA, 216 bp, synthetic construct
  source 1..216: mol_type = other DNA
  misc_feature 1..216: note = Synthetic
aggatgctgactctcagacgttacgctgtagggcagtcgcaaggcacggcgcttacatgtactagtcctgcccatgtatccagaaaccgcgacccgttgatccgcacatgccaaatctatgcgagtgctcctcgagctcaaaaccaaagtgtctatgcagataacgcgaattactggacgcacagtatcgcatcgactcggtccgcactagcctga

SEQ ID NO: 8558 - DNA, 93 bp, synthetic construct
  misc_feature 1..93: note = Synthetic
  source 1..93: mol_type = other DNA
atgcgagtgctcctcgagctcaaaaccaaagtgtctatgcagataacgcgaattactggacgcacagtatcgcatcgactcggtccgcactag

SEQ ID NO: 8559 - DNA, 168 bp, synthetic construct
  misc_feature 1..168: note = Synthetic
  source 1..168: mol_type = other DNA
atgaagaatcttccgggcgtgttcgcgttccccgacaacgagaccatcttcgcgcacgcgtactcgcagcgcgagctggaagccatgttgcccgcgcgcgcgggcgcgcagccgcacgccttcgcgtacgccgcatggcccgactcggtccgcactagcctgaggtaa

SEQ ID NO: 8560 - DNA, 111 bp, synthetic construct
  misc_feature 1..111: note = Synthetic
  source 1..111: mol_type = other DNA
atgggggttcccgcacagggcagagcttttagaatacatgacgaaacggacagcatgtatagatcggtgcttcgcggtagtctggcgggaagtagtccggttaatcgataa

SEQ ID NO: 8561 - DNA, 33 bp, synthetic construct
  source 1..33: mol_type = other DNA
  misc_feature 1..33: note = Synthetic
atggttcctaagttggtcccttgcgggttataa

SEQ ID NO: 8562 - DNA, 33 bp, synthetic construct
  source 1..33: mol_type = other DNA
  misc_feature 1..33: note = Synthetic
atgaaaaccttgctgatagtgatgatatcttaa

SEQ ID NO: 8563 - DNA, 60 bp, synthetic construct
  misc_feature 1..60: note = Synthetic
  source 1..60: mol_type = other DNA
atgggcacgaaaggggaagtgagactagcactgaatatgagaggctcctctctgccttaa

SEQ ID NO: 8564 - DNA, 33 bp, synthetic construct
  misc_feature 1..33: note = Synthetic
  source 1..33: mol_type = other DNA
atgaaaaccttgctgatagtggccatatcttaa

SEQ ID NO: 8565 - DNA, 123 bp, synthetic construct
  source 1..123: mol_type = other DNA
  misc_feature 1..123: note = Synthetic
atgagattcataactgcagagacccatgggcacgaaaggggaagtgagactagcactgaatatgagaggctcctctctatgttaaacaaagtcaagagttcgactcggtccgcactagcctga

SEQ ID NO: 8566 - DNA, 168 bp, synthetic construct
  misc_feature 1..168: note = Synthetic
  source 1..168: mol_type = other DNA
atgaccgcaccacgctcgcgggcccccactacgcgtgcgcggggggacacggaagcgctgtgctcccccgaggacggctgggtaaaggttcaccccacccccggtacgatgctgttccgcgagattctccacgggcagctcgactcggtccgcactagcctgaggtaa

SEQ ID NO: 8567 - DNA, 48 bp, synthetic construct
  misc_feature 1..48: note = Synthetic
  source 1..48: mol_type = other DNA
acggagttgcctgcgcccctagaggatttcgagttggttgccctttag

SEQ ID NO: 8568 - DNA, 84 bp, synthetic construct
  source 1..84: mol_type = other DNA
  misc_feature 1..84: note = Synthetic
ctggtgtccctgatcttcatcatccttatcaatatagaaagtctgaagcactctggaagaaacagctctcacaagcccacctaa

SEQ ID NO: 8569 - DNA, 168 bp, synthetic construct
  source 1..168: mol_type = other DNA
  misc_feature 1..168: note = Synthetic
atggttcttccaatcctgcctccgccccctttaaatgatagacaaggcagcattaactggatggggatggcctacagagtcctggctgatgtgttgaggggaattcgcatggacgggctttttgtttcatcagatacagacgactcggtccgcactagcctgaggtaa

SEQ ID NO: 8570 - DNA, 153 bp, synthetic construct
  source 1..153: mol_type = other DNA
  misc_feature 1..153: note = Synthetic
ctgcctccgccccctttaaatgatagacaaggcagcattaactggatggggatggcctacagagtcctggctgatgtgttgaggggaattcgcatggacgggctttttgtttcatcagatacagacgactcggtccgcactagcctgaggtaa

SEQ ID NO: 8571 - DNA, 45 bp, synthetic construct
  source 1..45: mol_type = other DNA
  misc_feature 1..45: note = Synthetic
atgtcagagaagtcgttcttagcgatgttaatcgtgttcatttag

SEQ ID NO: 8572 - DNA, 39 bp, synthetic construct
  misc_feature 1..39: note = Synthetic
  source 1..39: mol_type = other DNA
atgaaaaaaactaacagaattcaaaatgagttcctttaa

SEQ ID NO: 8573 - DNA, 39 bp, synthetic construct
  misc_feature 1..39: note = Synthetic
  source 1..39: mol_type = other DNA
atgaaaaaaactaacagaattcaaagccagttcctttaa

SEQ ID NO: 8574 - DNA, 21 bp, synthetic construct
  source 1..21: mol_type = other DNA
  misc_feature 1..21: note = Synthetic
ataaaaatccacaacagttga

SEQ ID NO: 8575 - DNA, 12 bp, synthetic construct
  misc_feature 1..12: note = Synthetic
  source 1..12: mol_type = other DNA
attgctacataa

SEQ ID NO: 8576 - DNA, 63 bp, synthetic construct
  source 1..63: mol_type = other DNA
  misc_feature 1..63: note = Synthetic
ataattttactttggttgtcagaccagatttcccgaggatggcgcccccgggaatgcgcctga

SEQ ID NO: 8577 - DNA, 195 bp, synthetic construct
  source 1..195: mol_type = other DNA
  misc_feature 1..195: note = Synthetic
ttggttgtcagaccagatttcccgaggatggcgcccccgggaatgcgcctgaggtcgggacggagcaccggcgcgcccttaacgagaggaagttgtaggaaacgaaacaggtctccggaaagatgtgaccttggcgatgacctacatctacaaccgcgaaggaagcacgactcggtccgcactagcctgaggtaa

SEQ ID NO: 8578 - DNA, 63 bp, synthetic construct
  misc_feature 1..63: note = Synthetic
  source 1..63: mol_type = other DNA
ataattttactttggttgtcagaccagatttcccgagggccgcgcccccgggaatgcgcctga

SEQ ID NO: 8579 - DNA, 153 bp, synthetic construct
  misc_feature 1..153: note = Synthetic
  source 1..153: mol_type = other DNA
atgcgcctgaggtcgggacggagcaccggcgcgcccttaacgagaggaagttgtaggaaacgaaacaggtctccggaaagatgtgaccttggcgatgacctacatctacaaccgcgaaggaagcacgactcggtccgcactagcctgaggtaa

SEQ ID NO: 8580 - DNA, 222 bp, synthetic construct
  misc_feature 1..222: note = Synthetic
  source 1..222: mol_type = other DNA
atcgtaaacgtagcgtccctaccagttgagcgcgtaattttcgtaagcaataaaatggatataattccgcctatagctgtcactgttgcgggagtgggaagccgtaatcaatttgacggtgccctgggaccggcgtcaggtctgtcatgtttaagaacatctttatcgtttttgcatatgacatatgcgcatggcgactcggtccgcactagcctgaggtaa

SEQ ID NO: 8581 - DNA, 222 bp, synthetic construct
  source 1..222: mol_type = other DNA
  misc_feature 1..222: note = Synthetic
atcgtaaacgtagcgtccctaccagttgagcgcgtaattttcgtaagcaataaagccgatataattccgcctatagctgtcactgttgcgggagtgggaagccgtaatcaatttgacggtgccctgggaccggcgtcaggtctgtcatgtttaagaacatctttatcgtttttgcatatgacatatgcgcatggcgactcggtccgcactagcctgaggtaa

SEQ ID NO: 8582 - DNA, 24 bp, synthetic construct
  misc_feature 1..24: note = Synthetic
  source 1..24: mol_type = other DNA
atgccgattgccaggcttaaatga

SEQ ID NO: 8583 - DNA, 54 bp, synthetic construct
  source 1..54: mol_type = other DNA
  misc_feature 1..54: note = Synthetic
atgtcatcgacgtttttatccggaaactgctcgactcggtccgcactagcctga

SEQ ID NO: 8584 - DNA, 42 bp, synthetic construct
  misc_feature 1..42: note = Synthetic
  source 1..42: mol_type = other DNA
atgggaaaatccatccggatggcttataggattcgattttga

SEQ ID NO: 8585 - DNA, 78 bp, synthetic construct
  source 1..78: mol_type = other DNA
  misc_feature 1..78: note = Synthetic
atgacaatttgtggtgtcaccaattttacagattcgaggctgacatcgccaactctacaaccagtgttgagaatttag

SEQ ID NO: 8586 - DNA, 111 bp, synthetic construct
  misc_feature 1..111: note = Synthetic
  source 1..111: mol_type = other DNA
atgtgtcacgagtctttctatgcagcgcactgtacgccgatacacgggagtaacgaaggaaattctactcggaaatccgccttgtccggagacggagtaggaatacaatga

SEQ ID NO: 8587 - DNA, 111 bp, synthetic construct
  source 1..111: mol_type = other DNA
  misc_feature 1..111: note = Synthetic
atgtgtcacgcggctttctatgcagcgcactgtacgccgatacacgggagtaacgaaggaaattctactcggaaatccgccttgtccggagacggagtaggaatacaatga

SEQ ID NO: 8588 - DNA, 111 bp, synthetic construct
  source 1..111: mol_type = other DNA
  misc_feature 1..111: note = Synthetic
atgtgtcacgcgtcattctatgcagcgcactgtacgccgatacacgggagtaacgaaggaaattctactcggaaatccgccttgtccggagacggagtaggaatacaatga

SEQ ID NO: 8589 - DNA, 111 bp, synthetic construct
  source 1..111: mol_type = other DNA
  misc_feature 1..111: note = Synthetic
atgtgtcacgcgtctctctatgcagcgcactgtacgccgatacacgggagtaacgaaggaaattctactcggaaatccgccttgtccggagacggagtaggaatacaatga

SEQ ID NO: 8590 - DNA, 111 bp, synthetic construct
  source 1..111: mol_type = other DNA
  misc_feature 1..111: note = Synthetic
atgtgtcacgcgtcttactatgcagcgcactgtacgccgatacacgggagtaacgaaggaaattctactcggaaatccgccttgtccggagacggagtaggaatacaatga

SEQ ID NO: 8591 - DNA, 75 bp, synthetic construct
  source 1..75: mol_type = other DNA
  misc_feature 1..75: note = Synthetic
atgacgtttaaactgccgtacgtgatgcctcacggccatctccgacaggccccgactcggtccgcactagcctga

SEQ ID NO: 8592 - DNA, 111 bp, synthetic construct
  source 1..111: mol_type = other DNA
  misc_feature 1..111: note = Synthetic
atgtgtcacgcgtctttatatgcagcgcactgtacgccgatacacgggagtaacgaaggaaattctactcggaaatccgccttgtccggagacggagtaggaatacaatga

SEQ ID NO: 8593 - DNA, 81 bp, synthetic construct
  misc_feature 1..81: note = Synthetic
  source 1..81: mol_type = other DNA
atgcagcgcactgtacgccgatacacgggagtaacgaaggaaattctactcggaaatccgccttgtccggagacggagtag

SEQ ID NO: 8594 - DNA, 105 bp, synthetic construct
  source 1..105: mol_type = other DNA
  misc_feature 1..105: note = Synthetic
acggtatgtgtcacgcgtctttccatgcagcgcactgtacgccgatacacgggagtaacgaaggaaattctactcggaaatccgccttgtccggagacggagtag

SEQ ID NO: 8595 - DNA, 111 bp, synthetic construct
  source 1..111: mol_type = other DNA
  misc_feature 1..111: note = Synthetic
atgtgtcacgcgtctttctatacagcgcactgtacgccgatacacgggagtaacgaaggaaattctactcggaaatccgccttgtccggagacggagtaggaatacaatga

SEQ ID NO: 8596 - DNA, 111 bp, synthetic construct
  misc_feature 1..111: note = Synthetic
  source 1..111: mol_type = other DNA
atgtgtcacgcgtctttctatgcaacgcactgtacgccgatacacgggagtaacgaaggaaattctactcggaaatccgccttgtccggagacggagtaggaatacaatga

SEQ ID NO: 8597 - DNA, 81 bp, synthetic construct
  misc_feature 1..81: note = Synthetic
  source 1..81: mol_type = other DNA
atgcaacgcactgtacgccgatacacgggagtaacgaaggaaattctactcggaaatccgccttgtccggagacggagtag

SEQ ID NO: 8598 - DNA, 111 bp, synthetic construct
  source 1..111: mol_type = other DNA
  misc_feature 1..111: note = Synthetic
atgtgtcacgcgtctttctatgcagcacactgtacgccgatacacgggagtaacgaaggaaattctactcggaaatccgccttgtccggagacggagtaggaatacaatga

SEQ ID NO: 8599 - DNA, 81 bp, synthetic construct
  misc_feature 1..81: note = Synthetic
  source 1..81: mol_type = other DNA
atgcagcgcaccgtacgccgatacacgggagtaacgaaggaaattctactcggaaatccgccttgtccggagacggagtag

SEQ ID NO: 8600 - DNA, 111 bp, synthetic construct
  misc_feature 1..111: note = Synthetic
  source 1..111: mol_type = other DNA
atgtgtcacgcgtctttctatgcagcgcaccgtacgccgatacacgggagtaacgaaggaaattctactcggaaatccgccttgtccggagacggagtaggaatacaatga

SEQ ID NO: 8601 - DNA, 111 bp, synthetic construct
  source 1..111: mol_type = other DNA
  misc_feature 1..111: note = Synthetic
atgtgtcacgcgtctttctatgcagcgcactgtacgccgatacacgggagtaacgaaggaaattctactcggaaatccgccttgtccggagacggagtaggaatacaatga

SEQ ID NO: 8602 - DNA, 111 bp, synthetic construct
  source 1..111: mol_type = other DNA
  misc_feature 1..111: note = Synthetic
atgtgtcacgcgtctttctatgcagcgccctgtacgccgatacacgggagtaacgaaggaaattctactcggaaatccgccttgtccggagacggagtaggaatacaatga

SEQ ID NO: 8603 - DNA, 138 bp, synthetic construct
  misc_feature 1..138: note = Synthetic
  source 1..138: mol_type = other DNA
atagactgtaccgtccaggggtacggtatgtgtcccgcgtctttctatgcagcgcactgtacgccgatacacgggagtaacgaaggaaattctactcggaaatccgccttgtccggagacggagtaggaatacaatga

SEQ ID NO: 8604 - DNA, 207 bp, synthetic construct
  misc_feature 1..207: note = Synthetic
  source 1..207: mol_type = other DNA
ctgaatcaggggaaaaccgaagacctggaacttaccataatgtctgaaaaacaggttcccagcttccggtggactcaagccctcaggaggggcctgtctaactggacagagcctgttaaggtagatgtgataaaggatgcaagggcaataatatctgctcttgatttcaatcaggttgccgactcggtccgcactagcctgaggtaa

SEQ ID NO: 8605 - DNA, 207 bp, synthetic construct
  source 1..207: mol_type = other DNA
  misc_feature 1..207: note = Synthetic
ctgaatcaggggaaaaccgaagacctggaacttaccatagcctctgaaaaacaggttcccagcttccggtggactcaagccctcaggaggggcctgtctaactggacagagcctgttaaggtagatgtgataaaggatgcaagggcaataatatctgctcttgatttcaatcaggttgccgactcggtccgcactagcctgaggtaa

SEQ ID NO: 8606 - DNA, 15 bp, synthetic construct
  source 1..15: mol_type = other DNA
  misc_feature 1..15: note = Synthetic
atgagacgtcagtaa

SEQ ID NO: 8607 - DNA, 54 bp, synthetic construct
  misc_feature 1..54: note = Synthetic
  source 1..54: mol_type = other DNA
atggagaaaaacttacaaatacaaaaggactacatcatttacagcttattctaa

SEQ ID NO: 8608 - DNA, 165 bp, synthetic construct
  misc_feature 1..165: note = Synthetic
  source 1..165: mol_type = other DNA
attctaacagggaagatggctcacttaagaaaagttatcttgtcagaaatatctttccatttagtagaagactttgacccatcatgtctaaccaatgatgacatgaaatttatctgtgaggctgttgagggttccacagagccgactcggtccgcactagcctga

SEQ ID NO: 8609 - DNA, 36 bp, synthetic construct
  misc_feature 1..36: note = Synthetic
  source 1..36: mol_type = other DNA
atacaaaaggactacatcatttacagcttattctaa

SEQ ID NO: 8610 - DNA, 123 bp, synthetic construct
  source 1..123: mol_type = other DNA
  misc_feature 1..123: note = Synthetic
atgccttcttttttgagagggatcctgaagccgaaggagaggcaccacgaaaacaagaatcactctcagatgtcatcggactccttgacgtcgtccgactcggtccgcactagcctgaggtaa

SEQ ID NO: 8611 - DNA, 168 bp, synthetic construct
  source 1..168: mol_type = other DNA
  misc_feature 1..168: note = Synthetic
gtggatacctcagcatccaaaactctccttcccgaatggatcaggatgccttcttttttgagagggatcctgaagccgaaggagaggcaccacgaaaacaagaatcactctcagatgtcatcggactccttgacgtcgtccgactcggtccgcactagcctgaggtaa

SEQ ID NO: 8612 - DNA, 111 bp, synthetic construct
  misc_feature 1..111: note = Synthetic
  source 1..111: mol_type = other DNA
atgtgtcacgcgtctttctatgcagggcactgtacgccgatacacgggagtaacgaaggaaattctactcggaaatccgccttgtccggagacggagtaggaatacaatga

SEQ ID NO: 8613 - DNA, 111 bp, synthetic construct
  source 1..111: mol_type = other DNA
  misc_feature 1..111: note = Synthetic
atgtgtcacgcgtctttctatgcggcgcactgtacgccgatacacgggagtaacgaaggaaattctactcggaaatccgccttgtccggagacggagtaggaatacaatga

SEQ ID NO: 8614 - DNA, 111 bp, synthetic construct
  source 1..111: mol_type = other DNA
  misc_feature 1..111: note = Synthetic
atgtgtcacgcgtctttctgcccagcgcactgtacgccgatacacgggagtaacgaaggaaattctactcggaaatccgccttgtccggagacggagtaggaatacaatga

SEQ ID NO: 8615 - DNA, 111 bp, synthetic construct
  source 1..111: mol_type = other DNA
  misc_feature 1..111: note = Synthetic
atgtgtcacgcgtctttctttgcagcgcactgtacgccgatacacgggagtaacgaaggaaattctactcggaaatccgccttgtccggagacggagtaggaatacaatga

SEQ ID NO: 8616 - DNA, 111 bp, synthetic construct
  misc_feature 1..111: note = Synthetic
  source 1..111: mol_type = other DNA
atgtgtcacgcgtttttctatgcagcgcactgtacgccgatacacgggagtaacgaaggaaattctactcggaaatccgccttgtccggagacggagtaggaatacaatga

SEQ ID NO: 8617 - DNA, 111 bp, synthetic construct
  source 1..111: mol_type = other DNA
  misc_feature 1..111: note = Synthetic
atgtgtcacgcttctttctatgcagcgcactgtacgccgatacacgggagtaacgaaggaaattctactcggaaatccgccttgtccggagacggagtaggaatacaatga

SEQ ID NO: 8618 - DNA, 111 bp, synthetic construct
  source 1..111: mol_type = other DNA
  misc_feature 1..111: note = Synthetic
atgtgtcactcgtctttctatgcagcgcactgtacgccgatacacgggagtaacgaaggaaattctactcggaaatccgccttgtccggagacggagtaggaatacaatga

SEQ ID NO: 8619 - DNA, 138 bp, synthetic construct
  source 1..138: mol_type = other DNA
  misc_feature 1..138: note = Synthetic
atagactgtaccgtccaggggtacggtatgtgtcatgcgtctttctatgcagcgcactgtacgccgatacacgggagtaacgaaggaaattctactcggaaatccgccttgtccggagacggagtaggaatacaatga

SEQ ID NO: 8620 - DNA, 144 bp, synthetic construct
  source 1..144: mol_type = other DNA
  misc_feature 1..144: note = Synthetic
atcaatctagttatctctttgagaatgataaacttgatgaagattaagaaaaaggtaatctttcgattatctttaatcttcatccttgattctacaatcatgacagttgtctttagtgacaagggaaagaagcctttttattaa

SEQ ID NO: 8621 - DNA, 18 bp, synthetic construct
  source 1..18: mol_type = other DNA
  misc_feature 1..18: note = Synthetic
acggtttaccgaaaataa

SEQ ID NO: 8622 - DNA, 168 bp, synthetic construct
  misc_feature 1..168: note = Synthetic
  source 1..168: mol_type = other DNA
atggagccgctgctgcggtatctacactccgtggaggatcgctacgtgcgcaccatcttcaacttccacatccggcacgtgcccgacgtgcctgccatctacgagcccatcaaggcgcgcatcgcgggcacgcagctcttcgactcggtccgcactagcctgaggtaa

SEQ ID NO: 8623 - DNA, 159 bp, synthetic construct
  source 1..159: mol_type = other DNA
  misc_feature 1..159: note = Synthetic
ctgctgcggtatctacactccgtggaggatcgctacgtgcgcaccatcttcaacttccacatccggcacgtgcccgacgtgcctgccatctacgagcccatcaaggcgcgcatcgcgggcacgcagctcttcgactcggtccgcactagcctgaggtaa

SEQ ID NO: 8624 - DNA, 15 bp, synthetic construct
  misc_feature 1..15: note = Synthetic
  source 1..15: mol_type = other DNA
acggtagtccagtga

SEQ ID NO: 8625 - DNA, 33 bp, synthetic construct
  misc_feature 1..33: note = Synthetic
  source 1..33: mol_type = other DNA
atggaaagaacccaggcaaaggcgaccgcgtag

SEQ ID NO: 8626 - DNA, 108 bp, synthetic construct
  misc_feature 1..108: note = Synthetic
  source 1..108: mol_type = other DNA
atgagagaggcgccgcacgctgcatggctaaataccgtgaatcccctgacgtcgtctttcgtcccgaacgcgtcatgttgggggcgaggcgtaaaccgtcgaggttga

SEQ ID NO: 8627 - DNA, 207 bp, synthetic construct
  source 1..207: mol_type = other DNA
  misc_feature 1..207: note = Synthetic
atgggatcctgttgtggtagattctgtgacaagaataagaataagaataagaaggaagatgtagaagcgggaggagaaggatattacgattataagaacattaatgatctggatgaattcgaagcacgtgtagaatttggaccattatatatgataaatgaagaaaaatcagacataaatacattggatcgactcggtccgcactag

SEQ ID NO: 8628 - DNA, 48 bp, synthetic construct
  source 1..48: mol_type = other DNA
  misc_feature 1..48: note = Synthetic
acgattataagaacattaatgatctggatgaattcgaagcacgtgtag

SEQ ID NO: 8629 - DNA, 138 bp, synthetic construct
  misc_feature 1..138: note = Synthetic
  source 1..138: mol_type = other DNA
atgctacgggccaacctaaggcttaaccccaattgtggggttacacccaccactgccaaaattgtcgtcgcgcaccctagtccgacgtacccacggggagtgggaaccggctcatgtgcctgggtcgtttggcaatga

SEQ ID NO: 8630 - DNA, 27 bp, synthetic construct
  source 1..27: mol_type = other DNA
  misc_feature 1..27: note = Synthetic
atgcccaatttggatatagcagcctga

SEQ ID NO: 8631 - DNA, 33 bp, synthetic construct
  source 1..33: mol_type = other DNA
  misc_feature 1..33: note = Synthetic
atgcggaagaacggtagaaactatacgaaatag

SEQ ID NO: 8632 - DNA, 33 bp, synthetic construct
  misc_feature 1..33: note = Synthetic
  source 1..33: mol_type = other DNA
atgcaaagaacccaggcaaaggcgaccgcgtag

SEQ ID NO: 8633 - DNA, 33 bp, synthetic construct
  misc_feature 1..33: note = Synthetic
  source 1..33: mol_type = other DNA
ttggaaagaacccaggcaaaggcgaccgcgtag

SEQ ID NO: 8634 - DNA, 204 bp, synthetic construct
  source 1..204: mol_type = other DNA
  misc_feature 1..204: note = Synthetic
atttcgggcgttcaaactctttatatcgacttgcgcgattttttgggtgacgtaaccgtgaccatgccggataccgggcagcgcattacggcgcgagcaggtacgcaaggttattacccggtgctatccactaaccttatgaaattcattgtatccgccactattgacggaaaattcccaacgactcggtccgcactagcctga

SEQ ID NO: 8635 - DNA, 147 bp, synthetic construct
  misc_feature 1..147: note = Synthetic
  source 1..147: mol_type = other DNA
ctgaaaataaaaaaccgctccttccgctcgctcacccgcagctgtctgtaccacaagagagaagaccagctgcagcgcaccctggacgacgccgaagcactgttcagcaaatactgctcagcgtctcttcgactcggtccgcactag

SEQ ID NO: 8636 - DNA, 48 bp, synthetic construct
  misc_feature 1..48: note = Synthetic
  source 1..48: mol_type = other DNA
atgctatctttcagcaaagccgcgggcagcaccctcagcgcgaactga

SEQ ID NO: 8637 - DNA, 168 bp, synthetic construct
  source 1..168: mol_type = other DNA
  misc_feature 1..168: note = Synthetic
atgttcatgtatccggaatttgcaaggaaggctttatcaaagcttatttcaaaaaaattaaacattgaaaaggtgtctagcaagcaccagctcgtgttactggattatggattacacggactattgccaaaatcactgtacgactcggtccgcactagcctgaggtaa

SEQ ID NO: 8638 - DNA, 57 bp, synthetic construct
  source 1..57: mol_type = other DNA
  misc_feature 1..57: note = Synthetic
atggattacacggactattgccaaaatcactgtacgactcggtccgcactagcctga

SEQ ID NO: 8639 - DNA, 162 bp, synthetic construct
  source 1..162: mol_type = other DNA
  misc_feature 1..162: note = Synthetic
atgtatccggaatttgcaaggaaggctttatcaaagcttatttcaaaaaaattaaacattgaaaaggtgtctagcaagcaccagctcgtgttactggattatggattacacggactattgccaaaatcactgtacgactcggtccgcactagcctgaggtaa

SEQ ID NO: 8640 - DNA, 57 bp, synthetic construct
  source 1..57: mol_type = other DNA
  misc_feature 1..57: note = Synthetic
atgaaccacgtaaacgtactgggtggaatgctgccgcggttcccagtctggctctag

SEQ ID NO: 8641 - DNA, 78 bp, synthetic construct
  source 1..78: mol_type = other DNA
  misc_feature 1..78: note = Synthetic
atgacactaaaccaagggtgcgcgcatgcgaatgcggaggcaagcatgctagattccagccggtgtgcgtggatgtga

SEQ ID NO: 8642 - DNA, 36 bp, synthetic construct
  misc_feature 1..36: note = Synthetic
  source 1..36: mol_type = other DNA
atgaacaaatacctgactgggtcaatgataagttga

SEQ ID NO: 8643 - DNA, 45 bp, synthetic construct
  source 1..45: mol_type = other DNA
  misc_feature 1..45: note = Synthetic
atgcacaggagagtaattcactttttgcgactcggtccgcactag

SEQ ID NO: 8644 - DNA, 27 bp, synthetic construct
  source 1..27: mol_type = other DNA
  misc_feature 1..27: note = Synthetic
atgcccaatttggatatagtagcctga

SEQ ID NO: 8645 - DNA, 42 bp, synthetic construct
  source 1..42: mol_type = other DNA
  misc_feature 1..42: note = Synthetic
atgagaaagaggaagttacgcttgttgggaatgcggaagtga

SEQ ID NO: 8646 - DNA, 201 bp, synthetic construct
  source 1..201: mol_type = other DNA
  misc_feature 1..201: note = Synthetic
acggcttcggctacacttcccgcatggatcaagatgccctcatttctaaagaagattctgaagttgagagggaggcgtcaggaggacgagagtcgctctcggatgttatcggattcctcgacgcagtcctatcaagtgaaccaactgacatcggaggggacagaagctggctccgactcggtccgcactagcctgaggtaa

SEQ ID NO: 8647 - DNA, 33 bp, synthetic construct
  source 1..33: mol_type = other DNA
  misc_feature 1..33: note = Synthetic
atggaaagaactcaggcaaaggcgaccgcgtag

SEQ ID NO: 8648 - DNA, 33 bp, synthetic construct
  source 1..33: mol_type = other DNA
  misc_feature 1..33: note = Synthetic
atggaaagaatccaggcaaaggcgaccgcgtag

SEQ ID NO: 8649 - DNA, 33 bp, synthetic construct
  source 1..33: mol_type = other DNA
  misc_feature 1..33: note = Synthetic
atggaaagaccccaggcaaaggcgaccgcgtag

SEQ ID NO: 8650 - DNA, 87 bp, synthetic construct
  misc_feature 1..87: note = Synthetic
  source 1..87: mol_type = other DNA
atgactctgagccagttctcaagggtgtcaaattacattacacataaacgaacttatggatttgtttatgagattttttactcttag

SEQ ID NO: 8651 - DNA, 99 bp, synthetic construct
  misc_feature 1..99: note = Synthetic
  source 1..99: mol_type = other DNA
atgcttctcctgcaagtactgttcatgctacagcaacgataccgctacaagcctcactccctttcggatggcttgtcgactcggtccgcactagcctga

SEQ ID NO: 8652 - DNA, 87 bp, synthetic construct
  source 1..87: mol_type = other DNA
  misc_feature 1..87: note = Synthetic
atgactctgagccagttctcaagggtgtcaaattacattacacataaacgaacttgccgatttgtttatgagattttttactcttag

SEQ ID NO: 8653 - DNA, 18 bp, synthetic construct
  source 1..18: mol_type = other DNA
  misc_feature 1..18: note = Synthetic
atgaaaaacaatacttaa

SEQ ID NO: 8654 - DNA, 75 bp, synthetic construct
  misc_feature 1..75: note = Synthetic
  source 1..75: mol_type = other DNA
atcatgttggcgacatgttcatgtatccggaatttgcgaggaaggctttatcaaagcttatttcaaaaaaattaa

SEQ ID NO: 8655 - DNA, 72 bp, synthetic construct
  source 1..72: mol_type = other DNA
  misc_feature 1..72: note = Synthetic
atgttggcgacgccttcatgtatccggaatttgcgaggaaggctttatcaaagcttatttcaaaaaaattaa

SEQ ID NO: 8656 - DNA, 168 bp, synthetic construct
  misc_feature 1..168: note = Synthetic
  source 1..168: mol_type = other DNA
atggctggcttcctaggtgcgttcagaggcgtgtgctccgaaatatggcagtcgctccgtggacacggacaccaccactcttccaactgtccgcgacgacgcgccaacagcatggacgagcgcgaccggcgccggcaccgcgactcggtccgcactagcctgaggtaa

SEQ ID NO: 8657 - DNA, 33 bp, synthetic construct
  source 1..33: mol_type = other DNA
  misc_feature 1..33: note = Synthetic
atggaaagcacccaggcaaaggcgaccgcgtag

SEQ ID NO: 8658 - DNA, 33 bp, synthetic construct
  misc_feature 1..33: note = Synthetic
  source 1..33: mol_type = other DNA
atggaaataacccaggcaaaggcgaccgcgtag

SEQ ID NO: 8659 - DNA, 33 bp, synthetic construct
  misc_feature 1..33: note = Synthetic
  source 1..33: mol_type = other DNA
atggaaggaacccaggcaaaggcgaccgcgtag

SEQ ID NO: 8660 - DNA, 33 bp, synthetic construct
  source 1..33: mol_type = other DNA
  misc_feature 1..33: note = Synthetic
atggagagaacccaggcaaaggcgaccgcgtag

SEQ ID NO: 8661 - DNA, 33 bp, synthetic construct
  source 1..33: mol_type = other DNA
  misc_feature 1..33: note = Synthetic
atggtaagaacccaggcaaaggcgaccgcgtag

SEQ ID NO: 8662 - DNA, 33 bp, synthetic construct
  source 1..33: mol_type = other DNA
  misc_feature 1..33: note = Synthetic
attgaaagaacccaggcaaaggcgaccgcgtag

SEQ ID NO: 8663 - DNA, 201 bp, synthetic construct
  source 1..201: mol_type = other DNA
  misc_feature 1..201: note = Synthetic
acggcttcggctacacttcccgcatggatcaaggccccctcatttctaaagaagattctgaagttgagagggaggcgtcaggaggacgagagtcgctctcggatgttatcggattcctcgacgcagtcctatcaagtgaaccaactgacatcggaggggacagaagctggctccgactcggtccgcactagcctgaggtaa

SEQ ID NO: 8664 - DNA, 156 bp, synthetic construct
  source 1..156: mol_type = other DNA
  misc_feature 1..156: note = Synthetic
ttggcacttctgtggatatcaaagaagcccctgaaaggccactctataaagatgacatcgtggtgcatgcgcccaataagcacctgctcctctcctgggcccagtttaaaccagctgacctcaatctctggaccgaggctcaccctcctccagtag

SEQ ID NO: 8665 - DNA, 69 bp, synthetic construct
  source 1..69: mol_type = other DNA
  misc_feature 1..69: note = Synthetic
atgcaaccggcaaaatttcgggcgttcaaactctttatatcgacttgcgcgattttttgggtgacgtaa

SEQ ID NO: 8666 - DNA, 162 bp, synthetic construct
  misc_feature 1..162: note = Synthetic
  source 1..162: mol_type = other DNA
atgcattcttattctatatccggtgttaaaaaaaattatcctatcatgtatttgagagtcttatatgtagcaaacatgatagctgtgatgccaataagctttagatattcacgcgtgctagtgttggggatggtcgactcggtccgcactagcctgaggtaa

SEQ ID NO: 8667 - DNA, 111 bp, synthetic construct
  source 1..111: mol_type = other DNA
  misc_feature 1..111: note = Synthetic
ttgagagtcttatatgtagcaaacatgatagctgtgatgccaataagctttagatattcacgcgtgctagtgttggggatggtcgactcggtccgcactagcctgaggtaa

SEQ ID NO: 8668 - DNA, 168 bp, synthetic construct
  misc_feature 1..168: note = Synthetic
  source 1..168: mol_type = other DNA
atggccgggatattcgagagcgtgaaggatctagagaatcacaagataaggctggaagcaccaagagggggatccagattattggtgggaaagaaagattcaactcctatctgtattccgaattttgatgaccaggaaggcgactcggtccgcactagcctgaggtaa

SEQ ID NO: 8669 - DNA, 159 bp, synthetic construct
  misc_feature 1..159: note = Synthetic
  source 1..159: mol_type = other DNA
atattcgagagcgtgaaggatctagagaatcacaagataaggctggaagcaccaagagggggatccagattattggtgggaaagaaagattcaactcctatctgtattccgaattttgatgaccaggaaggcgactcggtccgcactagcctgaggtaa

SEQ ID NO: 8670 - DNA, 90 bp, synthetic construct
  source 1..90: mol_type = other DNA
  misc_feature 1..90: note = Synthetic
atggcctactcgcgtgtcccctcttctcccttcgcagcggccaatgacatcgtattaaatagacggagacgcgacttttgtaacccgtag

SEQ ID NO: 8671 - DNA, 90 bp, synthetic construct
  misc_feature 1..90: note = Synthetic
  source 1..90: mol_type = other DNA
atggctgactcgcgtgtcccctcttctcccttcgcagcggccaatgacatcgtattaaatagacggagacgcgacttttgtaacccgtag

SEQ ID NO: 8672 - DNA, 90 bp, synthetic construct
  misc_feature 1..90: note = Synthetic
  source 1..90: mol_type = other DNA
atggcttacccgcgtgtcccctcttctcccttcgcagcggccaatgacatcgtattaaatagacggagacgcgacttttgtaacccgtag

SEQ ID NO: 8673 - DNA, 90 bp, synthetic construct
  misc_feature 1..90: note = Synthetic
  source 1..90: mol_type = other DNA
atggcttactcccgtgtcccctcttctcccttcgcagcggccaatgacatcgtattaaatagacggagacgcgacttttgtaacccgtag

SEQ ID NO: 8674 - DNA, 42 bp, synthetic construct
  misc_feature 1..42: note = Synthetic
  source 1..42: mol_type = other DNA
atgacaacatcttgcttcttgttctgccttgtagctctttga

SEQ ID NO: 8675 - DNA, 81 bp, synthetic construct
  source 1..81: mol_type = other DNA
  misc_feature 1..81: note = Synthetic
atgcacaagatgttatggtttagcaaagaattgataggagtactggtatataatgtaaatataacaagtgatgaagattaa

SEQ ID NO: 8676 - DNA, 57 bp, synthetic construct
  source 1..57: mol_type = other DNA
  misc_feature 1..57: note = Synthetic
atgcatcttccgtgcccgcttcccacaacaatctcacaaatgatttatctagtatga

SEQ ID NO: 8677 - DNA, 60 bp, synthetic construct
  misc_feature 1..60: note = Synthetic
  source 1..60: mol_type = other DNA
ctgttctgctatacaagacaaactattcagccagcgtcagctgtcttactcatatcatga

SEQ ID NO: 8678 - DNA, 165 bp, synthetic construct
  source 1..165: mol_type = other DNA
  misc_feature 1..165: note = Synthetic
aggaagactgtcaacaccactgataaaatgaactttctacgcaagatagttaggaattgcaaggatgaggacgaccagaagccccctcttgcatctacgcttccgaatgacgacgacctgtggcttccccctcccgacgactcggtccgcactagcctgaggtaa

SEQ ID NO: 8679 - DNA, 96 bp, synthetic construct
  source 1..96: mol_type = other DNA
  misc_feature 1..96: note = Synthetic
atgaggacgaccagaagccccctcttgcatctacgcttccgaatgacgacgacctgtggcttccccctcccgacgactcggtccgcactagcctga

SEQ ID NO: 8680 - DNA, 66 bp, synthetic construct
  misc_feature 1..66: note = Synthetic
  source 1..66: mol_type = other DNA
ctgacgaactatctgatgccgcaactggaacgtatttatttaatgcgtacgtttgaatacgcctag

SEQ ID NO: 8681 - DNA, 168 bp, synthetic construct
  source 1..168: mol_type = other DNA
  misc_feature 1..168: note = Synthetic
atgaggcacctgagagacctgcccgatgagaaaatcatcatcgcttccgggaacgagattctggaactggtggtaaatgccatgatgggcgacgaccctccggagccccccaccccatttgaggcaccttcgctacacgacgactcggtccgcactagcctgaggtaa

SEQ ID NO: 8682 - DNA, 51 bp, synthetic construct
  source 1..51: mol_type = other DNA
  misc_feature 1..51: note = Synthetic
atgagaaaatcatcatcgcttccgggaacgagattctggaactggtggtaa

SEQ ID NO: 8683 - DNA, 111 bp, synthetic construct
  source 1..111: mol_type = other DNA
  misc_feature 1..111: note = Synthetic
atcgtaccggacttagctccccgcaaggtgtttgaggtgctttcggcaatgacgaatcggtcattgacttggagggaggggtccaatggcagctcctcagttacttcctaa

SEQ ID NO: 8684 - DNA, 45 bp, synthetic construct
  misc_feature 1..45: note = Synthetic
  source 1..45: mol_type = other DNA
atgcaagcaggtaaagacagctcgaccgtcatgctgccacgttaa

SEQ ID NO: 8685 - DNA, 192 bp, synthetic construct
  source 1..192: mol_type = other DNA
  misc_feature 1..192: note = Synthetic
acgttgagcaaaattgttaaaaatatgaggcgggttatattgcctactgctcctcctgaatatatggaggccatataccctgtcaggtcaaattcaacaattgctagaggtggcaacagcaatacaggcttcctgacaccggagtcagtcaatggggacactcccgactcggtccgcactagcctgaggtaa

SEQ ID NO: 8686 - DNA, 192 bp, synthetic construct
  misc_feature 1..192: note = Synthetic
  source 1..192: mol_type = other DNA
acgttgagcaaaattgttaaaaatgccaggcgggttatattgcctactgctcctcctgaatatatggaggccatataccctgtcaggtcaaattcaacaattgctagaggtggcaacagcaatacaggcttcctgacaccggagtcagtcaatggggacactcccgactcggtccgcactagcctgaggtaa

SEQ ID NO: 8687 - DNA, 93 bp, synthetic construct
  source 1..93: mol_type = other DNA
  misc_feature 1..93: note = Synthetic
acgcaatacgctcctcttgtctcattgcacgactatcgatcgacagtgacaagaagatttcgggtgttagtgggttgtctgtggtatcgataa

SEQ ID NO: 8688 - DNA, 135 bp, synthetic construct
  source 1..135: mol_type = other DNA
  misc_feature 1..135: note = Synthetic
attcccgggcgaaacctaaaggagattaacattatggctaagaagattttcacctctgcgctgggtaccgctgaaccttacgcttacatcgccaagccggactacggcaacgcgactcggtccgcactagcctga

SEQ ID NO: 8689 - DNA, 135 bp, synthetic construct
  misc_feature 1..135: note = Synthetic
  source 1..135: mol_type = other DNA
attcccgggcgaaacctaaaggagattaacattatggctgccaagattttcacctctgcgctgggtaccgctgaaccttacgcttacatcgccaagccggactacggcaacgcgactcggtccgcactagcctga

SEQ ID NO: 8690 - DNA, 69 bp, synthetic construct
  source 1..69: mol_type = other DNA
  misc_feature 1..69: note = Synthetic
atgagtgccactgttctgatgagctcttcgtcgctgtctccgcttcttcctgccataggagatgcctaa

SEQ ID NO: 8691 - DNA, 36 bp, synthetic construct
  source 1..36: mol_type = other DNA
  misc_feature 1..36: note = Synthetic
ctggctccatttccgactcggtccgcactagcctga

SEQ ID NO: 8692 - DNA, 201 bp, synthetic construct
  misc_feature 1..201: note = Synthetic
  source 1..201: mol_type = other DNA
ataagggtgcaatttagaagaaaacagaagaaaatggaagaagaaacgatacagaatatgactaaaatgctaatggcgacactaactgatcacatagattttaataaaatacttcaaacaacagttacggctatagtagcttttttctttaataaaaagatggcaactcctatcgactcggtccgcactagcctgaggtaa

SEQ ID NO: 8693 - DNA, 195 bp, synthetic construct
  source 1..195: mol_type = other DNA
  misc_feature 1..195: note = Synthetic
gtgcaatttagaagaaaacagaagaaagccgaagaagaaacgatacagaatatgactaaaatgctaatggcgacactaactgatcacatagattttaataaaatacttcaaacaacagttacggctatagtagcttttttctttaataaaaagatggcaactcctatcgactcggtccgcactagcctgaggtaa

SEQ ID NO: 8694 - DNA, 57 bp, synthetic construct
  misc_feature 1..57: note = Synthetic
  source 1..57: mol_type = other DNA
atgagaagagctaccttgcgcagcgcatcatcccggaactcaagctctacttcttaa

SEQ ID NO: 8695 - DNA, 81 bp, synthetic construct
  misc_feature 1..81: note = Synthetic
  source 1..81: mol_type = other DNA
atgcattctctagcttcgttcatatatctaacgactgtcaagttctggagatcgatgatcaggttacagattctaacctga

SEQ ID NO: 8696 - DNA, 90 bp, synthetic construct
  source 1..90: mol_type = other DNA
  misc_feature 1..90: note = Synthetic
atgctgtcgttgattcgatccaatattctcaagtttattaacaaattggatgctctacatgtcgtgaactaccgactcggtccgcactag

SEQ ID NO: 8697 - DNA, 39 bp, synthetic construct
  misc_feature 1..39: note = Synthetic
  source 1..39: mol_type = other DNA
atttcaacgcccgaacacaacgtgtcaaggaacaattga

SEQ ID NO: 8698 - DNA, 207 bp, synthetic construct
  misc_feature 1..207: note = Synthetic
  source 1..207: mol_type = other DNA
gtgaaatataatatagtaataattagaactagaatagctatggattgcggcagagattgcactattctatgtcgtctactggatgaagatgtgacgtacaaaaaaataaaactagagattgaaacgtgtcataacttatcaaagcatatagatagacgaggaaacaatgcgctacattgcgactcggtccgcactagcctgaggtaa

SEQ ID NO: 8699 - DNA, 39 bp, synthetic construct
  source 1..39: mol_type = other DNA
  misc_feature 1..39: note = Synthetic
ctgccgaaaagagagacgacgctttttatcccgctgtga

SEQ ID NO: 8700 - DNA, 168 bp, synthetic construct
  misc_feature 1..168: note = Synthetic
  source 1..168: mol_type = other DNA
atgaggcacctaagagacctgcccgatgaggaaattatcatcgcttccgggagcgagattctggaactggtggtaaatgctatgatgggcgacgaccatccggaaccccccaccccatttgagacaccttcgctgcacgacgactcggtccgcactagcctgaggtaa

SEQ ID NO: 8701 - DNA, 168 bp, synthetic construct
  misc_feature 1..168: note = Synthetic
  source 1..168: mol_type = other DNA
atgggtgctcaggtttcatcacagaaagtgggcgcacatgaaaactcaaatagagcgtatggtggttctaccattaattacaccaccattaattattatagagattcagctagtaacgcggcttcgaaacaggacttctccgactcggtccgcactagcctgaggtaa

SEQ ID NO: 8702 - DNA, 21 bp, synthetic construct
  source 1..21: mol_type = other DNA
  misc_feature 1..21: note = Synthetic
atgaacctcgaaaagacgtag

SEQ ID NO: 8703 - DNA, 210 bp, synthetic construct
  misc_feature 1..210: note = Synthetic
  source 1..210: mol_type = other DNA
ataacaaaagctgcagcctgttacagtctacataatataatcaaacaactacaagaagttgaagttaggcaggctagagataacaaactatctgacagcaaacatgtagcacttcacaacttagtcctatcttatatggagatgagcaaaactcctgcatctttaatcaacaatctcaagagactgccgactcggtccgcactagcctga

SEQ ID NO: 8704 - DNA, 51 bp, synthetic construct
  misc_feature 1..51: note = Synthetic
  source 1..51: mol_type = other DNA
ttgaagttaggcaggctagagataacaaactatctgacagcaaacatgtag

SEQ ID NO: 8705 - DNA, 60 bp, synthetic construct
  source 1..60: mol_type = other DNA
  misc_feature 1..60: note = Synthetic
ctgttgctattacctgtcaaaaggatgctgcaccggctgaaacgactcggtccgcactag

SEQ ID NO: 8706 - DNA, 207 bp, synthetic construct
  misc_feature 1..207: note = Synthetic
  source 1..207: mol_type = other DNA
acgcacgcgagaaaaaatacctccttcaaatcatcacgcatggccgcccttagcgtgcacgacgtgcactcggcggcacagcggcgcgcgccaagccagcaaacgcttttcacgcgcgggctgcgcccgctcatgcgcaacacgtacctcttccacaactatgcgtacggctggattcccgactcggtccgcactagcctgaggtaa

SEQ ID NO: 8707 - DNA, 105 bp, synthetic construct
  source 1..105: mol_type = other DNA
  misc_feature 1..105: note = Synthetic
acgcttttcacgcgcgggctgcgcccgctcatgcgcaacacgtacctcttccacaactatgcgtacggctggattcccgactcggtccgcactagcctgaggtaa

SEQ ID NO: 8708 - DNA, 213 bp, synthetic construct
  misc_feature 1..213: note = Synthetic
  source 1..213: mol_type = other DNA
attttatttcccacgatctattgtagattgaacgccatcaactactgtcagtatttaaaaacctttctcgtccagcgggcacagcctgcagcctgcgatcatactctggtgttggagagcaaggtggacacggtaaggcaggtcctgcgcaagatcgtgagcacggacgccgtattctccgaggcgcgggcacggcgactcggtccgcactag

SEQ ID NO: 8709 - DNA, 216 bp, synthetic construct
  misc_feature 1..216: note = Synthetic
  source 1..216: mol_type = other DNA
atgtctctcagtattgacgtgacgagtcttccttctattccttcaactatatataagaatgaatcgtcttcaacaacgtcaactctttctggaaaatctattggtaggagtgaacagtacatttcaccagatgcagaagcattcaataaatacatgctgtcgaagtctccagaggatattggaccatctgattctgctcgactcggtccgcactag

SEQ ID NO: 8710 - DNA, 117 bp, synthetic construct
  source 1..117: mol_type = other DNA
  misc_feature 1..117: note = Synthetic
gtgaacagtacatttcaccagatgcagaagcattcaataaatacatgctgtcgaagtctccagaggatattggaccatctgattctgctcgactcggtccgcactagcctgaggtaa

SEQ ID NO: 8711 - DNA, 216 bp, synthetic construct
  source 1..216: mol_type = other DNA
  misc_feature 1..216: note = Synthetic
atgtctctcagtattgacgtgacgagtcttccttctattccttcaactatatataagagccaatcgtcttcaacaacgtcaactctttctggaaaatctattggtaggagtgaacagtacatttcaccagatgcagaagcattcaataaatacatgctgtcgaagtctccagaggatattggaccatctgattctgctcgactcggtccgcactag

SEQ ID NO: 8712 - DNA, 174 bp, synthetic construct
  misc_feature 1..174: note = Synthetic
  source 1..174: mol_type = other DNA
ataagagccaatcgtcttcaacaacgtcaactctttctggaaaatctattggtaggagtgaacagtacatttcaccagatgcagaagcattcaataaatacatgctgtcgaagtctccagaggatattggaccatctgattctgctcgactcggtccgcactagcctgaggtaa

SEQ ID NO: 8713 - DNA, 12 bp, synthetic construct
  misc_feature 1..12: note = Synthetic
  source 1..12: mol_type = other DNA
atgggtggctaa

SEQ ID NO: 8714 - DNA, 93 bp, synthetic construct
  misc_feature 1..93: note = Synthetic
  source 1..93: mol_type = other DNA
ttggctgccgcttcacctatggattttgtgctcgctgcttgccttcttgccgcttctggttttcattggtgccgccgactcggtccgcactag

SEQ ID NO: 8715 - DNA, 207 bp, synthetic construct
  source 1..207: mol_type = other DNA
  misc_feature 1..207: note = Synthetic
acggtttctcatacgcgccttttgatagccaccgccgtcatgtctccgaactcagaggccaccgggacggcctgggcgcccccacccccgcgaccctcgcgcggagtcattatgatttcctccgtctcgacgaacgacgtacgtcgctttttactttgtatgcgggtctacagcaccgtcgactcggtccgcactagcctgaggtaa

SEQ ID NO: 8716 - DNA, 207 bp, synthetic construct
  source 1..207: mol_type = other DNA
  misc_feature 1..207: note = Synthetic
acggtttctcatacgcgccttttgatagccaccgccgtcgcctctccgaactcagaggccaccgggacggcctgggcgcccccacccccgcgaccctcgcgcggagtcattatgatttcctccgtctcgacgaacgacgtacgtcgctttttactttgtatgcgggtctacagcaccgtcgactcggtccgcactagcctgaggtaa

SEQ ID NO: 8717 - DNA, 168 bp, synthetic construct
  source 1..168: mol_type = other DNA
  misc_feature 1..168: note = Synthetic
atggctaacttcaatggtttcgaagcaagcagccttattgatcaaggcttagacgacatagaggcaatcggacagatgacctgcattagaccctctgaggagtcaccatacgtagagataccagacactggtatcgtacccgactcggtccgcactagcctgaggtaa

SEQ ID NO: 8718 - DNA, 129 bp, synthetic construct
  source 1..129: mol_type = other DNA
  misc_feature 1..129: note = Synthetic
atgcgaacacaacgtgtcaaggaacaattgagcctaaaaatgctgtcgttgattcgatccaatattctcaagtttattaacaaattggatgctctacatgtcgtgaactaccgactcggtccgcactag

SEQ ID NO: 8719 - DNA, 189 bp, synthetic construct
  source 1..189: mol_type = other DNA
  misc_feature 1..189: note = Synthetic
ctgccaggcagaagctcaaagatgcagaaagagcggtggaattggaccccgatgatgttaacaaaagcacattacagagcagacgggcagctgtgtctgcattggagaccaaactcggagaacttaagcgggaactggctgatcttattgcagctcagaaacgactcggtccgcactagcctgaggtaa

SEQ ID NO: 8720 - DNA, 138 bp, synthetic construct
  source 1..138: mol_type = other DNA
  misc_feature 1..138: note = Synthetic
atgatgttaacaaaagcacattacagagcagacgggcagctgtgtctgcattggagaccaaactcggagaacttaagcgggaactggctgatcttattgcagctcagaaacgactcggtccgcactagcctgaggtaa

SEQ ID NO: 8721 - DNA, 168 bp, synthetic construct
  source 1..168: mol_type = other DNA
  misc_feature 1..168: note = Synthetic
atggatacaacgggagcttccgaaagcagtcaacccatccgagtgaatcttaaacctgacccgttggcgtcgtttacacaagttataccgccactggcgttggaaacaacgtggacatgccctgccaactcacatgcacccgactcggtccgcactagcctgaggtaa

SEQ ID NO: 8722 - DNA, 48 bp, synthetic construct
  misc_feature 1..48: note = Synthetic
  source 1..48: mol_type = other DNA
atctgtcactgtgggaaggtagtcgcgacacccttcccgattttgtaa

SEQ ID NO: 8723 - DNA, 90 bp, synthetic construct
  misc_feature 1..90: note = Synthetic
  source 1..90: mol_type = other DNA
atggcacttgaaccggtggctggggcttcaatagccgccccactcaccggccaaaacaatatcgactcggtccgcactagcctgaggtaa

SEQ ID NO: 8724 - DNA, 162 bp, synthetic construct
  source 1..162: mol_type = other DNA
  misc_feature 1..162: note = Synthetic
atggcgtcgagtgacgccgctccatctaatgatggtgcagccggtcttgtaccagaggctaacaatgagaccatggcacttgaaccggtggctggggcttcaatagccgccccactcaccggccaaaacaatatcgactcggtccgcactagcctgaggtaa

SEQ ID NO: 8725 - DNA, 39 bp, synthetic construct
  source 1..39: mol_type = other DNA
  misc_feature 1..39: note = Synthetic
atggtgtattttatctgtcttataagcgccttcagatga

SEQ ID NO: 8726 - DNA, 84 bp, synthetic construct
  misc_feature 1..84: note = Synthetic
  source 1..84: mol_type = other DNA
atggaaggacgtcgcagtgtagctgacgcctttccctttgcgctgattatgccgctgtttgtcggacatcctattttaacctga

SEQ ID NO: 8727 - DNA, 222 bp, synthetic construct
  misc_feature 1..222: note = Synthetic
  source 1..222: mol_type = other DNA
acggcaaccgcaccttcgcctccggccctccgccagcgcccttccgcgtccgcgatgacctcccggcccgccgaccaagactcggtgcgttccagcgcgtcggtgccgctttaccccgcggcctcgcccgtcccggcagaagcctactactcggaaagcgaagacgaggccgccaacgacttcctcgtgcgcatcgactcggtccgcactagcctgaggtaa

SEQ ID NO: 8728 - DNA, 78 bp, synthetic construct
  source 1..78: mol_type = other DNA
  misc_feature 1..78: note = Synthetic
aagcctactactcggaaagcgaagacgaggccgccaacgacttcctcgtgcgcatcgactcggtccgcactagcctga

SEQ ID NO: 8729 - DNA, 90 bp, synthetic construct
  misc_feature 1..90: note = Synthetic
  source 1..90: mol_type = other DNA
aaggcttactcgcgtgtcccctcttctcccttcgcagcggccaatgacatcgtattaaatagacggagacgcgacttttgtaacccgtag

SEQ ID NO: 8730 - DNA, 90 bp, synthetic construct
  source 1..90: mol_type = other DNA
  misc_feature 1..90: note = Synthetic
atagcttactcgcgtgtcccctcttctcccttcgcagcggccaatgacatcgtattaaatagacggagacgcgacttttgtaacccgtag

SEQ ID NO: 8731 - DNA, 90 bp, synthetic construct
  source 1..90: mol_type = other DNA
  misc_feature 1..90: note = Synthetic
atgccttactcgcgtgtcccctcttctcccttcgcagcggccaatgacatcgtattaaatagacggagacgcgacttttgtaacccgtag

SEQ ID NO: 8732 - DNA, 168 bp, synthetic construct
  misc_feature 1..168: note = Synthetic
  source 1..168: mol_type = other DNA
atgaaaatcattaccagtagcacaaaccaaaatgactctaaatacggaccgagagccggaaaacaatgcatgtcgaacagcttttcatttctccataccgtttacttaaacggaattaacaattctctcaatgcgggtaccgactcggtccgcactagcctgaggtaa

SEQ ID NO: 8733 - DNA, 78 bp, synthetic construct
  source 1..78: mol_type = other DNA
  misc_feature 1..78: note = Synthetic
atgactctaaatacggaccgagagccggaaaacaatgcatgtcgaacagcttttcatttctccataccgtttacttaa

SEQ ID NO: 8734 - DNA, 24 bp, synthetic construct
  source 1..24: mol_type = other DNA
  misc_feature 1..24: note = Synthetic
atgggaaataaaaaagaattataa

SEQ ID NO: 8735 - DNA, 66 bp, synthetic construct
  source 1..66: mol_type = other DNA
  misc_feature 1..66: note = Synthetic
attcagccagcgtcagctgtcttactcatatcgccaggaagactgtcaacaccactgataaaatga

SEQ ID NO: 8736 - DNA, 171 bp, synthetic construct
  misc_feature 1..171: note = Synthetic
  source 1..171: mol_type = other DNA
atcgccaggaagactgtcaacaccactgataaaatgaactttctacgcaagatagttaggaattgcaaggatgaggacgaccagaagccccctcttgcatctacgcttccgaatgacgacgacctgtggcttccccctcccgacgactcggtccgcactagcctgaggtaa

SEQ ID NO: 8737 - DNA, 93 bp, synthetic construct
  source 1..93: mol_type = other DNA
  misc_feature 1..93: note = Synthetic
aggacgaccagaagccccctcttgcatctacgcttccgaatgacgacgacctgtggcttccccctcccgacgactcggtccgcactagcctga

SEQ ID NO: 8738 - DNA, 180 bp, synthetic construct
  misc_feature 1..180: note = Synthetic
  source 1..180: mol_type = other DNA
gtgatcactacccggactgcgctaaccccatgtagcactgctcggcaatattcgcgccgacctttgtgcaattcttccctattgcagatgccgtctccccgcaagactccatgtattcgttttagagcccgccctacggaagctcagagttttccgcaaggcactacgggtcgcgtctga

SEQ ID NO: 8739 - DNA, 69 bp, synthetic construct
  source 1..69: mol_type = other DNA
  misc_feature 1..69: note = Synthetic
atgagtctgactgttctgatgagctcttcgtcgctgtctccgcttcttcctgccataggagatgcctaa

SEQ ID NO: 8740 - DNA, 207 bp, synthetic construct
  misc_feature 1..207: note = Synthetic
  source 1..207: mol_type = other DNA
attagctctttcaaggtatataaatcgctctcggaggtcatgatctcgctgtttttgctgatctgctatttcgttctcatttttaacatcctcgttcctcgcatattcgacaagctgcgccaggagggcgccgcgttcgaccgcctcgccggctccggcaacgtgtaccgctgcgtcggcgactcggtccgcactagcctgaggtaa

SEQ ID NO: 8741 - DNA, 207 bp, synthetic construct
  source 1..207: mol_type = other DNA
  misc_feature 1..207: note = Synthetic
attagctctttcaaggtatataaatcgctctcggaggtcgccatctcgctgtttttgctgatctgctatttcgttctcatttttaacatcctcgttcctcgcatattcgacaagctgcgccaggagggcgccgcgttcgaccgcctcgccggctccggcaacgtgtaccgctgcgtcggcgactcggtccgcactagcctgaggtaa

SEQ ID NO: 8742 - DNA, 189 bp, synthetic construct
  misc_feature 1..189: note = Synthetic
  source 1..189: mol_type = other DNA
ctgctcggcaaaagcttaaggatgccgagaaggcagtggaggtggacccggatgacgttaacaagagcacactacaaagtagacgggcagctgtgtctacattggagaccaaactcggagaacttaagaggcaacttgcagatttggtggcagctcaaaaacgactcggtccgcactagcctgaggtaa

SEQ ID NO: 8743 - DNA, 189 bp, synthetic construct
  source 1..189: mol_type = other DNA
  misc_feature 1..189: note = Synthetic
ctgctcggcaaaagcttaagggccccgagaaggcagtggaggtggacccggatgacgttaacaagagcacactacaaagtagacgggcagctgtgtctacattggagaccaaactcggagaacttaagaggcaacttgcagatttggtggcagctcaaaaacgactcggtccgcactagcctgaggtaa

SEQ ID NO: 8744 - DNA, 27 bp, synthetic construct
  source 1..27: mol_type = other DNA
  misc_feature 1..27: note = Synthetic
atgctgtactgcacctgggccatgtaa

SEQ ID NO: 8745 - DNA, 123 bp, synthetic construct
  source 1..123: mol_type = other DNA
  misc_feature 1..123: note = Synthetic
atggcctcgaaaccaccgagccggaacttcatgaaatcccgggaggtaaacgggcatttcagttcaaggccggccccgtcactgcataaaccatccgactcggtccgcactagcctgaggtaa

SEQ ID NO: 8746 - DNA, 123 bp, synthetic construct
  misc_feature 1..123: note = Synthetic
  source 1..123: mol_type = other DNA
atggcctcgaaaccaccgagccggaacttcatgaaatcccgggaggtaaacgggcatttcagttcaaggccgttgccgtcactgcataaaccatccgactcggtccgcactagcctgaggtaa

SEQ ID NO: 8747 - DNA, 48 bp, synthetic construct
  misc_feature 1..48: note = Synthetic
  source 1..48: mol_type = other DNA
atgacattcttggccgctgactcgttcgtgaaggataaggctatctga

SEQ ID NO: 8748 - DNA, 63 bp, synthetic construct
  misc_feature 1..63: note = Synthetic
  source 1..63: mol_type = other DNA
atgaatagctttcgcttgctgcaggacgacttgattgacaatcggccagcaactaatcgataa

SEQ ID NO: 8749 - DNA, 72 bp, synthetic construct
  misc_feature 1..72: note = Synthetic
  source 1..72: mol_type = other DNA
aagtttcaattaaaattaaaaggaacaccagttcttcaattaaaggagacgactcggtccgcactagcctga

SEQ ID NO: 8750 - DNA, 159 bp, synthetic construct
  source 1..159: mol_type = other DNA
  misc_feature 1..159: note = Synthetic
acgggagcttccgaaagcagtcaacccatccgagtgaatcttaaacctgacccgttggcgtcgtttacacaagttataccgccactggcgttggaaacaacgtggacatgccctgccaactcacatgcacccgactcggtccgcactagcctgaggtaa

SEQ ID NO: 8751 - DNA, 105 bp, synthetic construct
  source 1..105: mol_type = other DNA
  misc_feature 1..105: note = Synthetic
atgtggtgtttcctgggcgctttagtacttgtattcgaggtgatcaagcactatacacgaccttctgcacgattcaaaaggcggtttgcttccaggtggtattga

SEQ ID NO: 8752 - DNA, 168 bp, synthetic construct
  misc_feature 1..168: note = Synthetic
  source 1..168: mol_type = other DNA
atggcgagcgccgcccttagcacgctctacggcgccttcgtcgcgcgctacctgcgcaagctcagcctctactccactaccaactctgtgacctgcgccatccacgtgggccgaatcgtcggcacgctgcagaactgtagcgactcggtccgcactagcctgaggtaa

SEQ ID NO: 8753 - DNA, 117 bp, synthetic construct
  misc_feature 1..117: note = Synthetic
  source 1..117: mol_type = other DNA
ctgcgcaagctcagcctctactccactaccaactctgtgacctgcgccatccacgtgggccgaatcgtcggcacgctgcagaactgtagcgactcggtccgcactagcctgaggtaa

SEQ ID NO: 8754 - DNA, 192 bp, synthetic construct
  source 1..192: mol_type = other DNA
  misc_feature 1..192: note = Synthetic
aggcgcgagctgagcgacagagaacttatgcacagcttgcaaagagctctaacgggggccgggactgatggggagaactactttgacatgggagcggatttgcaatggcaacccagtcgcagggccatggaggctgcagggtgtgagcttccttacatagaagaggtggatgaacgactcggtccgcactag

SEQ ID NO: 8755 - DNA, 90 bp, synthetic construct
  misc_feature 1..90: note = Synthetic
  source 1..90: mol_type = other DNA
atggcttattcgcgtgtcccctcttctcccttcgcagcggccaatgacatcgtattaaatagacggagacgcgacttttgtaacccgtag

SEQ ID NO: 8756 - DNA, 90 bp, synthetic construct
  source 1..90: mol_type = other DNA
  misc_feature 1..90: note = Synthetic
atggcttcctcgcgtgtcccctcttctcccttcgcagcggccaatgacatcgtattaaatagacggagacgcgacttttgtaacccgtag

SEQ ID NO: 8757 - DNA, 90 bp, synthetic construct
  source 1..90: mol_type = other DNA
  misc_feature 1..90: note = Synthetic
atgggttactcgcgtgtcccctcttctcccttcgcagcggccaatgacatcgtattaaatagacggagacgcgacttttgtaacccgtag

SEQ ID NO: 8758 - DNA, 90 bp, synthetic construct
  source 1..90: mol_type = other DNA
  misc_feature 1..90: note = Synthetic
ctggcttactcgcgtgtcccctcttctcccttcgcagcggccaatgacatcgtattaaatagacggagacgcgacttttgtaacccgtag

SEQ ID NO: 8759 - DNA, 39 bp, synthetic construct
  source 1..39: mol_type = other DNA
  misc_feature 1..39: note = Synthetic
atgtttccgttctacaggcggcagtggaacagatcctaa

SEQ ID NO: 8760 - DNA, 27 bp, synthetic construct
  source 1..27: mol_type = other DNA
  misc_feature 1..27: note = Synthetic
atgaacctctcgctaagcaaaccatag

SEQ ID NO: 8761 - DNA, 195 bp, synthetic construct
  source 1..195: mol_type = other DNA
  misc_feature 1..195: note = Synthetic
atagtcattaacgagaaaaacatcgtaatggcattcaccggtgatgaactggcgcgcatgttgcagtttaaggataagatgatttcttcggcggggctcgctctgaaatttgagaaagttgtacaggaggctatggcttccggaatagttcttcaacatatcacttgcgactcggtccgcactagcctgaggtaa

SEQ ID NO: 8762 - DNA, 195 bp, synthetic construct
  misc_feature 1..195: note = Synthetic
  source 1..195: mol_type = other DNA
atagtcattaacgagaaaaacatcgtagccgcattcaccggtgatgaactggcgcgcatgttgcagtttaaggataagatgatttcttcggcggggctcgctctgaaatttgagaaagttgtacaggaggctatggcttccggaatagttcttcaacatatcacttgcgactcggtccgcactagcctgaggtaa

SEQ ID NO: 8763 - DNA, 189 bp, synthetic construct
  source 1..189: mol_type = other DNA
  misc_feature 1..189: note = Synthetic
ctggagatcctccatacagccatggaacaggaacaggatacaccatggacacagtcaacagaacacatcaatattcagaaaaggggaaatggacaacgaacacagagactggagcaccccaactcaatccgattgatggaccactacctgaggataatgagcgactcggtccgcactagcctgaggtaa

SEQ ID NO: 8764 - DNA, 135 bp, synthetic construct
  misc_feature 1..135: note = Synthetic
  source 1..135: mol_type = other DNA
atggacacagtcaacagaacacatcaatattcagaaaaggggaaatggacaacgaacacagagactggagcaccccaactcaatccgattgatggaccactacctgaggataatgagcgactcggtccgcactag

SEQ ID NO: 8765 - DNA, 189 bp, synthetic construct
  misc_feature 1..189: note = Synthetic
  source 1..189: mol_type = other DNA
ctggagatcctccatacagccgccgaacaggaacaggatacaccatggacacagtcaacagaacacatcaatattcagaaaaggggaaatggacaacgaacacagagactggagcaccccaactcaatccgattgatggaccactacctgaggataatgagcgactcggtccgcactagcctgaggtaa

SEQ ID NO: 8766 - DNA, 192 bp, synthetic construct
  misc_feature 1..192: note = Synthetic
  source 1..192: mol_type = other DNA
atactggagaccctccatacagccatggaacaggaacaggatacaccatggacacagtcaacagaacacataaatactcagaaaaaggaaagtggacaacgaacacagagactggagcaccccaactcaatccaattgatggaccattacctgaggacaacgagcgactcggtccgcactagcctgaggtaa

SEQ ID NO: 8767 - DNA, 135 bp, synthetic construct
  misc_feature 1..135: note = Synthetic
  source 1..135: mol_type = other DNA
atggacacagtcaacagaacacataaatactcagaaaaaggaaagtggacaacgaacacagagactggagcaccccaactcaatccaattgatggaccattacctgaggacaacgagcgactcggtccgcactag

SEQ ID NO: 8768 - DNA, 192 bp, synthetic construct
  misc_feature 1..192: note = Synthetic
  source 1..192: mol_type = other DNA
atactggagaccctccatacagccgccgaacaggaacaggatacaccatggacacagtcaacagaacacataaatactcagaaaaaggaaagtggacaacgaacacagagactggagcaccccaactcaatccaattgatggaccattacctgaggacaacgagcgactcggtccgcactagcctgaggtaa

SEQ ID NO: 8769 - DNA, 48 bp, synthetic construct
  misc_feature 1..48: note = Synthetic
  source 1..48: mol_type = other DNA
atgcaactttttcacctctgcctaacgactcggtccgcactagcctga

SEQ ID NO: 8770 - DNA, 159 bp, synthetic construct
  source 1..159: mol_type = other DNA
  misc_feature 1..159: note = Synthetic
atgtcaacgaccgaccttgaggcatacttcaaagactgtttgtttaaagactgggaggagttgggggaggagattaggttaaaggtctttgtactaggaggctgtaggcataaattggtgcccgcaccagcaccatgcaactttttcacctctgcctaa

SEQ ID NO: 8771 - DNA, 18 bp, synthetic construct
  source 1..18: mol_type = other DNA
  misc_feature 1..18: note = Synthetic
atgcaagggcctttttaa

SEQ ID NO: 8772 - DNA, 219 bp, synthetic construct
  source 1..219: mol_type = other DNA
  misc_feature 1..219: note = Synthetic
ctgcgggcgagcatcgggtcatcgggcatatcggccttgaccgcgttgaacatgctgtatgcctcgcagcgcggccgtctgaccgagaacctaagaaacgccctgcagcaggatagcaccacgcaaggctgcctgggtgccgagaccccgagtattatgtacacgggggccaagtcagacaggtgggctcacgactcggtccgcactagcctgaggtaa

SEQ ID NO: 8773 - DNA, 207 bp, synthetic construct
  misc_feature 1..207: note = Synthetic
  source 1..207: mol_type = other DNA
atcgggtcatcgggcatatcggccttgaccgcgttgaacatgctgtatgcctcgcagcgcggccgtctgaccgagaacctaagaaacgcccttcagcaggacagcaccacgcaaggctgcctgggtgccgagaccccgagtattatgtacacaggggccaagtcagacaggtgggctcacgactcggtccgcactagcctgaggtaa

SEQ ID NO: 8774 - DNA, 96 bp, synthetic construct
  source 1..96: mol_type = other DNA
  misc_feature 1..96: note = Synthetic
gtggcctccctgcccagggccgtgtccaaccatttgattagaagggtagcatcctcgggaagtgcgggtgggctgcggttgcaggccagggcgtaa

SEQ ID NO: 8775 - DNA, 96 bp, synthetic construct
  source 1..96: mol_type = other DNA
  misc_feature 1..96: note = Synthetic
gtggcctccctgcccagggccgtgtccaaccatttgattagaagggtagcatcctcgggaagtgtgggtgggctgcggttgcaggccagggcgtaa

SEQ ID NO: 8776 - DNA, 96 bp, synthetic construct
  misc_feature 1..96: note = Synthetic
  source 1..96: mol_type = other DNA
gtggcctccctgcccagggccgtgtccaaccatttgattagaagggtagcatcctcgggaagtgcaggtgggctgcggttgcaggccagggcgtaa

SEQ ID NO: 8777 - DNA, 123 bp, synthetic construct
  source 1..123: mol_type = other DNA
  misc_feature 1..123: note = Synthetic
acggtcaccttcatgagtcagtgcttcgccggtcgctgtggggccaatcaaccgaccgcccatttctccatcagcgtgcccgcctccagaatcataaatacgactcggtccgcactagcctga

SEQ ID NO: 8778 - DNA, 171 bp, synthetic construct
  misc_feature 1..171: note = Synthetic
  source 1..171: mol_type = other DNA
ttggcctgccgccgcccggattgcggcttctctttctcacctggaccggtgatactgctgtggtgttgccttctgctgcccattgtttcctcagccgccgtcagcgtcgctcctaccgccgccgagaaagtccccgcggagtgcgactcggtccgcactagcctgaggtaa

SEQ ID NO: 8779 - DNA, 174 bp, synthetic construct
  source 1..174: mol_type = other DNA
  misc_feature 1..174: note = Synthetic
ctgactgaggccagaaaagagactgtgatggggcagcctactccgaagacccctcgacaactaagggagttcctagggacggcaggcttctgtcgcctctggatccctgggtttgcagaaatggcagcccccttgtaccctctcaccgactcggtccgcactagcctgaggtaa

SEQ ID NO: 8780 - DNA, 207 bp, synthetic construct
  misc_feature 1..207: note = Synthetic
  source 1..207: mol_type = other DNA
ctggggtatcttctaaaagagggtcagaggccgctgactgaggccagaaaagagactgtgatggggcagcctactccgaagacccctcgacaactaagggagttcctagggacggcaggcttctgtcgcctctggatccctgggtttgcagaaatggcagcccccttgtaccctctcaccgactcggtccgcactagcctgaggtaa

SEQ ID NO: 8781 - DNA, 219 bp, synthetic construct
  misc_feature 1..219: note = Synthetic
  source 1..219: mol_type = other DNA
ctgcgggcgagcatcgggtcatcgggcatatcggccttgaccgcgttgaacatgctgtatgcctcgcagcgcggccgtctgaccgagaacctaagaaacgcccttcagcaggacagcaccacgcaaggctgcctgggtgccgagaccccgagtattatgtacacgggggccaagtcagacaggtgggctcacgactcggtccgcactagcctgaggtaa

SEQ ID NO: 8782 - DNA, 207 bp, synthetic construct
  source 1..207: mol_type = other DNA
  misc_feature 1..207: note = Synthetic
atcgggtcatcgggcatatcggccttgaccgcgttgaacgccctgtatgcctcgcagcgcggccgtctgaccgagaacctaagaaacgccctgcagcaggatagcaccacgcaaggctgcctgggtgccgagaccccgagtattatgtacacgggggccaagtcagacaggtgggctcacgactcggtccgcactagcctgaggtaa

SEQ ID NO: 8783 - DNA, 24 bp, synthetic construct
  misc_feature 1..24: note = Synthetic
  source 1..24: mol_type = other DNA
atgcctcgcagcgcggccgtctga

SEQ ID NO: 8784 - DNA, 207 bp, synthetic construct
  source 1..207: mol_type = other DNA
  misc_feature 1..207: note = Synthetic
atcgggtcatcgggcatatcggccttgaccgcgttgaacgccctgtatgcctcgcagcgcggccgtctgaccgagaacctaagaaacgcccttcagcaggacagcaccacgcaaggctgcctgggtgccgagaccccgagtattatgtacacaggggccaagtcagacaggtgggctcacgactcggtccgcactagcctgaggtaa

SEQ ID NO: 8785 - DNA, 207 bp, synthetic construct
  source 1..207: mol_type = other DNA
  misc_feature 1..207: note = Synthetic
atcgggtcatcgggcatatcggccttgaccgcgttgaacgccctgtatgcctcgcagcgcggccgtctgaccgagaacctaagaaacgcccttcagcaggacagcaccacgcaaggctgcctgggtgccgagaccccgagtattatgtacacgggggccaagtcagacaggtgggctcacgactcggtccgcactagcctgaggtaa

SEQ ID NO: 8786 - DNA, 198 bp, synthetic construct
  source 1..198: mol_type = other DNA
  misc_feature 1..198: note = Synthetic
ataggtaataaaaaggcgctcagtgcgaggatgcgaaccgattgggaaaaagtggatctcctgccaccagttggaagaatggctgttgatgtgatgaaagtagaaatctcgtcggcggacagagcattcatgctgatgtttgtaaaagcgtgcgcagtgttcgcatcgttcgactcggtccgcactagcctgaggtaa

SEQ ID NO: 8787 - DNA, 198 bp, synthetic construct
  source 1..198: mol_type = other DNA
  misc_feature 1..198: note = Synthetic
ataggtaataaaaaggcgctcagtgcgagggcccgaaccgattgggaaaaagtggatctcctgccaccagttggaagaatggctgttgatgtgatgaaagtagaaatctcgtcggcggacagagcattcatgctgatgtttgtaaaagcgtgcgcagtgttcgcatcgttcgactcggtccgcactagcctgaggtaa

SEQ ID NO: 8788 - DNA, 63 bp, synthetic construct
  misc_feature 1..63: note = Synthetic
  source 1..63: mol_type = other DNA
atgattgcgatggtctcagttgagcattcaccttttaaatcgactcggtccgcactagcctga

SEQ ID NO: 8789 - DNA, 213 bp, synthetic construct
  misc_feature 1..213: note = Synthetic
  source 1..213: mol_type = other DNA
aagaagtggcgctgcgtgctcttcaagggcgcggcggtggcggcctcggagttcgggttccgctcgcacgacggcgtctcacccgcgcgcttcgcgagcgtggaggcgtgcgcggacgagatcttcacggccgcgagcgacttccgcgtgttcaacccgtgtttgccgccgaatcagggcagcgaggcctgccttcgactcggtccgcactag

SEQ ID NO: 8790 - DNA, 51 bp, synthetic construct
  source 1..51: mol_type = other DNA
  misc_feature 1..51: note = Synthetic
atgacctcggattgtggacaggagatcgcgatcttctgcccgaattcgtaa

SEQ ID NO: 8791 - DNA, 165 bp, synthetic construct
  misc_feature 1..165: note = Synthetic
  source 1..165: mol_type = other DNA
atgatggcgtctaaggacgctacatcaagcgtggatggcgctagtggcgctggtcagttggtaccggaggttaatgcttctgaccctcttgcaatggatcctgtagcaggttcttcgacagcagtcgcgactgctggcgactcggtccgcactagcctgaggtaa

SEQ ID NO: 8792 - DNA, 39 bp, synthetic construct
  source 1..39: mol_type = other DNA
  misc_feature 1..39: note = Synthetic
acgccagagaaggcagcgactcggtccgcactagcctga

SEQ ID NO: 8793 - DNA, 111 bp, synthetic construct
  source 1..111: mol_type = other DNA
  misc_feature 1..111: note = Synthetic
gtggctcggggcgggggtgtccgggggctcggaaactgcctccaccgggcccacgatcaccgcgggagcggtgacgaacgcgagcgaggcccccgactcggtccgcactag

SEQ ID NO: 8794 - DNA, 87 bp, synthetic construct
  misc_feature 1..87: note = Synthetic
  source 1..87: mol_type = other DNA
atgttaattggaatctcggacggctggttaattatcctatccgcgaacttgaaaccatgcgactcggtccgcactagcctgaggtaa

SEQ ID NO: 8795 - DNA, 192 bp, synthetic construct
  misc_feature 1..192: note = Synthetic
  source 1..192: mol_type = other DNA
aggctttcatgcgcgataaatcggatggcggcgccgacgacgcccgtggtgcaccttacgccggtgttcgtggagcctacaatcgcacactcgctgctgcgcgcagagtcctacctcgcgatcgcggttcttgagctcgtgctcgcactcgcgcttgcgctcgtcgactcggtccgcactagcctgaggtaa

SEQ ID NO: 8796 - DNA, 192 bp, synthetic construct
  source 1..192: mol_type = other DNA
  misc_feature 1..192: note = Synthetic
aggctttcatgcgcgataaatcgggccgcggcgccgacgacgcccgtggtgcaccttacgccggtgttcgtggagcctacaatcgcacactcgctgctgcgcgcagagtcctacctcgcgatcgcggttcttgagctcgtgctcgcactcgcgcttgcgctcgtcgactcggtccgcactagcctgaggtaa

SEQ ID NO: 8797 - DNA, 207 bp, synthetic construct
  misc_feature 1..207: note = Synthetic
  source 1..207: mol_type = other DNA
attatttatttacaaagaaaggtcgggacaagtatctcaatggggtccaaactatatatggttcagggcaccagtgcatatcaaactgcagtggggttctggctggacatcgggaggaggtacatattggctatagtcctatcagctttcgggctgacctgcacagtcactattgcactcgactcggtccgcactagcctgaggtaa

SEQ ID NO: 8798 - DNA, 207 bp, synthetic construct
  source 1..207: mol_type = other DNA
  misc_feature 1..207: note = Synthetic
attatttatttacaaagaaaggtcgggacaagtatctcagccgggtccaaactatatatggttcagggcaccagtgcatatcaaactgcagtggggttctggctggacatcgggaggaggtacatattggctatagtcctatcagctttcgggctgacctgcacagtcactattgcactcgactcggtccgcactagcctgaggtaa

SEQ ID NO: 8799 - DNA, 168 bp, synthetic construct
  source 1..168: mol_type = other DNA
  misc_feature 1..168: note = Synthetic
atgtgccgccgcccggattgcggcttctctttctcacctggaccggtgatactgctgtggtgttgccttctgctgcccattgtttcctcagccgccgtcagcgtcgctcctaccgccgccgagaaagtccccgcggagtgcgactcggtccgcactagcctgaggtaa

SEQ ID NO: 8800 - DNA, 96 bp, synthetic construct
  source 1..96: mol_type = other DNA
  misc_feature 1..96: note = Synthetic
ttgaaactcgagatcgagaacgcgctcgagtctcgcctcatcgacaccttcaccgcccgacctctcctggtagcgactcggtccgcactagcctga

SEQ ID NO: 8801 - DNA, 15 bp, synthetic construct
  source 1..15: mol_type = other DNA
  misc_feature 1..15: note = Synthetic
atgccaaagccttag

SEQ ID NO: 8802 - DNA, 90 bp, synthetic construct
  source 1..90: mol_type = other DNA
  misc_feature 1..90: note = Synthetic
attaccatcgaagggggaatagactctcgcctgcatcgcatcttctcccagcggcccgtgctaattgcgactcggtccgcactagcctga

SEQ ID NO: 8803 - DNA, 36 bp, synthetic construct
  misc_feature 1..36: note = Synthetic
  source 1..36: mol_type = other DNA
atagggtgcttgcgagtgccccgggaggtctcgtag

SEQ ID NO: 8804 - DNA, 162 bp, synthetic construct
  misc_feature 1..162: note = Synthetic
  source 1..162: mol_type = other DNA
acgaatcctaaacctcaaagaaaaaccaaacgtaacaccaaccgccgcccaatggacgttaagttcccgggtggtggccagatcgttggcggagtttacttgttgccgcgcaggggccccagattgggtgtgcgcgactcggtccgcactagcctgaggtaa

SEQ ID NO: 8805 - DNA, 27 bp, synthetic construct
  misc_feature 1..27: note = Synthetic
  source 1..27: mol_type = other DNA
ttgcgagtgccccgggaggtctcgtag

SEQ ID NO: 8806 - DNA, 72 bp, synthetic construct
  misc_feature 1..72: note = Synthetic
  source 1..72: mol_type = other DNA
atagaaactggagaaatcaaaacattttcatccgtgtgttttaagattacgactcggtccgcactagcctga

SEQ ID NO: 8807 - DNA, 153 bp, synthetic construct
  source 1..153: mol_type = other DNA
  misc_feature 1..153: note = Synthetic
atgattcgtataccaaatggactatttttgcagcaaaaccaaggtttctttaatacggttatacaacttccgaacagttctcccgcctatagaccacgtagtcggtgtcacttgttgcctaattcgcgaacggtgacttacagcgcgatctaa

SEQ ID NO: 8808 - DNA, 117 bp, synthetic construct
  source 1..117: mol_type = other DNA
  misc_feature 1..117: note = Synthetic
gtggccctggttttctactatgactcggggatgacgcccgacgtgcttctggccaggatgctcaagtggtaccactggcgctttaaggtcggagtatataagtactgtgcctcttag

SEQ ID NO: 8809 - DNA, 15 bp, synthetic construct
  source 1..15: mol_type = other DNA
  misc_feature 1..15: note = Synthetic
atgactcggggatga

SEQ ID NO: 8810 - DNA, 24 bp, synthetic construct
  source 1..24: mol_type = other DNA
  misc_feature 1..24: note = Synthetic
ctgttcgaacgcctaatctactag

SEQ ID NO: 8811 - DNA, 168 bp, synthetic construct
  source 1..168: mol_type = other DNA
  misc_feature 1..168: note = Synthetic
atgagcaagatggcagtattattcctggctgtctttttgatgaatagtgttttaatgatatattgtgatccggatcattatatcagagcgggctataatcacaaatatccttttcggatttgttcgattgccaaaggcaccgactcggtccgcactagcctgaggtaa

SEQ ID NO: 8812 - DNA, 159 bp, synthetic construct
  source 1..159: mol_type = other DNA
  misc_feature 1..159: note = Synthetic
atggcagtattattcctggctgtctttttgatgaatagtgttttaatgatatattgtgatccggatcattatatcagagcgggctataatcacaaatatccttttcggatttgttcgattgccaaaggcaccgactcggtccgcactagcctgaggtaa

SEQ ID NO: 8813 - DNA, 168 bp, synthetic construct
  misc_feature 1..168: note = Synthetic
  source 1..168: mol_type = other DNA
atgagcaagatgagagtattattcctggctgtctttttgatgaatagtgttttaatgatatattgcgattcggatgattatatcagagcgggctataatcacaaatatccttttcggatttgttcgattgccaaaggcaccgactcggtccgcactagcctgaggtaa

SEQ ID NO: 8814 - DNA, 159 bp, synthetic construct
  source 1..159: mol_type = other DNA
  misc_feature 1..159: note = Synthetic
atgagagtattattcctggctgtctttttgatgaatagtgttttaatgatatattgcgattcggatgattatatcagagcgggctataatcacaaatatccttttcggatttgttcgattgccaaaggcaccgactcggtccgcactagcctgaggtaa

SEQ ID NO: 8815 - DNA, 171 bp, synthetic construct
  source 1..171: mol_type = other DNA
  misc_feature 1..171: note = Synthetic
acggacgcgttacgcgccacctcttccaccatcagttcaagacgacgcagcacctccggccgggcatcatcctccgtcatggcacagagaaaatcattcagcgtccccggttgtgaatcttcatacacggtgatggtcccggcgtgcgcgactcggtccgcactagcctga

SEQ ID NO: 8816 - DNA, 75 bp, synthetic construct
  misc_feature 1..75: note = Synthetic
  source 1..75: mol_type = other DNA
acgacgcagcacctccggccgggcatcatcctccgtcatggcacagagaaaatcattcagcgtccccggttgtga

SEQ ID NO: 8817 - DNA, 171 bp, synthetic construct
  source 1..171: mol_type = other DNA
  misc_feature 1..171: note = Synthetic
acggacgcgttacgcgccacctcttccaccgccagttcaagacgacgcagcacctccggccgggcatcatcctccgtcatggcacagagaaaatcattcagcgtccccggttgtgaatcttcatacacggtgatggtcccggcgtgcgcgactcggtccgcactagcctga

SEQ ID NO: 8818 - DNA, 21 bp, synthetic construct
  source 1..21: mol_type = other DNA
  misc_feature 1..21: note = Synthetic
atgtcaagtttattcgaatag

SEQ ID NO: 8819 - DNA, 192 bp, synthetic construct
  source 1..192: mol_type = other DNA
  misc_feature 1..192: note = Synthetic
atccacataggctctaaaattttcaaggctggagaagttcggcgggagactttggtcggcaagcttgcgcattgttcctgtgatttcaaacctttcttcaattgtctcttctcctctctcggactgacgaaaggaatcccagaggcctctggccgccatttcttgtcttcgactcggtccgcactagcctga

SEQ ID NO: 8820 - DNA, 18 bp, synthetic construct
  source 1..18: mol_type = other DNA
  misc_feature 1..18: note = Synthetic
atgatgataaggatttaa

SEQ ID NO: 8821 - DNA, 93 bp, synthetic construct
  source 1..93: mol_type = other DNA
  misc_feature 1..93: note = Synthetic
gtgatacagaccttaccaccccaactgagaccacagactcgggccccatcgtcgtggatgatgcacgactcggtccgcactagcctgaggtaa

SEQ ID NO: 8822 - DNA, 93 bp, synthetic construct
  misc_feature 1..93: note = Synthetic
  source 1..93: mol_type = other DNA
gtgatacagaccttaccaccccaagccagaccacagactcgggccccatcgtcgtggatgatgcacgactcggtccgcactagcctgaggtaa

SEQ ID NO: 8823 - DNA, 21 bp, synthetic construct
  source 1..21: mol_type = other DNA
  misc_feature 1..21: note = Synthetic
atggatacaggcttggtctaa

SEQ ID NO: 8824 - DNA, 210 bp, synthetic construct
  source 1..210: mol_type = other DNA
  misc_feature 1..210: note = Synthetic
atgcgtaaccagttgttaagttcgacccgccagctgtcggagagaaagcctatggcaccttatccgatcgaagcacctcgttcgaaagggcttctgacaatgagtcatgaaaagcatttgaacatataccttcttaagacaccagaatacgtcttggtggttgcaagtatcggtcgtagaaccgaatcgactcggtccgcactagcctga

SEQ ID NO: 8825 - DNA, 168 bp, synthetic construct
  misc_feature 1..168: note = Synthetic
  source 1..168: mol_type = other DNA
atgggcgttgttgtcgtcaacgtaatgaccctccttgaccagaacaacgccctgccccggacttccgtcgacgcaagcccggccctgtggagcttcctgcttaggcagtgccgcattttggcatcagaacccctgggtaccgactcggtccgcactagcctgaggtaa

SEQ ID NO: 8826 - DNA, 144 bp, synthetic construct
  source 1..144: mol_type = other DNA
  misc_feature 1..144: note = Synthetic
atgaccctccttgaccagaacaacgccctgccccggacttccgtcgacgcaagcccggccctgtggagcttcctgcttaggcagtgccgcattttggcatcagaacccctgggtaccgactcggtccgcactagcctgaggtaa

SEQ ID NO: 8827 - DNA, 186 bp, synthetic construct
  misc_feature 1..186: note = Synthetic
  source 1..186: mol_type = other DNA
atcgtgttccccgacctgggcgtgcgcgtgtgcgagaagatggccctgtacgacgtggttagcaagctccccctggccgtgatgggaagctcctacggattccaatactcaccaggacagcgggttgaattcctcgtgcaagcgtggaagtccaagaacgactcggtccgcactagcctgaggtaa

SEQ ID NO: 8828 - DNA, 201 bp, synthetic construct
  source 1..201: mol_type = other DNA
  misc_feature 1..201: note = Synthetic
aagccagctcgtctcgccgtgttccccgacctgggcgtgcgcgtgtgcgagaagatggccctgtacgacgtggttagcaagctccccctggccgtgatgggaagctcctacggattccaatactcaccaggacagcgggttgaattcctcgtgcaagcgtggaagtccaagaacgactcggtccgcactagcctgaggtaa

SEQ ID NO: 8829 - DNA, 207 bp, synthetic construct
  misc_feature 1..207: note = Synthetic
  source 1..207: mol_type = other DNA
ctggaccagactctgggccacgggctcgcgtgccgacacttcgacctgcgcacggctgcgaggcagctgtcggtggtagtcaccgagaacgcgctggtggcggtgcgcggcaaccaccgcttcaccgaggctgacctcttcgtcgacgccatcgtggccggcggcctggagaaactctgcgaggaggcccgactcggtccgcactag

SEQ ID NO: 8830 - DNA, 18 bp, synthetic construct
  source 1..18: mol_type = other DNA
  misc_feature 1..18: note = Synthetic
atgagtgcagaatattaa

SEQ ID NO: 8831 - DNA, 114 bp, synthetic construct
  misc_feature 1..114: note = Synthetic
  source 1..114: mol_type = other DNA
atggttatgtctttaaaaaggcagccgcacgagctcctcctggcgaacaatttaaacaccttatcccacttatgtcaagagggcagaaatgggatgtggttcgcattagaatag

SEQ ID NO: 8832 - DNA, 39 bp, synthetic construct
  source 1..39: mol_type = other DNA
  misc_feature 1..39: note = Synthetic
atgcgacagcaaccgcctgcacacgctgtttaccattga

SEQ ID NO: 8833 - DNA, 168 bp, synthetic construct
  misc_feature 1..168: note = Synthetic
  source 1..168: mol_type = other DNA
atggctctcacatgccgcattcgcgtccccattacgggctaccgaggaagaaaaccgcgccgtagaaggctggcgggaagcgggatgcgccgccacccccaccggcggcggcgcgccatcagcaagcggttggggggaggcgactcggtccgcactagcctgaggtaa

SEQ ID NO: 8834 - DNA, 150 bp, synthetic construct
  misc_feature 1..150: note = Synthetic
  source 1..150: mol_type = other DNA
attcgcgtccccattacgggctaccgaggaagaaaaccgcgccgtagaaggctggcgggaagcgggatgcgccgccacccccaccggcggcggcgcgccatcagcaagcggttggggggaggcgactcggtccgcactagcctgaggtaa

SEQ ID NO: 8835 - DNA, 12 bp, synthetic construct
  misc_feature 1..12: note = Synthetic
  source 1..12: mol_type = other DNA
ttgttgttttaa

SEQ ID NO: 8836 - DNA, 168 bp, synthetic construct
  source 1..168: mol_type = other DNA
  misc_feature 1..168: note = Synthetic
atggaccccaatcaaaccaacgtagtgccccccgcattacatttggtggacccacagattcaactgacaataaccagaatggaggacgcaatggggcaaggccaaaacagcgccgaccccaaggtttacccaataatactcgactcggtccgcactagcctgaggtaa

SEQ ID NO: 8837 - DNA, 72 bp, synthetic construct
  source 1..72: mol_type = other DNA
  misc_feature 1..72: note = Synthetic
atgtcccgcttttgccatctgtctgtatgtgtgcgtatgcatgggtattggtatttgtgtatattgtggtaa

SEQ ID NO: 8838 - DNA, 141 bp, synthetic construct
  source 1..141: mol_type = other DNA
  misc_feature 1..141: note = Synthetic
atgtgtgcgtatgcatgggtattggtatttgtgtatattgtggtaataacgtcccctgccacagcattcacagtatatgtattttgttttttattgcccatgttactattgcatatacatgctatattgtctttacagtaa

SEQ ID NO: 8839 - DNA, 210 bp, synthetic construct
  misc_feature 1..210: note = Synthetic
  source 1..210: mol_type = other DNA
ctgatgacatcacagaaactggcggagaaccactattctcttcctcctgattcatttgctgtctacaggatcaccgactctagctctgattggttcgatctcggtatcgaccgcgacgggttcagttatgtcggcgtttccactcttcctgaattcaactttcctatcactgcaaccttcatcgactcggtccgcactagcctgaggtaa

SEQ ID NO: 8840 - DNA, 117 bp, synthetic construct
  source 1..117: mol_type = other DNA
  misc_feature 1..117: note = Synthetic
attggttcgatctcggtatcgaccgcgacgggttcagttatgtcggcgtttccactcttcctgaattcaactttcctatcactgcaaccttcatcgactcggtccgcactagcctga

SEQ ID NO: 8841 - DNA, 111 bp, synthetic construct
  misc_feature 1..111: note = Synthetic
  source 1..111: mol_type = other DNA
atgtggcgctttttgcaaaataagaatttaaatacattccacgcccaagagctgcgttttatccacttggttctctgcaagatcgactcggtccgcactagcctgaggtaa

SEQ ID NO: 8842 - DNA, 57 bp, synthetic construct
  source 1..57: mol_type = other DNA
  misc_feature 1..57: note = Synthetic
atctacaaaccctccgacgtacaggccctgtgccgccctcggaaaatacgtgtgtga

SEQ ID NO: 8843 - DNA, 54 bp, synthetic construct
  misc_feature 1..54: note = Synthetic
  source 1..54: mol_type = other DNA
ctgaacaataaaatcattgcaggcgcaatcttcgcatttcttttttccagatga

SEQ ID NO: 8844 - DNA, 168 bp, synthetic construct
  source 1..168: mol_type = other DNA
  misc_feature 1..168: note = Synthetic
atgaaacgagccagatttgaagatgacttcaaccccgtctacccttacgaacactacaatccccttgacattccatttattacacccccgtttgcttcctccaacggcttgcaagaaaaacctccgggagtcctcagcctcgactcggtccgcactagcctgaggtaa

SEQ ID NO: 8845 - DNA, 141 bp, synthetic construct
  misc_feature 1..141: note = Synthetic
  source 1..141: mol_type = other DNA
atgacttcaaccccgtctacccttacgaacactacaatccccttgacattccatttattacacccccgtttgcttcctccaacggcttgcaagaaaaacctccgggagtcctcagcctcgactcggtccgcactagcctga

SEQ ID NO: 8846 - DNA, 213 bp, synthetic construct
  source 1..213: mol_type = other DNA
  misc_feature 1..213: note = Synthetic
ctgaacaataaaatcattgcaggcgcaatcttcgcatttcttttttccaggccaaacgagccagatttgaagatgacttcaaccccgtctacccttacgaacactacaatccccttgacattccatttattacacccccgtttgcttcctccaacggcttgcaagaaaaacctccgggagtcctcagcctcgactcggtccgcactagcctga

SEQ ID NO: 8847 - DNA, 183 bp, synthetic construct
  misc_feature 1..183: note = Synthetic
  source 1..183: mol_type = other DNA
atttcttttttccaggccaaacgagccagatttgaagatgacttcaaccccgtctacccttacgaacactacaatccccttgacattccatttattacacccccgtttgcttcctccaacggcttgcaagaaaaacctccgggagtcctcagcctcgactcggtccgcactagcctgaggtaa

SEQ ID NO: 8848 - DNA, 219 bp, synthetic construct
  misc_feature 1..219: note = Synthetic
  source 1..219: mol_type = other DNA
ataaccgttctaactgcgatctgtataactgtattaatgcttttgatggtaatttctggcaccgccatgatagtcaaggagttaaatcctaatgatatattcactatgcaatcattaaagtttaatcgaaccgtaacgattttcaaatatataggactctttatctatataccaggaacgataattttgtacgctacgactcggtccgcactagcctga

SEQ ID NO: 8849 - DNA, 204 bp, synthetic construct
  source 1..204: mol_type = other DNA
  misc_feature 1..204: note = Synthetic
atctaccaacttaaatacaccgcctataaatttacaatgaaacacagattgtattctgaaggattgagtattagtaatgatttaaactcgataatcggtcaacaatctacaatggatacggatatagaaatagacgaagatgacatcatggaacttcttaatatattgactgagttcgactcggtccgcactagcctgaggtaa

SEQ ID NO: 8850 - DNA, 156 bp, synthetic construct
  source 1..156: mol_type = other DNA
  misc_feature 1..156: note = Synthetic
ttgtattctgaaggattgagtattagtaatgatttaaactcgataatcggtcaacaatctacaatggatacggatatagaaatagacgaagatgacatcatggaacttcttaatatattgactgagttcgactcggtccgcactagcctgaggtaa

SEQ ID NO: 8851 - DNA, 123 bp, synthetic construct
  source 1..123: mol_type = other DNA
  misc_feature 1..123: note = Synthetic
atgcctctccccacaaaactgagaccatcagccgctccaacagcacctccaaccggagcagcggacagcatcagacccccaccctacagtccctgcgactcggtccgcactagcctgaggtaa

SEQ ID NO: 8852 - DNA, 30 bp, synthetic construct
  misc_feature 1..30: note = Synthetic
  source 1..30: mol_type = other DNA
atatatctccaactagacaaggggccatga

SEQ ID NO: 8853 - DNA, 195 bp, synthetic construct
  misc_feature 1..195: note = Synthetic
  source 1..195: mol_type = other DNA
acgagtgccactccacggatgccacatccatcttgggcatcggcactgtccttgaccaagcagagactgcgggggcgagactggttgtgctcgccactgctacccctccgggctccgtcactgtgtcccatcctaacatcgaggagggccctctgtccaccaccggagagatcccttcgactcggtccgcactag

SEQ ID NO: 8854 - DNA, 195 bp, synthetic construct
  source 1..195: mol_type = other DNA
  misc_feature 1..195: note = Synthetic
acgagtgccactccacggatgccacatccatcttgggcatcggcactgtccttgaccaagcagagactgcgggggcgagactggttgtgctcgccactgctacccctccgggctccgtcactgtgtcccatcctaacatcgaggaggttgctctgtccaccaccggagagatcccttcgactcggtccgcactag

SEQ ID NO: 8855 - DNA, 195 bp, synthetic construct
  source 1..195: mol_type = other DNA
  misc_feature 1..195: note = Synthetic
acgagtgccactccacggatgccacatccatcttgggcatcggcactgtccttgaccaagcagagactgcgggggcgagactggttgtgctcgccactgctacccctccgggctccgtcactgtgtcccatcctaacatcgaggaggttgctgcctccaccaccggagagatcccttcgactcggtccgcactag

SEQ ID NO: 8856 - DNA, 24 bp, synthetic construct
  source 1..24: mol_type = other DNA
  misc_feature 1..24: note = Synthetic
atggaaaatgtacgttcaatgtaa

SEQ ID NO: 8857 - DNA, 24 bp, synthetic construct
  source 1..24: mol_type = other DNA
  misc_feature 1..24: note = Synthetic
acgaagattataggggaaatatag

SEQ ID NO: 8858 - DNA, 15 bp, synthetic construct
  misc_feature 1..15: note = Synthetic
  source 1..15: mol_type = other DNA
atacatttaatgtaa

SEQ ID NO: 8859 - DNA, 18 bp, synthetic construct
  source 1..18: mol_type = other DNA
  misc_feature 1..18: note = Synthetic
atgtgtaatgcttggtga

SEQ ID NO: 8860 - DNA, 123 bp, synthetic construct
  source 1..123: mol_type = other DNA
  misc_feature 1..123: note = Synthetic
attcgcagccacattcctttaggctatatgcacccccgggctaactgtaccttgatggcgtcctcagtatggcggttacgaaaatacactctgcccgactcggtccgcactagcctgaggtaa

SEQ ID NO: 8861 - DNA, 69 bp, synthetic construct
  misc_feature 1..69: note = Synthetic
  source 1..69: mol_type = other DNA
atgttgaagattccgagcgcattgatattgacaatgatatacctgattatgatatccacggggacataa

SEQ ID NO: 8862 - DNA, 72 bp, synthetic construct
  misc_feature 1..72: note = Synthetic
  source 1..72: mol_type = other DNA
ctggccttgaagattccgagcgcattgatattgacaatgatatacctgattatgatatccacggggacataa

SEQ ID NO: 8863 - DNA, 198 bp, synthetic construct
  source 1..198: mol_type = other DNA
  misc_feature 1..198: note = Synthetic
atgctccgtggagtattcagtgaaaatgcagctgaggaagaagaggaactcgcacagtatctattagatcgtgaggtagtcatgcccagggttgcacatgtaatacttgcccagtctagttgcggtagaagaaaacagattcaaggttacttggattccactagaactattatcaggtatcgactcggtccgcactag

SEQ ID NO: 8864 - DNA, 48 bp, synthetic construct
  misc_feature 1..48: note = Synthetic
  source 1..48: mol_type = other DNA
gtgaaaatgcagctgaggaagaagaggaactcgcacagtatctattag

SEQ ID NO: 8865 - DNA, 174 bp, synthetic construct
  misc_feature 1..174: note = Synthetic
  source 1..174: mol_type = other DNA
aaggagtttgccgctgggaaaagaggagcggcttttggagtgatggaagccctgggaacactgccaggacacatgacagagagattccaggaagccattgacaacctcgctgtgctcatgcgggcagagactggaagcaggccttacaaagccgcgcgactcggtccgcactag

SEQ ID NO: 8866 - DNA, 186 bp, synthetic construct
  misc_feature 1..186: note = Synthetic
  source 1..186: mol_type = other DNA
ctgaagtcattcaaggagtttgccgctgggaaaagaggagcggcttttggagtgatggaagccctgggaacactgccaggacacatgacagagagattccaggaagccattgacaacctcgctgtgctcatgcgggcagagactggaagcaggccttacaaagccgcgcgactcggtccgcactag

SEQ ID NO: 8867 - DNA, 117 bp, synthetic construct
  source 1..117: mol_type = other DNA
  misc_feature 1..117: note = Synthetic
atgccccggttggagcctaagcgcggctcgtatcggccggtttccgcgacaagcgagggtttggcagccccgttatttccaagaccccgccagccgactcggtccgcactagcctga

SEQ ID NO: 8868 - DNA, 21 bp, synthetic construct
  misc_feature 1..21: note = Synthetic
  source 1..21: mol_type = other DNA
atggtctgtccctggacgtag

SEQ ID NO: 8869 - DNA, 27 bp, synthetic construct
  source 1..27: mol_type = other DNA
  misc_feature 1..27: note = Synthetic
attcagccccgtccaagacacacctga

SEQ ID NO: 8870 - DNA, 30 bp, synthetic construct
  source 1..30: mol_type = other DNA
  misc_feature 1..30: note = Synthetic
ttggtgggaatgagcggcttgttgcgatag

SEQ ID NO: 8871 - DNA, 75 bp, synthetic construct
  misc_feature 1..75: note = Synthetic
  source 1..75: mol_type = other DNA
atgccgatgttgttggctgtctcgaacttggtctcctcgatgttggccttgctgttgctaatgttgcgcaggtag

SEQ ID NO: 8872 - DNA, 63 bp, synthetic construct
  misc_feature 1..63: note = Synthetic
  source 1..63: mol_type = other DNA
atgcagagtctcgcgaacttgaccatcttggacttgatgatcaggaaaagaaaattcttatga

SEQ ID NO: 8873 - DNA, 75 bp, synthetic construct
  source 1..75: mol_type = other DNA
  misc_feature 1..75: note = Synthetic
atcagcttccagcaaacaaacgctatggtaactctaagaaaagagcgcctggcgactcggtccgcactagcctga

SEQ ID NO: 8874 - DNA, 141 bp, synthetic construct
  source 1..141: mol_type = other DNA
  misc_feature 1..141: note = Synthetic
atgtcgctgctaacaccagcagtacttttgacccagaggtcgcatacgctaactttaagcgtgtccacaccactgggcttagttatgaccacatacgaatcttctacattaaaggacgcgactcggtccgcactagcctga

SEQ ID NO: 8875 - DNA, 33 bp, synthetic construct
  source 1..33: mol_type = other DNA
  misc_feature 1..33: note = Synthetic
atacaaaagttcaagattcgtcttttcaggtga

SEQ ID NO: 8876 - DNA, 168 bp, synthetic construct
  source 1..168: mol_type = other DNA
  misc_feature 1..168: note = Synthetic
atgtacaaaggatgggactcagaagcgttgcctatacaatctgagatactaaacgagattctgttatattgctacctcactcctcaaccaccgatcccttccgagacgacaacagccaccagccccacaaacatagaaaacgactcggtccgcactagcctgaggtaa

SEQ ID NO: 8877 - DNA, 36 bp, synthetic construct
  misc_feature 1..36: note = Synthetic
  source 1..36: mol_type = other DNA
aggatgggactcagaagcgttgcctatacaatctga

SEQ ID NO: 8878 - DNA, 33 bp, synthetic construct
  source 1..33: mol_type = other DNA
  misc_feature 1..33: note = Synthetic
atgggactcagaagcgttgcctatacaatctga

SEQ ID NO: 8879 - DNA, 108 bp, synthetic construct
  misc_feature 1..108: note = Synthetic
  source 1..108: mol_type = other DNA
ctgttatattgctacctcactcctcaaccaccgatcccttccgagacgacaacagccaccagccccacaaacatagaaaacgactcggtccgcactagcctgaggtaa

SEQ ID NO: 8880 - DNA, 39 bp, synthetic construct
  misc_feature 1..39: note = Synthetic
  source 1..39: mol_type = other DNA
ttgctcatacaaaagttcaagattcgtcttttcaggtga

SEQ ID NO: 8881 - DNA, 168 bp, synthetic construct
  misc_feature 1..168: note = Synthetic
  source 1..168: mol_type = other DNA
atgtacaaaggatgggactcagaagcgttgtctatacaatctgagatagtaaacgagattctgttatattgctacctcactccccaaccaccaattccttccgagacgacaacagccaccagccccacgaacatagaaaacgactcggtccgcactagcctgaggtaa

SEQ ID NO: 8882 - DNA, 111 bp, synthetic construct
  misc_feature 1..111: note = Synthetic
  source 1..111: mol_type = other DNA
attctgttatattgctacctcactccccaaccaccaattccttccgagacgacaacagccaccagccccacgaacatagaaaacgactcggtccgcactagcctgaggtaa

SEQ ID NO: 8883 - DNA, 168 bp, synthetic construct
  misc_feature 1..168: note = Synthetic
  source 1..168: mol_type = other DNA
atgaaacgtaatgaggagtattgcgggctacataaattaaaaatggaaatttttaatgtagaagaattgataaatatgaaaccttttaagaatatgaataaaataacaattaatcaaaaggataattgtatattagcaaacgactcggtccgcactagcctgaggtaa

SEQ ID NO: 8884 - DNA, 120 bp, synthetic construct
  source 1..120: mol_type = other DNA
  misc_feature 1..120: note = Synthetic
atttttaatgtagaagaattgataaatatgaaaccttttaagaatatgaataaaataacaattaatcaaaaggataattgtatattagcaaacgactcggtccgcactagcctgaggtaa

SEQ ID NO: 8885 - DNA, 213 bp, synthetic construct
  misc_feature 1..213: note = Synthetic
  source 1..213: mol_type = other DNA
atggcaaaaatgtgcatccgagagtacccagtgcaaaggcatcaatggcgcaacggatacagcgcgcgggcacaggaacaaggcaaagtccgccatcggagcaccccggcgcgaggcacgcgtttcgctgccgaaagacagggagtggcgcgcccgcttggcaacggtggtcgagtctgtgcaatcgactcggtccgcactagcctgaggtaa

SEQ ID NO: 8886 - DNA, 198 bp, synthetic construct
  source 1..198: mol_type = other DNA
  misc_feature 1..198: note = Synthetic
atgctccgtggagtattcagtgaaaatgcagctgaggaagaagaggaactcgcacagtatctattagatcgtgaggtagtcatgcccagggttgcacatgtaatacttgcccagtctagttgcggtagaagaaaacagattcaaggttacttggattccactagaactattatcgcctatcgactcggtccgcactag

SEQ ID NO: 8887 - DNA, 42 bp, synthetic construct
  source 1..42: mol_type = other DNA
  misc_feature 1..42: note = Synthetic
atgccaagattgtcaaaatatctacagagaaacgtgtcttga

SEQ ID NO: 8888 - DNA, 75 bp, synthetic construct
  source 1..75: mol_type = other DNA
  misc_feature 1..75: note = Synthetic
atgatgatacgagatcgagggtacgcgcatgcgaatgcggaggcaagcatgccaggttccagccggtgtgtgtag

SEQ ID NO: 8889 - DNA, 102 bp, synthetic construct
  misc_feature 1..102: note = Synthetic
  source 1..102: mol_type = other DNA
ctggcgattactaagacaggtggacccaactgtatcacgatgtggcagtgcatcgcacacaacccgtcctgcgaggccgctttggggcaggattgctcttaa

SEQ ID NO: 8890 - DNA, 51 bp, synthetic construct
  misc_feature 1..51: note = Synthetic
  source 1..51: mol_type = other DNA
acgaggacctcggggaccaagaccccagacctccctcctgaccctagatga

SEQ ID NO: 8891 - DNA, 21 bp, synthetic construct
  misc_feature 1..21: note = Synthetic
  source 1..21: mol_type = other DNA
atgaagtgcttaaggagataa

SEQ ID NO: 8892 - DNA, 99 bp, synthetic construct
  source 1..99: mol_type = other DNA
  misc_feature 1..99: note = Synthetic
acgggaaaaaggatgttcggagccattcccgcaaggccattaaccacatcagctccgtgtggaaggacttgcgactcggtccgcactagcctgaggtaa

SEQ ID NO: 8893 - DNA, 123 bp, synthetic construct
  misc_feature 1..123: note = Synthetic
  source 1..123: mol_type = other DNA
atgcgatactatgcggccctacacaaatttccgttcacgactgctatcgtggagcgtcccactcaaagcacggaggcatcatgggttaaagggaaggccacgactcggtccgcactagcctga

SEQ ID NO: 8894 - DNA, 174 bp, synthetic construct
  source 1..174: mol_type = other DNA
  misc_feature 1..174: note = Synthetic
atcgtttccgccgctgctaggctgtgctgccaactggatcctgcgcgggacgtcctttgtttacgtcccgtcggcgctgaatcctgcggacgacccttctcggggtcgcttgggactctctcgtccccttctccgtctgccgttcccgactcggtccgcactagcctgaggtaa

SEQ ID NO: 8895 - DNA, 21 bp, synthetic construct
  source 1..21: mol_type = other DNA
  misc_feature 1..21: note = Synthetic
atgattaatttcaataactaa

SEQ ID NO: 8896 - DNA, 42 bp, synthetic construct
  source 1..42: mol_type = other DNA
  misc_feature 1..42: note = Synthetic
atgttcatgagcatattaatgatcagaagttcgatgatgtaa

SEQ ID NO: 8897 - DNA, 57 bp, synthetic construct
  source 1..57: mol_type = other DNA
  misc_feature 1..57: note = Synthetic
atagacgaaaatataactcgtattagagagttgtatatgattaatttcaataactaa

SEQ ID NO: 8898 - DNA, 168 bp, synthetic construct
  misc_feature 1..168: note = Synthetic
  source 1..168: mol_type = other DNA
atggcgactgtgaataaaactcctgttattgttgtgccagttattgatagacctccatcagaaacatttcctaatcttcatgagcatattaatgatcagaagttcgatgatgtgaaggacaacgaagttatgccagaaaacgactcggtccgcactagcctgaggtaa

SEQ ID NO: 8899 - DNA, 24 bp, synthetic construct
  source 1..24: mol_type = other DNA
  misc_feature 1..24: note = Synthetic
atgatcagaagttcgatgatgtga

SEQ ID NO: 8900 - DNA, 45 bp, synthetic construct
  misc_feature 1..45: note = Synthetic
  source 1..45: mol_type = other DNA
atgaagttatgcaagaaaaaagcgactcggtccgcactagcctga

SEQ ID NO: 8901 - DNA, 168 bp, synthetic construct
  misc_feature 1..168: note = Synthetic
  source 1..168: mol_type = other DNA
atggcggcggcgaataaaactcctgttattgttgtgccagttattgatagacctccatcagaaacatttcctaatgttcatgagcatattaatgatcagaagttcgatgatgtgaaggacaatgaagttatgccagaaaacgactcggtccgcactagcctgaggtaa

SEQ ID NO: 8902 - DNA, 27 bp, synthetic construct
  misc_feature 1..27: note = Synthetic
  source 1..27: mol_type = other DNA
ttgtatatgattaatttcaataactaa

SEQ ID NO: 8903 - DNA, 141 bp, synthetic construct
  misc_feature 1..141: note = Synthetic
  source 1..141: mol_type = other DNA
attgttgtgccagttattgatagacctccatcagaaacatttcctaatcttcatgagcatattaatgatcagaagttcgatgatgtgaaggacaacgaagttatgccagaaaacgactcggtccgcactagcctgaggtaa

SEQ ID NO: 8904 - DNA, 111 bp, synthetic construct
  source 1..111: mol_type = other DNA
  misc_feature 1..111: note = Synthetic
atgacgacggtgacgagcgcctatttcgcgatccgctcaccacgtacgagtatctcgacgactgtcgtgatgatgaggagttttgtcaccagttcctgcgcgcctacctga

SEQ ID NO: 8905 - DNA, 168 bp, synthetic construct
  misc_feature 1..168: note = Synthetic
  source 1..168: mol_type = other DNA
atggatgtgtctggggagccgaccgtttgttccaacgcgtatgccaatgaaatgaaactatcggattcaaaggacatttatgttttggcccatccggttaccaaaaaaacccgcaagcgaccccgcgggctgcctttgggcgactcggtccgcactagcctgaggtaa

SEQ ID NO: 8906 - DNA, 162 bp, synthetic construct
  misc_feature 1..162: note = Synthetic
  source 1..162: mol_type = other DNA
gtgtctggggagccgaccgtttgttccaacgcgtatgccaatgaaatgaaactatcggattcaaaggacatttatgttttggcccatccggttaccaaaaaaacccgcaagcgaccccgcgggctgcctttgggcgactcggtccgcactagcctgaggtaa

SEQ ID NO: 8907 - DNA, 57 bp, synthetic construct
  source 1..57: mol_type = other DNA
  misc_feature 1..57: note = Synthetic
atggacgaaaacaccagcctgattcgggatctgtacctgattaattttaacaattaa

SEQ ID NO: 8908 - DNA, 141 bp, synthetic construct
  misc_feature 1..141: note = Synthetic
  source 1..141: mol_type = other DNA
attgttgtgccagttattgatagacctccatcagaaacatttcctaatgttcatgagcatattaatgatcagaagttcgatgatgtgaaggacaatgaagttatgccagaaaacgactcggtccgcactagcctgaggtaa

SEQ ID NO: 8909 - DNA, 45 bp, synthetic construct
  misc_feature 1..45: note = Synthetic
  source 1..45: mol_type = other DNA
atagccgccataaaagagttgtatatgattaattttaataactaa

SEQ ID NO: 8910 - DNA, 168 bp, synthetic construct
  source 1..168: mol_type = other DNA
  misc_feature 1..168: note = Synthetic
atggatccacccgaaatcacggcctacataatcggggttgccgaaggccgcgggaccaaggaggtgttccccacgctgccgtacctggtgggcctcgccgacgacccgcccaagcctcaacccgcacctgctccctctcccgactcggtccgcactagcctgaggtaa

SEQ ID NO: 8911 - DNA, 150 bp, synthetic construct
  source 1..150: mol_type = other DNA
  misc_feature 1..150: note = Synthetic
acggcctacataatcggggttgccgaaggccgcgggaccaaggaggtgttccccacgctgccgtacctggtgggcctcgccgacgacccgcccaagcctcaacccgcacctgctccctctcccgactcggtccgcactagcctgaggtaa

SEQ ID NO: 8912 - DNA, 66 bp, synthetic construct
  misc_feature 1..66: note = Synthetic
  source 1..66: mol_type = other DNA
atgtccatcatgtcgtcggtgacagtaaccatgatctctttatacctgtcatcataccgatcataa

SEQ ID NO: 8913 - DNA, 36 bp, synthetic construct
  misc_feature 1..36: note = Synthetic
  source 1..36: mol_type = other DNA
atggcaagaggcttggaacgagttccgctctggtaa

SEQ ID NO: 8914 - DNA, 78 bp, synthetic construct
  source 1..78: mol_type = other DNA
  misc_feature 1..78: note = Synthetic
atgttatgcatgctaactatttgttttggagaaatagtacaacatggaatggcggtgcttatagtttatttgatatga

SEQ ID NO: 8915 - DNA, 30 bp, synthetic construct
  misc_feature 1..30: note = Synthetic
  source 1..30: mol_type = other DNA
ctgctcccgactcggtccgcactagcctga

SEQ ID NO: 8916 - DNA, 33 bp, synthetic construct
  misc_feature 1..33: note = Synthetic
  source 1..33: mol_type = other DNA
atgtccgggcgacttagtgtgctttttgattag

SEQ ID NO: 8917 - DNA, 87 bp, synthetic construct
  source 1..87: mol_type = other DNA
  misc_feature 1..87: note = Synthetic
ctgaagaaagtttgtcgcctgatgctgatcctgaagaggaggagcaacaattatattgggttgacgactcggtccgcactagcctga

SEQ ID NO: 8918 - DNA, 207 bp, synthetic construct
  misc_feature 1..207: note = Synthetic
  source 1..207: mol_type = other DNA
gtgcaggaaatagccctgggggacggcgtcaccgacaccatctcggccattatagatgaaacattcggtgagtgtcttcccgtactgggggaggcccaaggcgggtacgccctggtctgtagcatgtatctgcacgttatcgtctccatctattcgacaaaaacggtgtacaacagtatcgactcggtccgcactagcctgaggtaa

SEQ ID NO: 8919 - DNA, 168 bp, synthetic construct
  misc_feature 1..168: note = Synthetic
  source 1..168: mol_type = other DNA
atgttttattgccttgtaatttttgtaattattttttgtctaatgctgagaagctgctttttgatcattttgatttgcatcttgtctggagagacaatttggtgtttggatgctgtcaagggtgtgctagaactgttagccgactcggtccgcactagcctgaggtaa

SEQ ID NO: 8920 - DNA, 99 bp, synthetic construct
  misc_feature 1..99: note = Synthetic
  source 1..99: mol_type = other DNA
acgagcgcctatttcgcgatccgctcaccacgtacgagtatctcgacgactgtcgtgatgatgaggagttttgtcaccagttcctgcgcgcctacctga

SEQ ID NO: 8921 - DNA, 111 bp, synthetic construct
  source 1..111: mol_type = other DNA
  misc_feature 1..111: note = Synthetic
ataacgacggtgacgagcgcctatttcgcgatccgctcaccacgtacgagtatctcgacgactgtcgtgatgatgaggagttttgtcaccagttcctgcgcgcctacctga

SEQ ID NO: 8922 - DNA, 111 bp, synthetic construct
  misc_feature 1..111: note = Synthetic
  source 1..111: mol_type = other DNA
atgacaacggtgacgagcgcctatttcgcgatccgctcaccacgtacgagtatctcgacgactgtcgtgatgatgaggagttttgtcaccagttcctgcgcgcctacctga

SEQ ID NO: 8923 - DNA, 111 bp, synthetic construct
  source 1..111: mol_type = other DNA
  misc_feature 1..111: note = Synthetic
atgacgaccgtgacgagcgcctatttcgcgatccgctcaccacgtacgagtatctcgacgactgtcgtgatgatgaggagttttgtcaccagttcctgcgcgcctacctga

SEQ ID NO: 8924 - DNA, 213 bp, synthetic construct
  source 1..213: mol_type = other DNA
  misc_feature 1..213: note = Synthetic
gtgagggaaataaccaggatcaccacccccaccaccaggaccagagccagcatgccgccgaaggggtttttgaagaaggagatgaaacccgagaccaggctgctaaacaaaccccccaccgtgctgactaggccggcgatgttttgcgcctggaagttgtactcccggaagatgccctccaggtccgactcggtccgcactagcctgaggtaa

SEQ ID NO: 8925 - DNA, 213 bp, synthetic construct
  misc_feature 1..213: note = Synthetic
  source 1..213: mol_type = other DNA
gtgagggaaataaccaggatcaccacccccgccaccaggaccagaatgagcatgccgccgaaggggtttttgaagaaggagatgaaaccagagaccaggctgctaaacaaaccccccaccgtgctgactaggccggcgatgttttgcgcctggaagttgtactcccggaagatgccctccaggtccgactcggtccgcactagcctgaggtaa

SEQ ID NO: 8926 - DNA, 213 bp, synthetic construct
  source 1..213: mol_type = other DNA
  misc_feature 1..213: note = Synthetic
gtgagggaaataaccaggatcaccacccccgccaccaggaccagagccagcatgccgccgaaggggtttttgaagaaggagatgaaaccagagaccaggctgctaaacaaaccccccaccgtgctgactaggccggcgatgttttgcgcctggaagttgtactcccggaagatgccctccaggtccgactcggtccgcactagcctgaggtaa

SEQ ID NO: 8927 - DNA, 168 bp, synthetic construct
  source 1..168: mol_type = other DNA
  misc_feature 1..168: note = Synthetic
atggcgttaccaggaaaagacatcgtcgcggccgtggcactgacggtactcatgctgctcatggtcgtctccgggggcgcgctggttaccaagggcatcccgccgctgcgcttgctcacgctgcgctcggcgcgcgccgccgactcggtccgcactagcctgaggtaa

SEQ ID NO: 8928 - DNA, 57 bp, synthetic construct
  source 1..57: mol_type = other DNA
  misc_feature 1..57: note = Synthetic
atgaactatcagatgcaaactggaaatgtttctttgaaagactgtcgtccagcctag

SEQ ID NO: 8929 - DNA, 120 bp, synthetic construct
  misc_feature 1..120: note = Synthetic
  source 1..120: mol_type = other DNA
atggaagcaatagccaagcgtttagatgcgtgccaggatcagttgttagaactttatgaagaaaacagtattgatatacacaaacacattatgcattggaaacgactcggtccgcactag

SEQ ID NO: 8930 - DNA, 165 bp, synthetic construct
  source 1..165: mol_type = other DNA
  misc_feature 1..165: note = Synthetic
atttttcagatggcagttcgagtttcttgtggttccggagtaacaacggttgatgtcgacttactttatcgtctaacacgcattgcagcgtatctgcacattcaggttgaacttctattaaaattgtatcttttaaacgactcggtccgcactagcctgaggtaa

SEQ ID NO: 8931 - DNA, 27 bp, synthetic construct
  misc_feature 1..27: note = Synthetic
  source 1..27: mol_type = other DNA
atgcccgaaacaagaagaccaggctag

SEQ ID NO: 8932 - DNA, 15 bp, synthetic construct
  misc_feature 1..15: note = Synthetic
  source 1..15: mol_type = other DNA
atgttggcggtatag

SEQ ID NO: 8933 - DNA, 219 bp, synthetic construct
  source 1..219: mol_type = other DNA
  misc_feature 1..219: note = Synthetic
atgagaaagcctcagcagggtgcaagtggtgtggtaagagtttgggatgtgaaagactcatcacttttgaacaatcaatttggcacaatgccaagtctaactatggcttgtatggccaaacagtcacagactccgctcaatgacgttgtacaagcgctcacagaccttggcttgctttacacagtcaagtatccaacgactcggtccgcactagcctga

SEQ ID NO: 8934 - DNA, 219 bp, synthetic construct
  misc_feature 1..219: note = Synthetic
  source 1..219: mol_type = other DNA
atgagaaagcctcagcagggtgcaagtggtgtggtaagagtttgggatgtgaaagactcatcacttttgaacaatcaatttggcacaatgccaagtctaactatggcttgtatggccaaacagtcacagactccgctcaatgacgttgtacgcccgctcacagaccttggcttgctttacacagtcaagtatccaacgactcggtccgcactagcctga

SEQ ID NO: 8935 - DNA, 21 bp, synthetic construct
  source 1..21: mol_type = other DNA
  misc_feature 1..21: note = Synthetic
attttctaccggcatcaataa

SEQ ID NO: 8936 - DNA, 12 bp, synthetic construct
  source 1..12: mol_type = other DNA
  misc_feature 1..12: note = Synthetic
atcagccactaa

SEQ ID NO: 8937 - DNA, 141 bp, synthetic construct
  misc_feature 1..141: note = Synthetic
  source 1..141: mol_type = other DNA
ttgtcagaaaatcaggaggaggagcctgcacctcaaagaatagactacaagatagtttcctcgtgtggtggctgcggaattaagcttcgaatttttgcatcgtgtacccaatttggaacgactcggtccgcactagcctga

SEQ ID NO: 8938 - DNA, 66 bp, synthetic construct
  misc_feature 1..66: note = Synthetic
  source 1..66: mol_type = other DNA
atgcagtatatgaactatcagatgcaaactggaaatgtttctttgaaagactgtcgtccagcctag

SEQ ID NO: 8939 - DNA, 138 bp, synthetic construct
  source 1..138: mol_type = other DNA
  misc_feature 1..138: note = Synthetic
attctgaggacgaggaagatggaagcaatagccaagcgtttagatgcgtgccaggaacagttgttagaactttatgaagaaaacagtactgacctacacaaacatgtattgcattggaaacgactcggtccgcactag

SEQ ID NO: 8940 - DNA, 108 bp, synthetic construct
  source 1..108: mol_type = other DNA
  misc_feature 1..108: note = Synthetic
atggatgataattgtgaaatcaaattttctaaaagactaagtgactcagtaatgactaattatatgaatcaaatatctgatttacttgggcttgatctcaattcatga

SEQ ID NO: 8941 - DNA, 90 bp, synthetic construct
  misc_feature 1..90: note = Synthetic
  source 1..90: mol_type = other DNA
atggagaccaccgtgaacgcccaccaaatattgcccaaggtcttacataagaggactcgccgactctcgactcggtccgcactagcctga

SEQ ID NO: 8942 - DNA, 45 bp, synthetic construct
  source 1..45: mol_type = other DNA
  misc_feature 1..45: note = Synthetic
atcgttctgtttagcccgccgttggggcctcccggtcttaaataa

SEQ ID NO: 8943 - DNA, 171 bp, synthetic construct
  misc_feature 1..171: note = Synthetic
  source 1..171: mol_type = other DNA
ataatgtccgcccccgtcgtcatcaaggcccttgtggcctcaaacactgacattgcggaggccatcctcgatgccatcctctcgcggcctgacgagggcttccgcctgttttgtttgtgccacaacgcctcgcccctccaccacgactcggtccgcactagcctgaggtaa

SEQ ID NO: 8944 - DNA, 45 bp, synthetic construct
  misc_feature 1..45: note = Synthetic
  source 1..45: mol_type = other DNA
atcgttctgtttagcccgccgttggggcctcccggtcttaaatag

SEQ ID NO: 8945 - DNA, 171 bp, synthetic construct
  misc_feature 1..171: note = Synthetic
  source 1..171: mol_type = other DNA
atagcctccgcccccgtcgtcatcaaggcccttgtggcctcaaacactgacattgcggaggccatcctcgatgccatcctctcgcggcctgacgagggcttccgcctgttttgtttgtgccacaacgcctcgcccctccaccacgactcggtccgcactagcctgaggtaa

SEQ ID NO: 8946 - DNA, 126 bp, synthetic construct
  source 1..126: mol_type = other DNA
  misc_feature 1..126: note = Synthetic
acggtactcatgctgctcatggtcgtctccgggggcgcgctggttaccaagggcatcccgccgctgcgcttgctcacgctgcgctcggcgcgcgccgccgactcggtccgcactagcctgaggtaa

SEQ ID NO: 8947 - DNA, 18 bp, synthetic construct
  source 1..18: mol_type = other DNA
  misc_feature 1..18: note = Synthetic
atgaggaagcatcgctga

SEQ ID NO: 8948 - DNA, 156 bp, synthetic construct
  misc_feature 1..156: note = Synthetic
  source 1..156: mol_type = other DNA
ctgctatctgataactctatgaggacgttttcccaatctcccgccgatacctgttcctgcacaaccgaggtagatgggacttcttcttccatgttgtcatccagggccgggggacccggcctgtccttgtccattttgtctgcaacaaaagtgtga

SEQ ID NO: 8949 - DNA, 126 bp, synthetic construct
  source 1..126: mol_type = other DNA
  misc_feature 1..126: note = Synthetic
aggctaaagaagaccatgacgacgctgacgagcgcctatttcgcgatccgctcaccacgtacgagtatctcgacgactgtcgtgatgatgaggagttttgtcaccagttcctgcgcgcctacctga

SEQ ID NO: 8950 - DNA, 126 bp, synthetic construct
  misc_feature 1..126: note = Synthetic
  source 1..126: mol_type = other DNA
aggctaaagaagaccatgacgacggggacgagcgcctatttcgcgatccgctcaccacgtacgagtatctcgacgactgtcgtgatgatgaggagttttgtcaccagttcctgcgcgcctacctga

SEQ ID NO: 8951 - DNA, 126 bp, synthetic construct
  source 1..126: mol_type = other DNA
  misc_feature 1..126: note = Synthetic
aggctaaagaagaccatgacgacggtaacgagcgcctatttcgcgatccgctcaccacgtacgagtatctcgacgactgtcgtgatgatgaggagttttgtcaccagttcctgcgcgcctacctga

SEQ ID NO: 8952 - DNA, 126 bp, synthetic construct
  source 1..126: mol_type = other DNA
  misc_feature 1..126: note = Synthetic
aggctaaagaagaccatgacgatggtgacgagcgcctatttcgcgatccgctcaccacgtacgagtatctcgacgactgtcgtgatgatgaggagttttgtcaccagttcctgcgcgcctacctga

SEQ ID NO: 8953 - DNA, 126 bp, synthetic construct
  source 1..126: mol_type = other DNA
  misc_feature 1..126: note = Synthetic
aggctaaagaagaccatgacgccggtgacgagcgcctatttcgcgatccgctcaccacgtacgagtatctcgacgactgtcgtgatgatgaggagttttgtcaccagttcctgcgcgcctacctga

SEQ ID NO: 8954 - DNA, 138 bp, synthetic construct
  source 1..138: mol_type = other DNA
  misc_feature 1..138: note = Synthetic
attttttgtctaatgctgagaagctgctttttgatcattttgatttgcatcttgtctggagagacaatttggtgtttggatgctgtcaagggtgtgctagaactgttagccgactcggtccgcactagcctgaggtaa

SEQ ID NO: 8955 - DNA, 75 bp, synthetic construct
  misc_feature 1..75: note = Synthetic
  source 1..75: mol_type = other DNA
acggcgtccgtgctcacgatcttgcgcaggacctgccttaccgtgtccaccttgctctccaacaccagagtatga

SEQ ID NO: 8956 - DNA, 66 bp, synthetic construct
  source 1..66: mol_type = other DNA
  misc_feature 1..66: note = Synthetic
atcgcaggctgcaggctgtgcccgctggacgagaaaggtttttcgactcggtccgcactagcctga

SEQ ID NO: 8957 - DNA, 201 bp, synthetic construct
  misc_feature 1..201: note = Synthetic
  source 1..201: mol_type = other DNA
atgtctatgggggccctgaccgacctggggcaaaacatgctgtacgccaactccgcccacgcgctcgacatgacttttgaggtggaccccatggatgagcccacacttctctatgttctgttcgaagttttcgacgttgtgcgcatccaccagccgcaccgcggcgtcatcgacgactcggtccgcactagcctgaggtaa

SEQ ID NO: 8958 - DNA, 213 bp, synthetic construct
  misc_feature 1..213: note = Synthetic
  source 1..213: mol_type = other DNA
gtgagggaaataaccaggatcaccacccccaccaccaggaccagaatgagcatgccgccgaaggggtttttgaagaaggagatgaaacccgagaccaggctgctaaacaaaccccccaccgtgctgactaggccggcgatgttttgcgcctggaagttgtactcccggaagatgccctccaggtccgactcggtccgcactagcctgaggtaa

SEQ ID NO: 8959 - DNA, 216 bp, synthetic construct
  misc_feature 1..216: note = Synthetic
  source 1..216: mol_type = other DNA
ttggaaatagttaaaagacaaattgctcggaatcacaaaattccgagtgccgattctcgtcctcagaaaatctggatggcgccgagtctcactgaatctgacatggattaccacaagatcttgacagcaggtctgtccgttcaacaggggattgttcggcaaagagtcatcccagtgtatcaagtaaacgactcggtccgcactagcctgaggtaa

SEQ ID NO: 8960 - DNA, 168 bp, synthetic construct
  misc_feature 1..168: note = Synthetic
  source 1..168: mol_type = other DNA
atgtcggctcgcgaacccgcggggcgcaggaggcgcgcatccacccgcccccgcgcctcgcccgtggcggacgagccagcgggcgatggggtggggttcatggggtacctgcgtgcggtgttccgcggggatgacgacagcgactcggtccgcactagcctgaggtaa

SEQ ID NO: 8961 - DNA, 195 bp, synthetic construct
  source 1..195: mol_type = other DNA
  misc_feature 1..195: note = Synthetic
gtgtttgacatgtcaatggaactttttaaagtgataagatatgatgaaaccaagtctcgttgtcgctcatgtgaatgcggagctaatcatttgaggttgtatcctgtaaccctgaacgttaccgaggagctgaggacggaccaccacatgctgtcttgcctgcgtaccgactatgaatccagcgatgaggagtga

SEQ ID NO: 8962 - DNA, 189 bp, synthetic construct
  source 1..189: mol_type = other DNA
  misc_feature 1..189: note = Synthetic
ctgtatatctatccatttatcatggaaaagaatttacccgatatcttcttttttccaaactgcgttaatgtattctcttacaaatattcacaagatgaattcagtaacatgagcaaaacggaacgtgcaagtttctcattggcagtgtttccagtgataaacgactcggtccgcactagcctgaggtaa

SEQ ID NO: 8963 - DNA, 45 bp, synthetic construct
  source 1..45: mol_type = other DNA
  misc_feature 1..45: note = Synthetic
atgtattctcttacaaatattcacaagatgaattcagtaacatga

SEQ ID NO: 8964 - DNA, 189 bp, synthetic construct
  misc_feature 1..189: note = Synthetic
  source 1..189: mol_type = other DNA
ctgtatatctatccatttatcgccgaaaagaatttacccgatatcttcttttttccaaactgcgttaatgtattctcttacaaatattcacaagatgaattcagtaacatgagcaaaacggaacgtgcaagtttctcattggcagtgtttccagtgataaacgactcggtccgcactagcctgaggtaa

SEQ ID NO: 8965 - DNA, 189 bp, synthetic construct
  misc_feature 1..189: note = Synthetic
  source 1..189: mol_type = other DNA
ctgtatatctttccatttatcatggaaaagaatttaccagatatcttcttttttccaaactgcgttaatgtattctcttacaaatattcacaagatgaattcagtaatatgagtaaaacggaacgtgataatttctcattggctgtgtttccagtgataaacgactcggtccgcactagcctgaggtaa

SEQ ID NO: 8966 - DNA, 45 bp, synthetic construct
  source 1..45: mol_type = other DNA
  misc_feature 1..45: note = Synthetic
atgtattctcttacaaatattcacaagatgaattcagtaatatga

SEQ ID NO: 8967 - DNA, 27 bp, synthetic construct
  misc_feature 1..27: note = Synthetic
  source 1..27: mol_type = other DNA
atggcgctcgggttagtttatctgtga

SEQ ID NO: 8968 - DNA, 66 bp, synthetic construct
  misc_feature 1..66: note = Synthetic
  source 1..66: mol_type = other DNA
atgcttactaaaccgactccttaccatgacttttccatcattataagtcgactcggtccgcactag

SEQ ID NO: 8969 - DNA, 42 bp, synthetic construct
  misc_feature 1..42: note = Synthetic
  source 1..42: mol_type = other DNA
atggtaactccgaggcactcgactcggtccgcactagcctga

SEQ ID NO: 8970 - DNA, 153 bp, synthetic construct
  misc_feature 1..153: note = Synthetic
  source 1..153: mol_type = other DNA
atccgcgagttcgtggccaaggtggtatccgtcgcgatggaggccactggaacgacggcgccctccataaaggtgcacgaccgcgtggagacagagatccgcgagtgctcggagtcgggagaggttccctcgactcggtccgcactagcctga

SEQ ID NO: 8971 - DNA, 102 bp, synthetic construct
  misc_feature 1..102: note = Synthetic
  source 1..102: mol_type = other DNA
gtgacgagcgcctatttcgcgatccgctcaccacgtacgagtatctcgacgactgtcgtgatgatgaggagttttgtcaccagttcctgcgcgcctacctga

SEQ ID NO: 8972 - DNA, 111 bp, synthetic construct
  misc_feature 1..111: note = Synthetic
  source 1..111: mol_type = other DNA
atggcgacggtgacgagcgcctatttcgcgatccgctcaccacgtacgagtatctcgacgactgtcgtgatgatgaggagttttgtcaccagttcctgcgcgcctacctga

SEQ ID NO: 8973 - DNA, 111 bp, synthetic construct
  misc_feature 1..111: note = Synthetic
  source 1..111: mol_type = other DNA
ctgacgacggtgacgagcgcctatttcgcgatccgctcaccacgtacgagtatctcgacgactgtcgtgatgatgaggagttttgtcaccagttcctgcgcgcctacctga

SEQ ID NO: 8974 - DNA, 114 bp, synthetic construct
  source 1..114: mol_type = other DNA
  misc_feature 1..114: note = Synthetic
atcatgacgacggtgacgagcgcctatttcgcgatccgctcaccacgtacgagtatctcgacgactgtcgtgatgatgaggagttttgtcaccagttcctgcgcgcctacctga

SEQ ID NO: 8975 - DNA, 84 bp, synthetic construct
  misc_feature 1..84: note = Synthetic
  source 1..84: mol_type = other DNA
ctggcaatgtttcataaaatggaagaaggacgcccgtcccctcccggatattttttacaatttcatccatttacaactctatag

SEQ ID NO: 8976 - DNA, 144 bp, synthetic construct
  source 1..144: mol_type = other DNA
  misc_feature 1..144: note = Synthetic
gtgtatgcgaagatcatgatgaacgggggaaaattgaaaaagtctcacatccggcgatatgtatcagtcagctcaaaccaccaggccagaccgaactcctttgcagaatttttgaacaaaacttacctaggtgatcagagataa

SEQ ID NO: 8977 - DNA, 168 bp, synthetic construct
  misc_feature 1..168: note = Synthetic
  source 1..168: mol_type = other DNA
atggattctcgtcctcagaaaatctggatggcgccgagtctcactgaatctgacatggattaccacaagatcttgacagcaggtctgtccgttcaacaggggattgttcggcaaagagtcatcccagtgtatcaagtaaacgactcggtccgcactagcctgaggtaa

SEQ ID NO: 8978 - DNA, 189 bp, synthetic construct
  source 1..189: mol_type = other DNA
  misc_feature 1..189: note = Synthetic
ctgtatatctttccatttatcatggaaaagaatttaccagatatcttcttttttccaaactgcgttaatgtattctcttacaaatattcacaagatgaattcagtaatatgagtaaaacggaacgtgatagtttctcattggccgtgtttccagttataaacgactcggtccgcactagcctgaggtaa

SEQ ID NO: 8979 - DNA, 189 bp, synthetic construct
  misc_feature 1..189: note = Synthetic
  source 1..189: mol_type = other DNA
ctgtatatctttccatttatcatggaaaagaatttaccagatatcttcttttttccaaactgcgttaatgtattctcttacaaatattcacaagatgaatttagtaatatgagtaacatggaacgtgatagtttctctttggcggtgtttccagttataaacgactcggtccgcactagcctgaggtaa

SEQ ID NO: 8980 - DNA, 189 bp, synthetic construct
  source 1..189: mol_type = other DNA
  misc_feature 1..189: note = Synthetic
ctgtatatctttccatttatcgccgaaaagaatttaccagatatcttcttttttccaaactgcgttaatgtattctcttacaaatattcacaagatgaattcagtaatatgagtaaaacggaacgtgataatttctcattggctgtgtttccagtgataaacgactcggtccgcactagcctgaggtaa

SEQ ID NO: 8981 - DNA, 189 bp, synthetic construct
  source 1..189: mol_type = other DNA
  misc_feature 1..189: note = Synthetic
ctgtatatctttccatttatcgccgaaaagaatttaccagatatcttcttttttccaaactgcgttaatgtattctcttacaaatattcacaagatgaattcagtaatatgagtaaaacggaacgtgatagtttctcattggccgtgtttccagttataaacgactcggtccgcactagcctgaggtaa

SEQ ID NO: 8982 - DNA, 171 bp, synthetic construct
  misc_feature 1..171: note = Synthetic
  source 1..171: mol_type = other DNA
atcgccgaaaagaatttaccagatatcttcttttttccaaactgcgttaatgtattctcttacaaatattcacaagatgaatttagtaatatgagtaacatggaacgtgatagtttctctttggcggtgtttccagttataaacgactcggtccgcactagcctgaggtaa

SEQ ID NO: 8983 - DNA, 171 bp, synthetic construct
  misc_feature 1..171: note = Synthetic
  source 1..171: mol_type = other DNA
ctgatgtcagattataatcctgatgtcctccagcagcttgtcaaggatggaatcaagactatcgagcttttacagcagagtccggaagactttcagaagacgtacggcagaagtgccatccaggagccgtcgacaagagccagcgactcggtccgcactagcctgaggtaa

SEQ ID NO: 8984 - DNA, 144 bp, synthetic construct
  misc_feature 1..144: note = Synthetic
  source 1..144: mol_type = other DNA
atgtcctccagcagcttgtcaaggatggaatcaagactatcgagcttttacagcagagtccggaagactttcagaagacgtacggcagaagtgccatccaggagccgtcgacaagagccagcgactcggtccgcactagcctga

SEQ ID NO: 8985 - DNA, 171 bp, synthetic construct
  source 1..171: mol_type = other DNA
  misc_feature 1..171: note = Synthetic
ctggcctcagattataatcctgatgtcctccagcagcttgtcaaggatggaatcaagactatcgagcttttacagcagagtccggaagactttcagaagacgtacggcagaagtgccatccaggagccgtcgacaagagccagcgactcggtccgcactagcctgaggtaa

SEQ ID NO: 8986 - DNA, 183 bp, synthetic construct
  source 1..183: mol_type = other DNA
  misc_feature 1..183: note = Synthetic
gtgatcacgcaatctagattggccgccagcacctggatgctggaagtcttgccggcgcccgccgtgccggtgacgagcagcgcgcggaagggaaagaagggccaacggtcgacgcagggcacgcgcgtgccgccggcctcggacgaagcggcagcggcggcagaagaggagacggaggagtga

SEQ ID NO: 8987 - DNA, 168 bp, synthetic construct
  misc_feature 1..168: note = Synthetic
  source 1..168: mol_type = other DNA
atggacccgtactgcccatttgacgctctggacgtctgggaacacaggcgcttcatagtcgccgattcccgaaacttcatcacccccgagttcccccgggacttttggatgtcgcccgtctttaacctcccccgggagaccgactcggtccgcactagcctgaggtaa

SEQ ID NO: 8988 - DNA, 99 bp, synthetic construct
  source 1..99: mol_type = other DNA
  misc_feature 1..99: note = Synthetic
attcccgaaacttcatcacccccgagttcccccgggacttttggatgtcgcccgtctttaacctcccccgggagaccgactcggtccgcactagcctga

SEQ ID NO: 8989 - DNA, 36 bp, synthetic construct
  misc_feature 1..36: note = Synthetic
  source 1..36: mol_type = other DNA
atgatgaacaaatcatttttctcgcacataacataa

SEQ ID NO: 8990 - DNA, 63 bp, synthetic construct
  misc_feature 1..63: note = Synthetic
  source 1..63: mol_type = other DNA
atggtcacgtcgcgtcaaggccttctaagaatgagcccgccgactcggtccgcactagcctga

SEQ ID NO: 8991 - DNA, 174 bp, synthetic construct
  misc_feature 1..174: note = Synthetic
  source 1..174: mol_type = other DNA
atgagtcgcataccaggaggaaggatgtatgcagatgacactgctggctgggacacccgcatcagcaggtttgatctggagaatgaagctctaatcaccaaccaaatggagaaagggcacagggccttggcattggccataatcaagtacacgactcggtccgcactagcctga

SEQ ID NO: 8992 - DNA, 21 bp, synthetic construct
  misc_feature 1..21: note = Synthetic
  source 1..21: mol_type = other DNA
atgtgtataccgccccattaa

SEQ ID NO: 8993 - DNA, 186 bp, synthetic construct
  source 1..186: mol_type = other DNA
  misc_feature 1..186: note = Synthetic
atagttaaattactaagcatgaggactctacttattagatatattctttggagaaatgatggcgatccatcatattataatgatgattttgaaaagcttatgttgttggatgaattggtagatgacagtgatgtatgtacattgattaagaacatgagcgactcggtccgcactagcctgaggtaa

SEQ ID NO: 8994 - DNA, 186 bp, synthetic construct
  misc_feature 1..186: note = Synthetic
  source 1..186: mol_type = other DNA
atagttaaattactaagcgccaggactctacttattagatatattctttggagaaatgatggcgatccatcatattataatgatgattttgaaaagcttatgttgttggatgaattggtagatgacagtgatgtatgtacattgattaagaacatgagcgactcggtccgcactagcctgaggtaa

SEQ ID NO: 8995 - DNA, 192 bp, synthetic construct
  source 1..192: mol_type = other DNA
  misc_feature 1..192: note = Synthetic
attttcgctctccgcctctcgcagatggacacgtactgcccatttgacgctctggacgtctgggaacacaggcgcttcatagtcgccgattcccgaaacttcatcacccccgagttcccccgggacttttggatgtcgcccgtctttaacctcccccgggagaccgactcggtccgcactagcctgaggtaa

SEQ ID NO: 8996 - DNA, 192 bp, synthetic construct
  source 1..192: mol_type = other DNA
  misc_feature 1..192: note = Synthetic
attttcgctctccgcctctcgcagatggacccatactgcccatttgacgctctggacgtctgggaacacaggcgcttcatagtcgccgattcccgaaacttcatcacccccgagttcccccgggacttttggatgtcgcccgtctttaacctcccccgggagaccgactcggtccgcactagcctgaggtaa

SEQ ID NO: 8997 - DNA, 192 bp, synthetic construct
  misc_feature 1..192: note = Synthetic
  source 1..192: mol_type = other DNA
attttcgctctccgcctctcgcagatggacccgaactgcccatttgacgctctggacgtctgggaacacaggcgcttcatagtcgccgattcccgaaacttcatcacccccgagttcccccgggacttttggatgtcgcccgtctttaacctcccccgggagaccgactcggtccgcactagcctgaggtaa

SEQ ID NO: 8998 - DNA, 192 bp, synthetic construct
  misc_feature 1..192: note = Synthetic
  source 1..192: mol_type = other DNA
attttcgctctccgcctctcgcagatggacccgtactgcccatttgacgctctggacgtctgggaacacaggcgcttcatagtcgccgattcccgaaacttcatcacccccgagttcccccgggacttttggatgtcgcccgtctttaacctcccccgggagaccgactcggtccgcactagcctgaggtaa

SEQ ID NO: 8999 - DNA, 192 bp, synthetic construct
  source 1..192: mol_type = other DNA
  misc_feature 1..192: note = Synthetic
attttcgctctccgcctctcgcagatggacccgtattgcccatttgacgctctggacgtctgggaacacaggcgcttcatagtcgccgattcccgaaacttcatcacccccgagttcccccgggacttttggatgtcgcccgtctttaacctcccccgggagaccgactcggtccgcactagcctgaggtaa

SEQ ID NO: 9000 - DNA, 192 bp, synthetic construct
  source 1..192: mol_type = other DNA
  misc_feature 1..192: note = Synthetic
attttcgctctccgcctctcgcagatggacccgtgctgcccatttgacgctctggacgtctgggaacacaggcgcttcatagtcgccgattcccgaaacttcatcacccccgagttcccccgggacttttggatgtcgcccgtctttaacctcccccgggagaccgactcggtccgcactagcctgaggtaa

SEQ ID NO: 9001 - DNA, 60 bp, synthetic construct
  misc_feature 1..60: note = Synthetic
  source 1..60: mol_type = other DNA
ttgagacctcggctaataacaggtttttcgagaatccgcaccaagagttcgacttcgtag

SEQ ID NO: 9002 - DNA, 18 bp, synthetic construct
  source 1..18: mol_type = other DNA
  misc_feature 1..18: note = Synthetic
atgacagggaccgggtag

SEQ ID NO: 9003 - DNA, 72 bp, synthetic construct
  misc_feature 1..72: note = Synthetic
  source 1..72: mol_type = other DNA
ctgaccaacatcacgcgacaccggagaacgcataatatgaggacctacgggcctcgactcggtccgcactag

SEQ ID NO: 9004 - DNA, 168 bp, synthetic construct
  source 1..168: mol_type = other DNA
  misc_feature 1..168: note = Synthetic
atggcagacgctaccacgctctccgtgaacgggctggaactgcagtacgtgcgcgcgcacgagcgcgccagcgtgcgctacgcgcgcgtctccaccgtgtgctttttcttgctggtgctgctggcgagcagcgtgctcttcgactcggtccgcactagcctgaggtaa

SEQ ID NO: 9005 - DNA, 180 bp, synthetic construct
  misc_feature 1..180: note = Synthetic
  source 1..180: mol_type = other DNA
atagggttacaagccgcagacgctaccacgctctccgtgaacgggctggaactgcagtacgtgcgcgcgcacgagcgcgccagcgtgcgctacgcgcgcgtctccaccgtgtgctttttcttgctggtgctgctggcgagcagcgtgctcttcgactcggtccgcactagcctgaggtaa

SEQ ID NO: 9006 - DNA, 192 bp, synthetic construct
  misc_feature 1..192: note = Synthetic
  source 1..192: mol_type = other DNA
attttcgctctccgcatctcgcagatggacccgtactgcccatttgacgctctggacgtctgggaacacaggcgcttcatagtcgccgattcccgaaacttcatcacccccgagttcccccgggacttttggatgtcgcccgtctttaacctcccccgggagaccgactcggtccgcactagcctgaggtaa

SEQ ID NO: 9007 - DNA, 192 bp, synthetic construct
  misc_feature 1..192: note = Synthetic
  source 1..192: mol_type = other DNA
attttcgctctccgcctcacgcagatggacccgtactgcccatttgacgctctggacgtctgggaacacaggcgcttcatagtcgccgattcccgaaacttcatcacccccgagttcccccgggacttttggatgtcgcccgtctttaacctcccccgggagaccgactcggtccgcactagcctgaggtaa

SEQ ID NO: 9008 - DNA, 192 bp, synthetic construct
  misc_feature 1..192: note = Synthetic
  source 1..192: mol_type = other DNA
attttcgctctccgcctctcacagatggacccgtactgcccatttgacgctctggacgtctgggaacacaggcgcttcatagtcgccgattcccgaaacttcatcacccccgagttcccccgggacttttggatgtcgcccgtctttaacctcccccgggagaccgactcggtccgcactagcctgaggtaa

SEQ ID NO: 9009 - DNA, 27 bp, synthetic construct
  misc_feature 1..27: note = Synthetic
  source 1..27: mol_type = other DNA
attcaccgactgttagggagtatgtga

SEQ ID NO: 9010 - DNA, 21 bp, synthetic construct
  source 1..21: mol_type = other DNA
  misc_feature 1..21: note = Synthetic
atgagaagcaagagttcgtag

SEQ ID NO: 9011 - DNA, 147 bp, synthetic construct
  misc_feature 1..147: note = Synthetic
  source 1..147: mol_type = other DNA
atgggaaagattgtaacacccgctaagttgttgttgttaagagatgagaagcaagagttcgtagcgccaaaagtagtcaaggcgaaagctattgcctgctattgtgctgtgaagtggtttctcctctatcgactcggtccgcactag

SEQ ID NO: 9012 - DNA, 51 bp, synthetic construct
  misc_feature 1..51: note = Synthetic
  source 1..51: mol_type = other DNA
atctcttgcgccctctcggtgttcgactcggtccgcactagcctgaggtaa

SEQ ID NO: 9013 - DNA, 18 bp, synthetic construct
  source 1..18: mol_type = other DNA
  misc_feature 1..18: note = Synthetic
atggaaaacggacactag

SEQ ID NO: 9014 - DNA, 168 bp, synthetic construct
  misc_feature 1..168: note = Synthetic
  source 1..168: mol_type = other DNA
atggacaagttggatctagtcaatgatggcctcgatattattgactttattcagaagaaccaaaaagaaatacaaaagacatacggacgatcaagcatccaacaaccaagtaccaaagacaggacaagagcatgggaggacgactcggtccgcactagcctgaggtaa

SEQ ID NO: 9015 - DNA, 138 bp, synthetic construct
  misc_feature 1..138: note = Synthetic
  source 1..138: mol_type = other DNA
atggcctcgatattattgactttattcagaagaaccaaaaagaaatacaaaagacatacggacgatcaagcatccaacaaccaagtaccaaagacaggacaagagcatgggaggacgactcggtccgcactagcctga

SEQ ID NO: 9016 - DNA, 123 bp, synthetic construct
  misc_feature 1..123: note = Synthetic
  source 1..123: mol_type = other DNA
acgacgatgcgggctcgagggggccgcggccggagagcgcgcggtgtagcctgtcccggacccaactcctcgatgccgaggatgttgctacgcccggtttccgtgccagtcagctccgagtga

SEQ ID NO: 9017 - DNA, 168 bp, synthetic construct
  misc_feature 1..168: note = Synthetic
  source 1..168: mol_type = other DNA
atgaggactctacttattagatatattctttggagaaatgatggcgatccatcctattataatgatgattttaaaaatcttatgtcgttggatgaattggtagatgacggcgatgtatgtgcattgattaagaacatgagcgactcggtccgcactagcctgaggtaa

SEQ ID NO: 9018 - DNA, 210 bp, synthetic construct
  misc_feature 1..210: note = Synthetic
  source 1..210: mol_type = other DNA
attcgtggtcacttgcgaatggccggacactccctagggcgctgtgacattaaggacctgccaaaagagatcactgtggctacatcacgaacgctttcttattacaaattaggagcgtcgcagcgtgtaggcactgattcaggttttgctgcatacaaccgctaccgtattggaaactataaattaacgactcggtccgcactagcctga

SEQ ID NO: 9019 - DNA, 198 bp, synthetic construct
  misc_feature 1..198: note = Synthetic
  source 1..198: mol_type = other DNA
atgggagatgttgtgtgtaatgctgccatgttgattaggcagggcctgacaaacccaaaggcatttaaatccttaaaggatctgtgggactacatgctcaactacacaaaaggggtattggagttttcaatttcagccgactttacgcacaatcagaataatactgactgtttaacgactcggtccgcactagcctga

SEQ ID NO: 9020 - DNA, 198 bp, synthetic construct
  source 1..198: mol_type = other DNA
  misc_feature 1..198: note = Synthetic
atgggagatgttgtgtgtaatgctgccatgttgattaggcagggcctgacaaacccaaaggcatttaaatccttaaaggatctgtgggactacatgctcaactacacaaaaggggtattggagttttcaatttcagtggactttacgcacaatcagaataatactgactgtttaacgactcggtccgcactagcctga

SEQ ID NO: 9021 - DNA, 33 bp, synthetic construct
  misc_feature 1..33: note = Synthetic
  source 1..33: mol_type = other DNA
acgctaccaacagacactcaagcagcatactaa

SEQ ID NO: 9022 - DNA, 60 bp, synthetic construct
  misc_feature 1..60: note = Synthetic
  source 1..60: mol_type = other DNA
atgacttctgaatcaaaaagcatagaaaacgaatatccgactcggtccgcactagcctga

SEQ ID NO: 9023 - DNA, 192 bp, synthetic construct
  source 1..192: mol_type = other DNA
  misc_feature 1..192: note = Synthetic
attttcgctctccgcctctcgcagatggacctgtactgcccatttgacgctctggacgtctgggaacacaggcgcttcatagtcgccgattcccgaaacttcatcacccccgagttcccccgggacttttggatgtcgcccgtctttaacctcccccgggagaccgactcggtccgcactagcctgaggtaa

SEQ ID NO: 9024 - DNA, 192 bp, synthetic construct
  misc_feature 1..192: note = Synthetic
  source 1..192: mol_type = other DNA
attttcgctctccgcctctcgcagatggatccgtactgcccatttgacgctctggacgtctgggaacacaggcgcttcatagtcgccgattcccgaaacttcatcacccccgagttcccccgggacttttggatgtcgcccgtctttaacctcccccgggagaccgactcggtccgcactagcctgaggtaa

SEQ ID NO: 9025 - DNA, 192 bp, synthetic construct
  misc_feature 1..192: note = Synthetic
  source 1..192: mol_type = other DNA
attttcgctctccgcctctcgcagatgggcccgtactgcccatttgacgctctggacgtctgggaacacaggcgcttcatagtcgccgattcccgaaacttcatcacccccgagttcccccgggacttttggatgtcgcccgtctttaacctcccccgggagaccgactcggtccgcactagcctgaggtaa

SEQ ID NO: 9026 - DNA, 192 bp, synthetic construct
  misc_feature 1..192: note = Synthetic
  source 1..192: mol_type = other DNA
attttcgctctccgcctctcgcagctggacccgtactgcccatttgacgctctggacgtctgggaacacaggcgcttcatagtcgccgattcccgaaacttcatcacccccgagttcccccgggacttttggatgtcgcccgtctttaacctcccccgggagaccgactcggtccgcactagcctgaggtaa

SEQ ID NO: 9027 - DNA, 57 bp, synthetic construct
  source 1..57: mol_type = other DNA
  misc_feature 1..57: note = Synthetic
ctgcttagtatatacccggctaaggcgatggctgccatggaccctcattatcgataa

SEQ ID NO: 9028 - DNA, 168 bp, synthetic construct
  misc_feature 1..168: note = Synthetic
  source 1..168: mol_type = other DNA
atggctgatagcgaggctgtcgatccgactccttccggagacaccagctccgccgggaataccggagacaccagctccgccgggaataccggagacaccagctccgccgggaataccggagagactaccggcagtagcagcgactcggtccgcactagcctgaggtaa

SEQ ID NO: 9029 - DNA, 27 bp, synthetic construct
  source 1..27: mol_type = other DNA
  misc_feature 1..27: note = Synthetic
atgagaggttttctacttgctcattag

SEQ ID NO: 9030 - DNA, 138 bp, synthetic construct
  source 1..138: mol_type = other DNA
  misc_feature 1..138: note = Synthetic
atgtggttatttcagcacctaaagcagtctttaagcccgctaaagaagaagcactcgcttgtatactaccaaagtattataaatctatggcagatatgtctattaagacaaatagcgactcggtccgcactagcctga

SEQ ID NO: 9031 - DNA, 78 bp, synthetic construct
  misc_feature 1..78: note = Synthetic
  source 1..78: mol_type = other DNA
atgagatcttactacagatccattgcctcaatcaagatgagaacacagagcttcagatttatggatgcgtgctcatga

SEQ ID NO: 9032 - DNA, 168 bp, synthetic construct
  source 1..168: mol_type = other DNA
  misc_feature 1..168: note = Synthetic
atgggatcctgctgtggtagattctgtgacgctaagaataagaaggaagatgtagaagatggaagagaaggatgttgcgattataagaaccttaatgatctggatgaatccgaagcacgtgtagaatttggaccattatacgactcggtccgcactagcctgaggtaa

SEQ ID NO: 9033 - DNA, 117 bp, synthetic construct
  source 1..117: mol_type = other DNA
  misc_feature 1..117: note = Synthetic
atgccgctacctgccgaaatgcgtttaaccagaattttgcccggttcgcttgtggtatctagcaggctttcaccaaataacgcgccggaatcttcaacacgactcggtccgcactag

SEQ ID NO: 9034 - DNA, 192 bp, synthetic construct
  source 1..192: mol_type = other DNA
  misc_feature 1..192: note = Synthetic
attttcgctctccgcctctcgcaaatggacccgtactgcccatttgacgctctggacgtctgggaacacaggcgcttcatagtcgccgattcccgaaacttcatcacccccgagttcccccgggacttttggatgtcgcccgtctttaacctcccccgggagaccgactcggtccgcactagcctgaggtaa

SEQ ID NO: 9035 - DNA, 192 bp, synthetic construct
  source 1..192: mol_type = other DNA
  misc_feature 1..192: note = Synthetic
attttcgctctccgcctctcgcagagggacccgtactgcccatttgacgctctggacgtctgggaacacaggcgcttcatagtcgccgattcccgaaacttcatcacccccgagttcccccgggacttttggatgtcgcccgtctttaacctcccccgggagaccgactcggtccgcactagcctgaggtaa

SEQ ID NO: 9036 - DNA, 192 bp, synthetic construct
  misc_feature 1..192: note = Synthetic
  source 1..192: mol_type = other DNA
attttcgctctccgcctctcgcagatcgacccgtactgcccatttgacgctctggacgtctgggaacacaggcgcttcatagtcgccgattcccgaaacttcatcacccccgagttcccccgggacttttggatgtcgcccgtctttaacctcccccgggagaccgactcggtccgcactagcctgaggtaa

SEQ ID NO: 9037 - DNA, 192 bp, synthetic construct
  misc_feature 1..192: note = Synthetic
  source 1..192: mol_type = other DNA
attttcgctctccgcctctcgcagatgcacccgtactgcccatttgacgctctggacgtctgggaacacaggcgcttcatagtcgccgattcccgaaacttcatcacccccgagttcccccgggacttttggatgtcgcccgtctttaacctcccccgggagaccgactcggtccgcactagcctgaggtaa

SEQ ID NO: 9038 - DNA, 39 bp, synthetic construct
  misc_feature 1..39: note = Synthetic
  source 1..39: mol_type = other DNA
aagaagttcttgcagacgactcggtccgcactagcctga

SEQ ID NO: 9039 - DNA, 45 bp, synthetic construct
  misc_feature 1..45: note = Synthetic
  source 1..45: mol_type = other DNA
atgacgtttgcggcatcgtattcagtccgactcggtccgcactag

SEQ ID NO: 9040 - DNA, 15 bp, synthetic construct
  source 1..15: mol_type = other DNA
  misc_feature 1..15: note = Synthetic
atgccgccttcgtga

SEQ ID NO: 9041 - DNA, 69 bp, synthetic construct
  source 1..69: mol_type = other DNA
  misc_feature 1..69: note = Synthetic
atgcagccgctggttctctcggcgaagaaactgtcgtctctactgatttgcaaatacatcccgccttaa

SEQ ID NO: 9042 - DNA, 198 bp, synthetic construct
  misc_feature 1..198: note = Synthetic
  source 1..198: mol_type = other DNA
atacattcagacagtcacatttcatttcccatgtacgacgatctcatagaacagtgccatctatcgatggagcgtaaaagtaaactcgtcgacaaagcactcaataaattagagtctaccatcggtcaatctagactatcgtatttgcctccggaaattatgcgcaatatcgactcggtccgcactagcctgaggtaa

SEQ ID NO: 9043 - DNA, 132 bp, synthetic construct
  misc_feature 1..132: note = Synthetic
  source 1..132: mol_type = other DNA
atggagcgtaaaagtaaactcgtcgacaaagcactcaataaattagagtctaccatcggtcaatctagactatcgtatttgcctccggaaattatgcgcaatatcgactcggtccgcactagcctgaggtaa

SEQ ID NO: 9044 - DNA, 177 bp, synthetic construct
  misc_feature 1..177: note = Synthetic
  source 1..177: mol_type = other DNA
atgtcgccgccagaggagctgctgagccgccgtgcgcccgctttccaagatggctaccccttcgatgatgccgcagtggtcttacatgcacatctcgggccaggacgcctcggagtacctgagccccgggctggtgcagtttgcccgcgccaccgagacgtacttcagcctgaataa

SEQ ID NO: 9045 - DNA, 186 bp, synthetic construct
  source 1..186: mol_type = other DNA
  misc_feature 1..186: note = Synthetic
gtgcgcccgctttccaagatggctaccccttcgatgatgccgcagtggtcttacatgcacatctcgggccaggacgcctcggagtacctgagccccgggctggtgcagtttgcccgcgccaccgagacgtacttcagcctgaataacaagtttagaaacgactcggtccgcactagcctgaggtaa

SEQ ID NO: 9046 - DNA, 177 bp, synthetic construct
  misc_feature 1..177: note = Synthetic
  source 1..177: mol_type = other DNA
atgtcgccgccagaggagctgctgagccgccgtgcgcccgctttccaaggccgctaccccttcgatgatgccgcagtggtcttacatgcacatctcgggccaggacgcctcggagtacctgagccccgggctggtgcagtttgcccgcgccaccgagacgtacttcagcctgaataa

SEQ ID NO: 9047 - DNA, 171 bp, synthetic construct
  source 1..171: mol_type = other DNA
  misc_feature 1..171: note = Synthetic
aaggccgctaccccttcgatgatgccgcagtggtcttacatgcacatctcgggccaggacgcctcggagtacctgagccccgggctggtgcagtttgcccgcgccaccgagacgtacttcagcctgaataacaagtttagaaacgactcggtccgcactagcctgaggtaa

SEQ ID NO: 9048 - DNA, 42 bp, synthetic construct
  misc_feature 1..42: note = Synthetic
  source 1..42: mol_type = other DNA
atggttatgccattgttgaagtcgcaggatactgccttatag

SEQ ID NO: 9049 - DNA, 105 bp, synthetic construct
  misc_feature 1..105: note = Synthetic
  source 1..105: mol_type = other DNA
ttggagttccctctgatactgaggtgtaggctcgaaactatactcatgagtgtgtggtcaaaggtctttttattgaaggcagaggtcagattgcaaaagttgtga

SEQ ID NO: 9050 - DNA, 45 bp, synthetic construct
  misc_feature 1..45: note = Synthetic
  source 1..45: mol_type = other DNA
gtgaaggtcaattctagtccagaagtccgactcggtccgcactag

SEQ ID NO: 9051 - DNA, 21 bp, synthetic construct
  source 1..21: mol_type = other DNA
  misc_feature 1..21: note = Synthetic
atgtttagttccagagtctga

SEQ ID NO: 9052 - DNA, 75 bp, synthetic construct
  source 1..75: mol_type = other DNA
  misc_feature 1..75: note = Synthetic
ttgtacagacctttcagcactgctagtacagacagtgcaatgagaacaatgttcatcacctcttctattacatga

SEQ ID NO: 9053 - DNA, 192 bp, synthetic construct
  source 1..192: mol_type = other DNA
  misc_feature 1..192: note = Synthetic
attttcgctctccgcctctcgcaggccgacccgtactgcccatttgacgctctggacgtctgggaacacaggcgcttcatagtcgccgattcccgaaacttcatcacccccgagttcccccgggacttttggatgtcgcccgtctttaacctcccccgggagaccgactcggtccgcactagcctgaggtaa

SEQ ID NO: 9054 - DNA, 192 bp, synthetic construct
  source 1..192: mol_type = other DNA
  misc_feature 1..192: note = Synthetic
attttcgctctccgcctctcgcggatggacccgtactgcccatttgacgctctggacgtctgggaacacaggcgcttcatagtcgccgattcccgaaacttcatcacccccgagttcccccgggacttttggatgtcgcccgtctttaacctcccccgggagaccgactcggtccgcactagcctgaggtaa

SEQ ID NO: 9055 - DNA, 192 bp, synthetic construct
  source 1..192: mol_type = other DNA
  misc_feature 1..192: note = Synthetic
attttcgctctccgcctttcgcagatggacccgtactgcccatttgacgctctggacgtctgggaacacaggcgcttcatagtcgccgattcccgaaacttcatcacccccgagttcccccgggacttttggatgtcgcccgtctttaacctcccccgggagaccgactcggtccgcactagcctgaggtaa

SEQ ID NO: 9056 - DNA, 192 bp, synthetic construct
  source 1..192: mol_type = other DNA
  misc_feature 1..192: note = Synthetic
attttcgctctcctcctctcgcagatggacccgtactgcccatttgacgctctggacgtctgggaacacaggcgcttcatagtcgccgattcccgaaacttcatcacccccgagttcccccgggacttttggatgtcgcccgtctttaacctcccccgggagaccgactcggtccgcactagcctgaggtaa

SEQ ID NO: 9057 - DNA, 198 bp, synthetic construct
  source 1..198: mol_type = other DNA
  misc_feature 1..198: note = Synthetic
gtgagctcgccgagtacagacgtggtaacaatggatcccatagtgattgtaagtactatgacgaagaagcaagagaggaagttagttaagagattgtgtcaagagctgactcaattacatgaagatcttaaacgtgccagggaatcagataaaaatgatagtactacaagcgactcggtccgcactagcctgaggtaa

SEQ ID NO: 9058 - DNA, 69 bp, synthetic construct
  source 1..69: mol_type = other DNA
  misc_feature 1..69: note = Synthetic
atcttaaacgtgccagggaatcagataaaaatgatagtactacaagcgactcggtccgcactagcctga

SEQ ID NO: 9059 - DNA, 198 bp, synthetic construct
  misc_feature 1..198: note = Synthetic
  source 1..198: mol_type = other DNA
gtgagctcgccgagtacagacgtggtaacagccgatcccatagtgattgtaagtactatgacgaagaagcaagagaggaagttagttaagagattgtgtcaagagctgactcaattacatgaagatcttaaacgtgccagggaatcagataaaaatgatagtactacaagcgactcggtccgcactagcctgaggtaa

SEQ ID NO: 9060 - DNA, 75 bp, synthetic construct
  misc_feature 1..75: note = Synthetic
  source 1..75: mol_type = other DNA
ttgtacagacctttcagcactgctagtacagacagtgcaatgagaacagccttcatcacctcttctattacatga

SEQ ID NO: 9061 - DNA, 168 bp, synthetic construct
  misc_feature 1..168: note = Synthetic
  source 1..168: mol_type = other DNA
atgagcaaagacattcccacgccttacatgtggagctatcagccgcaaatgggcctggcagctggagcttctcaggattactccagtcgcatgaattggcttagtgccggcccccacatgattgggcgggtaaatggaatcgactcggtccgcactagcctgaggtaa

SEQ ID NO: 9062 - DNA, 198 bp, synthetic construct
  misc_feature 1..198: note = Synthetic
  source 1..198: mol_type = other DNA
ttgccttgctcctgccacactaccctgaccgccgaacgcgaccttgagaggggcccaccgggcccgccacggccccctctaggaccccccctctcctcttccataggccttgctctccttctcctgctcttggcgctactgttctggctgtatatcgttatgagtaactgcgactcggtccgcactagcctgaggtaa

SEQ ID NO: 9063 - DNA, 54 bp, synthetic construct
  source 1..54: mol_type = other DNA
  misc_feature 1..54: note = Synthetic
ttgctctccttctcctgctcttggcgctactgttctggctgtatatcgttatga

SEQ ID NO: 9064 - DNA, 60 bp, synthetic construct
  misc_feature 1..60: note = Synthetic
  source 1..60: mol_type = other DNA
attttggcagatagtctcagttctttgttgcgtgcatacaacacaacaatctggcgatga

SEQ ID NO: 9065 - DNA, 168 bp, synthetic construct
  misc_feature 1..168: note = Synthetic
  source 1..168: mol_type = other DNA
atgagtgcctcaaaggaaataaaatcctttttgtggacacaatctttgaggagggaattatctggttactgctccaacatcaaactacaggtggtgaaagatgcccaggctcttttacatggacttgacttctccgaagtcgactcggtccgcactagcctgaggtaa

SEQ ID NO: 9066 - DNA, 63 bp, synthetic construct
  source 1..63: mol_type = other DNA
  misc_feature 1..63: note = Synthetic
atgcccaggctcttttacatggacttgacttctccgaagtcgactcggtccgcactagcctga

SEQ ID NO: 9067 - DNA, 189 bp, synthetic construct
  misc_feature 1..189: note = Synthetic
  source 1..189: mol_type = other DNA
atacaacacaacaatctggcggccagtgcctcaaaggaaataaaatcctttttgtggacacaatctttgaggagggaattatctggttactgctccaacatcaaactacaggtggtgaaagatgcccaggctcttttacatggacttgacttctccgaagtcgactcggtccgcactagcctgaggtaa

SEQ ID NO: 9068 - DNA, 111 bp, synthetic construct
  source 1..111: mol_type = other DNA
  misc_feature 1..111: note = Synthetic
atgagtgtaattggttttcggtgtgtaaaaaaaagttgtaccacgaatatcgttgtgtggcaacatcttctcctgttttcgctgttgacgactcggtccgcactagcctga

SEQ ID NO: 9069 - DNA, 117 bp, synthetic construct
  source 1..117: mol_type = other DNA
  misc_feature 1..117: note = Synthetic
ttgctattccatagttacgccatagacatcgaaaatgaaatcaccgaattcttcaataaaatgagagatactctaccagctaaagactccgactcggtccgcactagcctgaggtaa

SEQ ID NO: 9070 - DNA, 30 bp, synthetic construct
  misc_feature 1..30: note = Synthetic
  source 1..30: mol_type = other DNA
atgaaatcaccgaattcttcaataaaatga

SEQ ID NO: 9071 - DNA, 162 bp, synthetic construct
  source 1..162: mol_type = other DNA
  misc_feature 1..162: note = Synthetic
aagatgaagatgatggtccgtatatattttgtatcattatcgttattgctattccatagttacgccatagacatcgaaaatgaaatcaccgaattcttcaataaaatgagagatactctaccagctaaagactccgactcggtccgcactagcctgaggtaa

SEQ ID NO: 9072 - DNA, 51 bp, synthetic construct
  misc_feature 1..51: note = Synthetic
  source 1..51: mol_type = other DNA
ctgttgtctacactgccttgttcgaaagaagaaattatttcgcgagtctag

SEQ ID NO: 9073 - DNA, 72 bp, synthetic construct
  misc_feature 1..72: note = Synthetic
  source 1..72: mol_type = other DNA
acgcgcatgatctcgcggagccatctacgcgcctgtcagggcgatgacgacatcggcgatgacggctcctga

SEQ ID NO: 9074 - DNA, 174 bp, synthetic construct
  misc_feature 1..174: note = Synthetic
  source 1..174: mol_type = other DNA
agggcgatgacgacatcggcgatgacggctcctgatacgcgccgacagctgcagcacgtggagacgctgcgtcggtttctacgcggcgacagctgctttgtgcacgatctccggggcatgatggactatcacgacgggctctcgcgcgactcggtccgcactagcctgaggtaa

SEQ ID NO: 9075 - DNA, 72 bp, synthetic construct
  source 1..72: mol_type = other DNA
  misc_feature 1..72: note = Synthetic
acgcgcatgatctcgcggagccatctacgcgcctgtcagggcggccacgacatcggcgatgacggctcctga

SEQ ID NO: 9076 - DNA, 27 bp, synthetic construct
  misc_feature 1..27: note = Synthetic
  source 1..27: mol_type = other DNA
atgaacactgcttctcccattcaataa

SEQ ID NO: 9077 - DNA, 27 bp, synthetic construct
  misc_feature 1..27: note = Synthetic
  source 1..27: mol_type = other DNA
atgaacactgcttctcccattcaatag

SEQ ID NO: 9078 - DNA, 198 bp, synthetic construct
  misc_feature 1..198: note = Synthetic
  source 1..198: mol_type = other DNA
ttgccttgctcctgccacactaccctgaccatggaacgcgaccttgagaggggcccaccgggcccgccacggccccctctaggaccccccctctcctcttccataggccttgctctccttctcctgctcttggcgctactgttctggctgtatatcgttatgagtaactgcgactcggtccgcactagcctgaggtaa

SEQ ID NO: 9079 - DNA, 195 bp, synthetic construct
  source 1..195: mol_type = other DNA
  misc_feature 1..195: note = Synthetic
gtgtgcatacaacacaacaatctggcggccagtgcctcaaaggaaataaaatcctttttgtggacacaatctttgaggagggaattatctggttactgctccaacatcaaactacaggtggtgaaagatgcccaggctcttttacatggacttgacttctccgaagtcgactcggtccgcactagcctgaggtaa

SEQ ID NO: 9080 - DNA, 33 bp, synthetic construct
  misc_feature 1..33: note = Synthetic
  source 1..33: mol_type = other DNA
atggtttatgtacggcatgtgttacttgtttaa

SEQ ID NO: 9081 - DNA, 219 bp, synthetic construct
  source 1..219: mol_type = other DNA
  misc_feature 1..219: note = Synthetic
ctggcgagagcgcgcttcttttccgcggtcttttttccgttttgtaaagaatccggatgcgtgtttttaaggacgaggaaatctacgcgtactgcggcgcgcaccccgaagagccgcgctgtcgctgcctgtaccccgagcccagcgtggaggccatcgggcgcgacctgcggctgccgtactactgctggtacgacgactcggtccgcactagcctga

SEQ ID NO: 9082 - DNA, 168 bp, synthetic construct
  misc_feature 1..168: note = Synthetic
  source 1..168: mol_type = other DNA
atgcgtgtttttaaggacgaggaaatctacgcgtactgcggcgcgcaccccgaagagccgcgctgtcgctgcctgtaccccgagcccagcgtggaggccatcgggcgcgacctgcggctgccgtactactgctggtacgacgactcggtccgcactagcctgaggtaa

SEQ ID NO: 9083 - DNA, 138 bp, synthetic construct
  misc_feature 1..138: note = Synthetic
  source 1..138: mol_type = other DNA
atgtggttatttcagcacctaaagcagtctttaagcccgctaaagaagaagcactcgcttgtatactaccaaagtattataaatctatggcagatgtgtctattaagacaaatagcgactcggtccgcactagcctga

SEQ ID NO: 9084 - DNA, 117 bp, synthetic construct
  misc_feature 1..117: note = Synthetic
  source 1..117: mol_type = other DNA
atgccgctacctgccgaaatgcgtttaaccagaattttgcccggttcgcttgtggtatctagcaggctttcaccaaatagcccgccggaatcttcaacacgactcggtccgcactag

SEQ ID NO: 9085 - DNA, 99 bp, synthetic construct
  source 1..99: mol_type = other DNA
  misc_feature 1..99: note = Synthetic
atgcgtttaaccagaattttgcccggttcgcttgtggtatctagcaggctttcaccaaataacgcgccggaatcttcaacacgactcggtccgcactag

SEQ ID NO: 9086 - DNA, 30 bp, synthetic construct
  misc_feature 1..30: note = Synthetic
  source 1..30: mol_type = other DNA
ctggcttcaatttccacttcatcgccataa

SEQ ID NO: 9087 - DNA, 42 bp, synthetic construct
  misc_feature 1..42: note = Synthetic
  source 1..42: mol_type = other DNA
atgttcgcgattgtctcggaagcccccaacacccgccagtaa

SEQ ID NO: 9088 - DNA, 63 bp, synthetic construct
  source 1..63: mol_type = other DNA
  misc_feature 1..63: note = Synthetic
attataaatctatggcagatgtgtctattaagacaaatagcgactcggtccgcactagcctga

SEQ ID NO: 9089 - DNA, 111 bp, synthetic construct
  misc_feature 1..111: note = Synthetic
  source 1..111: mol_type = other DNA
atgcatactaaactcgcatcaataactcaattagttattgccaagatagaaactatagataatgatatattaaacaacgacatcgactcggtccgcactagcctgaggtaa

SEQ ID NO: 9090 - DNA, 177 bp, synthetic construct
  misc_feature 1..177: note = Synthetic
  source 1..177: mol_type = other DNA
gtgttagaaatggatgaagcatattactctggtaacttggaatcggtactcggatacgtgtccgatatgcataccgaactcgcgtcaaaatctcaactaatcattgcaaagatagaaactatagataatgatatattaaacaacgacatcgactcggtccgcactagcctgaggtaa

SEQ ID NO: 9091 - DNA, 168 bp, synthetic construct
  source 1..168: mol_type = other DNA
  misc_feature 1..168: note = Synthetic
atgctgctgtttttactttgccttcttttctgctctgcctatgccgccgtgccagaaaaaacccttaacaacctcgttcgggtgtacgccttagttggtaccaatctatcccttgattctatgaaaactcctcagattgacgactcggtccgcactagcctgaggtaa

SEQ ID NO: 9092 - DNA, 30 bp, synthetic construct
  source 1..30: mol_type = other DNA
  misc_feature 1..30: note = Synthetic
ttggtaccaatctatcccttgattctatga

SEQ ID NO: 9093 - DNA, 144 bp, synthetic construct
  source 1..144: mol_type = other DNA
  misc_feature 1..144: note = Synthetic
gtgccacccactacgacctgcataaccagtaagaagatagcagtgatgtcaaacgacgcagctgacttcttttctttcacgacttccccacacccagcatgcatacctttccgccacgactcggtccgcactagcctgaggtaa

SEQ ID NO: 9094 - DNA, 36 bp, synthetic construct
  source 1..36: mol_type = other DNA
  misc_feature 1..36: note = Synthetic
atgcatacctttccgccacgactcggtccgcactag

SEQ ID NO: 9095 - DNA, 174 bp, synthetic construct
  misc_feature 1..174: note = Synthetic
  source 1..174: mol_type = other DNA
atccgggcccgtgtttttaaggacgaggaaatctacgcgtactgcggcgcgcaccccgaagagccgcgctgtcgctgcctgtaccccgagcccagcgtggaggccatcgggcgcgacctgcggctgccgtactactgctggtacgacgactcggtccgcactagcctgaggtaa

SEQ ID NO: 9096 - DNA, 123 bp, synthetic construct
  source 1..123: mol_type = other DNA
  misc_feature 1..123: note = Synthetic
atgaaaaaacaagcttttgcgcgagagctacagcgcccgtgcaacaggagcattccttgtcctggcaatcctggtacgcgcgcgcgctcaccctgcacgctacggctgccggcccccggatga

SEQ ID NO: 9097 - DNA, 114 bp, synthetic construct
  source 1..114: mol_type = other DNA
  misc_feature 1..114: note = Synthetic
atgctcttcacgtccacgcaggacaagatcaagctcatcctggcgagcaagcccgacgtgcactggaccactttcctcgacactttctttagctcggcaccgacggtactctaa

SEQ ID NO: 9098 - DNA, 165 bp, synthetic construct
  source 1..165: mol_type = other DNA
  misc_feature 1..165: note = Synthetic
atgtcgctgctaacaccagcagtacttttgacccagaggtcgcatacgctaactttaagcgtgtccacaccactgggcttagttatgaccacatacgaatcttctacattaaaggacgcgagattaaaactagtctccgactcggtccgcactagcctgaggtaa

SEQ ID NO: 9099 - DNA, 51 bp, synthetic construct
  misc_feature 1..51: note = Synthetic
  source 1..51: mol_type = other DNA
atggactttgagcacctgggcaataaaataggggtaatgtggtttttgtga

SEQ ID NO: 9100 - DNA, 21 bp, synthetic construct
  source 1..21: mol_type = other DNA
  misc_feature 1..21: note = Synthetic
atgcgccttcttccccgctga

SEQ ID NO: 9101 - DNA, 144 bp, synthetic construct
  source 1..144: mol_type = other DNA
  misc_feature 1..144: note = Synthetic
gtgccacccactacgacctgcataaccagtaagaagatagcagtggcctcaaacgacgcagctgacttcttttctttcacgacttccccacacccagcatgcatacctttccgccacgactcggtccgcactagcctgaggtaa

SEQ ID NO: 9102 - DNA, 36 bp, synthetic construct
  misc_feature 1..36: note = Synthetic
  source 1..36: mol_type = other DNA
ttgtgtgccacccactacgacctgcataaccagtaa

SEQ ID NO: 9103 - DNA, 111 bp, synthetic construct
  source 1..111: mol_type = other DNA
  misc_feature 1..111: note = Synthetic
atgagtcgttcgttgtactcttatcctaggctttacatgtccgccactagttgccctactaactctctgcggcattcggagtgcattaattggagggcatgccaagagtag

SEQ ID NO: 9104 - DNA, 156 bp, synthetic construct
  misc_feature 1..156: note = Synthetic
  source 1..156: mol_type = other DNA
gtgttttatgcacaatcgctctacagacctatgttgatggtggaaaagaaattaataactaccgccaacactggtttgtctgttagtcgaactatgtttgacctttatgtagattcattgctgaacgtcctcgcgactcggtccgcactagcctga

SEQ ID NO: 9105 - DNA, 72 bp, synthetic construct
  misc_feature 1..72: note = Synthetic
  source 1..72: mol_type = other DNA
atgaagctgataaagctggttttctcggcgccgcagtgttttatgcacaatcgctctacagacctatgttga

SEQ ID NO: 9106 - DNA, 57 bp, synthetic construct
  source 1..57: mol_type = other DNA
  misc_feature 1..57: note = Synthetic
ctggttttctcggcgccgcagtgttttatgcacaatcgctctacagacctatgttga

SEQ ID NO: 9107 - DNA, 174 bp, synthetic construct
  source 1..174: mol_type = other DNA
  misc_feature 1..174: note = Synthetic
atggagaccaccgtgaacgcccaccaaatattgcccaaggtcttacataagaggactcttggactctcagcaatgtcaacgaccgaccttgaggcatacttcaaagactgtttgtttaaagactgggaggagttgggggaggagatcgactcggtccgcactagcctgaggtaa

SEQ ID NO: 9108 - DNA, 111 bp, synthetic construct
  source 1..111: mol_type = other DNA
  misc_feature 1..111: note = Synthetic
atgcataccgaactcgcgtcaaaatctcaactaatcattgcaaagatagaaactatagataatgatatattaaacaacgacatcgactcggtccgcactagcctgaggtaa

SEQ ID NO: 9109 - DNA, 132 bp, synthetic construct
  misc_feature 1..132: note = Synthetic
  source 1..132: mol_type = other DNA
gtggccggcttgttgggttcccggatagagtgggggatagtttgttcgtttatcggaacactcaattcagatacatcgtatagccttcaacgcgagagaatgcgggggcctaggactctccgcggccggtag

SEQ ID NO: 9110 - DNA, 207 bp, synthetic construct
  source 1..207: mol_type = other DNA
  misc_feature 1..207: note = Synthetic
ctgtctttcagaccttgttggacatcccgtacaatcaagatgttcctgtatgttgtttgcagtctggcggtttgctttcgaggactattaagcctttctctgcaatcgtctccaaatctctgccctggagtgatttcaacgccttacacgttgacctgtccgtctaatacatccttgcccgactcggtccgcactagcctgaggtaa

SEQ ID NO: 9111 - DNA, 207 bp, synthetic construct
  source 1..207: mol_type = other DNA
  misc_feature 1..207: note = Synthetic
ctgtctttcagaccttgttggacatcccgtacaatcaaggccttcctgtatgttgtttgcagtctggcggtttgctttcgaggactattaagcctttctctgcaatcgtctccaaatctctgccctggagtgatttcaacgccttacacgttgacctgtccgtctaatacatccttgcccgactcggtccgcactagcctgaggtaa

SEQ ID NO: 9112 - DNA, 60 bp, synthetic construct
  source 1..60: mol_type = other DNA
  misc_feature 1..60: note = Synthetic
atgtctctcaaaacccagcagtctgatgaagacaagaacacctctctcctgttggaatga

SEQ ID NO: 9113 - DNA, 168 bp, synthetic construct
  misc_feature 1..168: note = Synthetic
  source 1..168: mol_type = other DNA
atggagaatcatctgccggacatgctgatgtttcccaactgcgtttctgtgtttccctttgagtactcgctggaggacgtgttccgcctccccgaggagcgacggcgcgcgttcgccatggccgtgttcccgctctccaacgactcggtccgcactagcctgaggtaa

SEQ ID NO: 9114 - DNA, 213 bp, synthetic construct
  source 1..213: mol_type = other DNA
  misc_feature 1..213: note = Synthetic
ctgggattttgctcaccactaaatccgtgtacttgtccatttatcgccgagaatcatctgccggacatgctgatgtttcccaactgcgtttctgtgtttccctttgagtactcgctggaggacgtgttccgcctccccgaggagcgacggcgcgcgttcgccatggccgtgttcccgctctccaacgactcggtccgcactagcctgaggtaa

SEQ ID NO: 9115 - DNA, 168 bp, synthetic construct
  misc_feature 1..168: note = Synthetic
  source 1..168: mol_type = other DNA
atggatgaatatgtccaagagttgaaagggcttattagaaagcacattcctgagaggtgcgagtttggacatcaaaaggtcacattcctatctcaggtgcatcccagtcccttgctcacagaaggcttcaagttgctctccgactcggtccgcactagcctgaggtaa

SEQ ID NO: 9116 - DNA, 72 bp, synthetic construct
  source 1..72: mol_type = other DNA
  misc_feature 1..72: note = Synthetic
gtgcatcccagtcccttgctcacagaaggcttcaagttgctctccgactcggtccgcactagcctgaggtaa

SEQ ID NO: 9117 - DNA, 150 bp, synthetic construct
  source 1..150: mol_type = other DNA
  misc_feature 1..150: note = Synthetic
ttgtcattggtccattcctattccaccatgtcacagccagaggtgataccatcactcggtctgatccggcatcattcattttactccataaagtttgtccttgctcatttctctcaggaatcatttccgttatcctcttgtctgctgtaa

SEQ ID NO: 9118 - DNA, 141 bp, synthetic construct
  misc_feature 1..141: note = Synthetic
  source 1..141: mol_type = other DNA
atcactcggtctgatccggcatcattcattttactccataaagtttgtccttgctcatttctctcaggaatcatttccgttatcctcttgtctgctgtaattggatatttcattgccatcatccgactcggtccgcactag

SEQ ID NO: 9119 - DNA, 90 bp, synthetic construct
  source 1..90: mol_type = other DNA
  misc_feature 1..90: note = Synthetic
atgttcgaactaatacatctgaaacatacgataaagaaaaagattgttggacattggataatggtcacgtgttaccacgcaattatataa

SEQ ID NO: 9120 - DNA, 138 bp, synthetic construct
  misc_feature 1..138: note = Synthetic
  source 1..138: mol_type = other DNA
atgcaccggcccagccagtcggacaccggaacccaccagaggcggaagccgccttcgcccgtgagggtgcgtgtgttttctggtggcgtgtttttcctttccgccctcctcgactcggtccgcactagcctgaggtaa

SEQ ID NO: 9121 - DNA, 63 bp, synthetic construct
  source 1..63: mol_type = other DNA
  misc_feature 1..63: note = Synthetic
gtgtgttttctggtggcgtgtttttcctttccgccctcctcgactcggtccgcactagcctga

SEQ ID NO: 9122 - DNA, 39 bp, synthetic construct
  source 1..39: mol_type = other DNA
  misc_feature 1..39: note = Synthetic
ctgatagggtgcttgcgagtgccccgggaggtctcgtag

SEQ ID NO: 9123 - DNA, 168 bp, synthetic construct
  misc_feature 1..168: note = Synthetic
  source 1..168: mol_type = other DNA
atgagcacacttcctaaacctcaaagaaaaaccaaaagaaacaccaaccgtcgcccaatggacgtcaagttcccgggcggcggccagatcgttggtggagtttacttgctgccgcgcaggggcccacgattgggtgtgcgcgactcggtccgcactagcctgaggtaa

SEQ ID NO: 9124 - DNA, 132 bp, synthetic construct
  misc_feature 1..132: note = Synthetic
  source 1..132: mol_type = other DNA
attaccaaaagaaacaccgtccgtcgcccacagaacgttaagttcccgggtggcgggcagatcgttggcggagtctacttgttgccgcgcaggggccctagattgggtgtgcgccgactcggtccgcactag

SEQ ID NO: 9125 - DNA, 207 bp, synthetic construct
  misc_feature 1..207: note = Synthetic
  source 1..207: mol_type = other DNA
gtgttctataaacttatcatgtcgaaccttaatgcattagacaacattgtagtgacagacgctattcgccttataacggcgctagttacggacagatttcccgaacatgtacgtttacgtgggatgtctcggccatccgtgtccgcgataaaggtcagccggtcatttccgtggggcgcaaaagctacacgactcggtccgcactag

SEQ ID NO: 9126 - DNA, 27 bp, synthetic construct
  misc_feature 1..27: note = Synthetic
  source 1..27: mol_type = other DNA
atgatgatgttcaatgtctgttggtga

SEQ ID NO: 9127 - DNA, 87 bp, synthetic construct
  source 1..87: mol_type = other DNA
  misc_feature 1..87: note = Synthetic
atggcctctttttccggcacatgctgcacggcggtgatggcatacgtgccgtcgtcgttctcaccgactcggtccgcactagcctga

SEQ ID NO: 9128 - DNA, 135 bp, synthetic construct
  source 1..135: mol_type = other DNA
  misc_feature 1..135: note = Synthetic
aagaaaaccaaaagaaacaccaaccgtcgcccaatggacgtcaagttcccgggcggcggccagatcgttggtggagtttacttgctgccgcgcaggggcccacgattgggtgtgcgccgactcggtccgcactag

SEQ ID NO: 9129 - DNA, 189 bp, synthetic construct
  misc_feature 1..189: note = Synthetic
  source 1..189: mol_type = other DNA
aggtctcgtagaccgtgcaacgccagcacacttcctaaacctcaaagaaaaaccaaaagaaacaccaaccgtcgcccaatggacgtcaagttcccgggcggcggccagatcgttggtggagtttacttgctgccgcgcaggggcccacgattgggtgtgcgcgactcggtccgcactagcctgaggtaa

SEQ ID NO: 9130 - DNA, 162 bp, synthetic construct
  source 1..162: mol_type = other DNA
  misc_feature 1..162: note = Synthetic
acgaatcctaaacctcaaagaaaaccaaaagaaacaccaaccgccgcccacaggacgtcaagttcccgggcggtggtcagatcgttggtggagtttacttgttgccgcgcaggggccctaaattgggtgtgcgccgactcggtccgcactagcctgaggtaa

SEQ ID NO: 9131 - DNA, 162 bp, synthetic construct
  source 1..162: mol_type = other DNA
  misc_feature 1..162: note = Synthetic
acgaatcctaaacctcaaagaaaaccaaacgtaacaccaaccgtcgcccacaggacgtcaagttcccgggtggcggtcagatcgttggtggagtttacttgttgccgcgcaggggccctagattgggtgtgcgccgactcggtccgcactagcctgaggtaa

SEQ ID NO: 9132 - DNA, 15 bp, synthetic construct
  source 1..15: mol_type = other DNA
  misc_feature 1..15: note = Synthetic
atgttccgcttttga

SEQ ID NO: 9133 - DNA, 171 bp, synthetic construct
  misc_feature 1..171: note = Synthetic
  source 1..171: mol_type = other DNA
atcgccattcgctgcttgaggctgaaggtggagggcgctctggagcagatttttacaatggccggacttaatattcgggatttgcttagagacatattgataaggtggcgagatgaaaattatttgggcatggttgaaggtgccgactcggtccgcactagcctgaggtaa

SEQ ID NO: 9134 - DNA, 84 bp, synthetic construct
  misc_feature 1..84: note = Synthetic
  source 1..84: mol_type = other DNA
atgcggagtatcggtactgcggttctgggcggaacagcatacggagtaaaaaacagaagaaacaagtcagcggcgcccgggtga

SEQ ID NO: 9135 - DNA, 39 bp, synthetic construct
  source 1..39: mol_type = other DNA
  misc_feature 1..39: note = Synthetic
atggtgtccatcgtggacgaacgactcggtccgcactag

SEQ ID NO: 9136 - DNA, 45 bp, synthetic construct
  misc_feature 1..45: note = Synthetic
  source 1..45: mol_type = other DNA
atggagctaatggatccactgctgaacagttatcaaaatatgtag

SEQ ID NO: 9137 - DNA, 168 bp, synthetic construct
  source 1..168: mol_type = other DNA
  misc_feature 1..168: note = Synthetic
atggatatcttcagggaaatcgcatcttctatgaaaggagagaatgtattcatttctccagcgtcaatctcgtcagtattgacaatactgtattatggagctaatggatccactgctgaacagctatcaaaatatgtagacgactcggtccgcactagcctgaggtaa

SEQ ID NO: 9138 - DNA, 180 bp, synthetic construct
  source 1..180: mol_type = other DNA
  misc_feature 1..180: note = Synthetic
atatcgattactgccgatatcttcagggaaatcgcatcttctatgaaaggagagaatgtattcatttctccagcgtcaatctcgtcagtattgacaatactgtattatggagctaatggatccactgctgaacagctatcaaaatatgtagacgactcggtccgcactagcctgaggtaa

SEQ ID NO: 9139 - DNA, 66 bp, synthetic construct
  misc_feature 1..66: note = Synthetic
  source 1..66: mol_type = other DNA
atgacggcgatccatcctattataatgatgattttaaaaagcttatattgtttgatgaattggtag

SEQ ID NO: 9140 - DNA, 168 bp, synthetic construct
  source 1..168: mol_type = other DNA
  misc_feature 1..168: note = Synthetic
atggttatctcaaacgagaaagaaaaatttccaatctcagggacaaaggactggataaattcatacttgataaacccaatgatatcaccagtggttgtgtatgaatggaaagatgacattgctgatctgggaatgataaccgactcggtccgcactagcctgaggtaa

SEQ ID NO: 9141 - DNA, 162 bp, synthetic construct
  source 1..162: mol_type = other DNA
  misc_feature 1..162: note = Synthetic
atctcaaacgagaaagaaaaatttccaatctcagggacaaaggactggataaattcatacttgataaacccaatgatatcaccagtggttgtgtatgaatggaaagatgacattgctgatctgggaatgataaccgactcggtccgcactagcctgaggtaa

SEQ ID NO: 9142 - DNA, 21 bp, synthetic construct
  misc_feature 1..21: note = Synthetic
  source 1..21: mol_type = other DNA
atgaagaagaagtacacgtag

SEQ ID NO: 9143 - DNA, 105 bp, synthetic construct
  source 1..105: mol_type = other DNA
  misc_feature 1..105: note = Synthetic
gtgttgcagatcaagaagaggcgccgcttcgcgcgttccaggtcgccgtcgcgcgccgcctgttccagcaccaggaagatgacgcaccgactcggtccgcactag

SEQ ID NO: 9144 - DNA, 168 bp, synthetic construct
  misc_feature 1..168: note = Synthetic
  source 1..168: mol_type = other DNA
atgagcacaaatcctaaacctcaaagaaaaccaaaagaaacaccaaccgtcgcccacaagacgttaagtttccgggcggcggccagatcgttggcggagtatacttgttgccgcgcaggggccccaggttgggtgtgcgccgactcggtccgcactagcctgaggtaa

SEQ ID NO: 9145 - DNA, 18 bp, synthetic construct
  source 1..18: mol_type = other DNA
  misc_feature 1..18: note = Synthetic
attggggtgatcctgtag

SEQ ID NO: 9146 - DNA, 45 bp, synthetic construct
  source 1..45: mol_type = other DNA
  misc_feature 1..45: note = Synthetic
atgttattcggagtcgggtggctcgagaggtgggggatatattaa

SEQ ID NO: 9147 - DNA, 42 bp, synthetic construct
  source 1..42: mol_type = other DNA
  misc_feature 1..42: note = Synthetic
ttggagtcgatgctagtgatggaaatgaataaacatttttga

SEQ ID NO: 9148 - DNA, 21 bp, synthetic construct
  misc_feature 1..21: note = Synthetic
  source 1..21: mol_type = other DNA
atgtttgtaaagggccgctaa

SEQ ID NO: 9149 - DNA, 54 bp, synthetic construct
  source 1..54: mol_type = other DNA
  misc_feature 1..54: note = Synthetic
ataagcatgctaaaaacaacatctacccaaacgactcggtccgcactagcctga

SEQ ID NO: 9150 - DNA, 168 bp, synthetic construct
  misc_feature 1..168: note = Synthetic
  source 1..168: mol_type = other DNA
atgattcgctgcttgaggctgaaggtggagggcgctctggagcagatttttacaatggccggacttaatattcgggatttgcttagagacatattgataaggtggcgagatgaaaattatttgggcatggttgaaggtgccgactcggtccgcactagcctgaggtaa

SEQ ID NO: 9151 - DNA, 168 bp, synthetic construct
  source 1..168: mol_type = other DNA
  misc_feature 1..168: note = Synthetic
atgagcacgaatcctaaacctcaaagaaaaccaaaagaaacaccaaccgccgcccacaggacgtcaagttcccgggcggtggtcagatcgttggtggagtttacttgttgccgcgcaggggccctaaattgggtgtgcgccgactcggtccgcactagcctgaggtaa

SEQ ID NO: 9152 - DNA, 195 bp, synthetic construct
  source 1..195: mol_type = other DNA
  misc_feature 1..195: note = Synthetic
ctgcatctgtatctagcactacacaagaagtatccattcctgaatctactacatacacccccgcacagacctccacccttgtgtcctcaagcaccaaggaagacgcagtgcaaacgccgcctaggaaacgagcacgaggagtccaacagtccccttgcaacgccttgtgtgtcgactcggtccgcactagcctga

SEQ ID NO: 9153 - DNA, 183 bp, synthetic construct
  source 1..183: mol_type = other DNA
  misc_feature 1..183: note = Synthetic
ttgaagcatatgaagatggccccaaccaaaagaaaaggagagtgtccaggggcagctcccaaaaagccaaaggaacccgtgcaagtgccaaaactactaataaaaggaggagtagaagttctagaagttaaaactggggtagatgctattacagacgactcggtccgcactagcctgaggtaa

SEQ ID NO: 9154 - DNA, 174 bp, synthetic construct
  source 1..174: mol_type = other DNA
  misc_feature 1..174: note = Synthetic
atgaaggccgccccaaccaaaagaaaaggagagtgtccaggggcagctcccaaaaagccaaaggaacccgtgcaagtgccaaaactactaataaaaggaggagtagaagttctagaagttaaaactggggtagatgctattacagacgactcggtccgcactagcctgaggtaa

SEQ ID NO: 9155 - DNA, 12 bp, synthetic construct
  source 1..12: mol_type = other DNA
  misc_feature 1..12: note = Synthetic
atgggagcttaa

SEQ ID NO: 9156 - DNA, 114 bp, synthetic construct
  source 1..114: mol_type = other DNA
  misc_feature 1..114: note = Synthetic
atcgtcgccgactccaggagcttcatcacccccgagttcccccgggacttctggatgttgcccgtgttcaacatcccccgggagaccgactcggtccgcactagcctgaggtaa

SEQ ID NO: 9157 - DNA, 57 bp, synthetic construct
  misc_feature 1..57: note = Synthetic
  source 1..57: mol_type = other DNA
atgcaccaagctgtcatcgagcccgaaacccttattgttaatccctgccccgactga

SEQ ID NO: 9158 - DNA, 57 bp, synthetic construct
  source 1..57: mol_type = other DNA
  misc_feature 1..57: note = Synthetic
ctggatatgactttggggcggaaaaatcagtttggctcgactagacaggtaggataa

SEQ ID NO: 9159 - DNA, 162 bp, synthetic construct
  source 1..162: mol_type = other DNA
  misc_feature 1..162: note = Synthetic
ctggttaccgaggcactcgctactatcgcagccgaaacagtacctcccgccgtcgccgcaagacacctgcaaatcgcagtcgtcgccgtagacgcacaagcaaaccgactcccggcgccctggtgcggcaagtgtaccgcaatggtagtgcggaacctttga

SEQ ID NO: 9160 - DNA, 189 bp, synthetic construct
  misc_feature 1..189: note = Synthetic
  source 1..189: mol_type = other DNA
acgctcggatcaccctttattatggcacgatcgggattggataggatcgacataagcccccagccagccaaaaaaattgcccgtgtgggaggtctacagcacccttttgtaaaaacggatattaacacgattaacgttgaacaccattttatagacacgctcgactcggtccgcactagcctgaggtaa

SEQ ID NO: 9161 - DNA, 57 bp, synthetic construct
  source 1..57: mol_type = other DNA
  misc_feature 1..57: note = Synthetic
ataattcagaaatacgctcggatcaccctttattgccgcacgatcgggattggatag

SEQ ID NO: 9162 - DNA, 189 bp, synthetic construct
  misc_feature 1..189: note = Synthetic
  source 1..189: mol_type = other DNA
acgctcggatcaccctttattgccgcacgatcgggattggataggatcgacataagcccccagccagccaaaaaaattgcccgtgtgggaggtctacagcacccttttgtaaaaacggatattaacacgattaacgttgaacaccattttatagacacgctcgactcggtccgcactagcctgaggtaa

SEQ ID NO: 9163 - DNA, 21 bp, synthetic construct
  misc_feature 1..21: note = Synthetic
  source 1..21: mol_type = other DNA
atgtcaaagaggttaaattga

SEQ ID NO: 9164 - DNA, 114 bp, synthetic construct
  source 1..114: mol_type = other DNA
  misc_feature 1..114: note = Synthetic
atggtgttaaaaagcctgttaaggtggaaggtagtgtggttgttaatgatcccactagcgaaaccaaagttgttaaaagtttgtctattgttgatgtctatgatatgttcctga

SEQ ID NO: 9165 - DNA, 15 bp, synthetic construct
  misc_feature 1..15: note = Synthetic
  source 1..15: mol_type = other DNA
gtgatgaacatataa

SEQ ID NO: 9166 - DNA, 30 bp, synthetic construct
  source 1..30: mol_type = other DNA
  misc_feature 1..30: note = Synthetic
atgattgcgactcggtccgcactagcctga

SEQ ID NO: 9167 - DNA, 168 bp, synthetic construct
  source 1..168: mol_type = other DNA
  misc_feature 1..168: note = Synthetic
atggaagacatcaatttttcgtcgctggccccgcgacacggcacgcggccgtacatgggcacctggaacgagatcggcacgagccagctgaacgggggcgccttcaattggaacagtatctggagcggtcttaaaaatttcgactcggtccgcactagcctgaggtaa

SEQ ID NO: 9168 - DNA, 168 bp, synthetic construct
  misc_feature 1..168: note = Synthetic
  source 1..168: mol_type = other DNA
attactggtactatgactgttttatgcagactaagccgaagacatcaatttttcgtcgctggccccgcgacacggcacgcggccgtacatgggcacctggaacgagatcggcacgagccagctgaacgggggcgccttcaattggaacagtatctggagcggtcttaa

SEQ ID NO: 9169 - DNA, 144 bp, synthetic construct
  source 1..144: mol_type = other DNA
  misc_feature 1..144: note = Synthetic
ctggccccgcgacacggcacgcggccgtacatgggcacctggaacgagatcggcacgagccagctgaacgggggcgccttcaattggaacagtatctggagcggtcttaaaaatttcgactcggtccgcactagcctgaggtaa

SEQ ID NO: 9170 - DNA, 156 bp, synthetic construct
  source 1..156: mol_type = other DNA
  misc_feature 1..156: note = Synthetic
atggacaagcaacaattacaagaaatggaggaaggttcgaaatcaggtgtcgtcacttggaccgtgactacaccatgccactaccaaatgctactagtaatgataattttcttgattgtattaagtttatcaccgactcggtccgcactagcctga

SEQ ID NO: 9171 - DNA, 45 bp, synthetic construct
  misc_feature 1..45: note = Synthetic
  source 1..45: mol_type = other DNA
attcagcaattgtccaatttaggaaacattctgtttaagagttga

SEQ ID NO: 9172 - DNA, 219 bp, synthetic construct
  source 1..219: mol_type = other DNA
  misc_feature 1..219: note = Synthetic
atgtcgttgtacatggctatttcaccgaagtttactaccagcttgagtctacacaaattactacagacactggtattgaaaatgctacattcttcatctttaacaagcttgttaaagacccaccgaatgtgcaaatacacacaatcgacggctcttcaggagttgctaatccagcaatggatccaatttatcgactcggtccgcactagcctgaggtaa

SEQ ID NO: 9173 - DNA, 219 bp, synthetic construct
  misc_feature 1..219: note = Synthetic
  source 1..219: mol_type = other DNA
atggcagcacagttatatgttctcctgcatctgtatctagcactacacaagaagtatccattcctgaatctactacatacacccccgcacagacctccacccttgtgtcctcaagcaccaaggaagacgcagtgcaaacgccgcctaggaaacgagcacgaggagtccaacagtccccttgcaacgccttgtgtgtcgactcggtccgcactagcctga

SEQ ID NO: 9174 - DNA, 48 bp, synthetic construct
  misc_feature 1..48: note = Synthetic
  source 1..48: mol_type = other DNA
atgattacaagtattatgaatatgcaccggactgtgccggcgaactga

SEQ ID NO: 9175 - DNA, 45 bp, synthetic construct
  source 1..45: mol_type = other DNA
  misc_feature 1..45: note = Synthetic
atggacatgatggggatgagtgattgtgtgttttctcgattgtga

SEQ ID NO: 9176 - DNA, 156 bp, synthetic construct
  source 1..156: mol_type = other DNA
  misc_feature 1..156: note = Synthetic
atgcatcgtttggcgctccgtactcttatgggggcctatccagggtacagccgcgatagtgttcgtcgagaagatgtaactaattcttcattcagatttccaactcaattcaggccaatatgggtcggcgactcggtccgcactagcctgaggtaa

SEQ ID NO: 9177 - DNA, 183 bp, synthetic construct
  source 1..183: mol_type = other DNA
  misc_feature 1..183: note = Synthetic
ttgaagcatatgaagatggccccaacaaaaagaaaaggagaaaggaaggaccccgtgcaagttccaaaacttcttataagaggaggagtagaagttctagaagttaaaactggggttgactcaattacagaggtagaatgctttttaactccagacgactcggtccgcactagcctgaggtaa

SEQ ID NO: 9178 - DNA, 183 bp, synthetic construct
  misc_feature 1..183: note = Synthetic
  source 1..183: mol_type = other DNA
ttgaagcatatgaaggccgccccaacaaaaagaaaaggagaaaggaaggaccccgtgcaagttccaaaacttcttataagaggaggagtagaagttctagaagttaaaactggggttgactcaattacagaggtagaatgctttttaactccagacgactcggtccgcactagcctgaggtaa

SEQ ID NO: 9179 - DNA, 168 bp, synthetic construct
  source 1..168: mol_type = other DNA
  misc_feature 1..168: note = Synthetic
atggacccgtactaccctttcgacgcgctggacgtttgggaacacaggcgcttcatcgtcgccgactccaggagcttcatcacccccgagttcccccgggacttctggatgttgcccgtgttcaacatcccccgggagaccgactcggtccgcactagcctgaggtaa

SEQ ID NO: 9180 - DNA, 39 bp, synthetic construct
  misc_feature 1..39: note = Synthetic
  source 1..39: mol_type = other DNA
atggggaaactaattatagatatttacacactacaataa

SEQ ID NO: 9181 - DNA, 33 bp, synthetic construct
  misc_feature 1..33: note = Synthetic
  source 1..33: mol_type = other DNA
atgatcgcaacgccgacacagatattgctctag

SEQ ID NO: 9182 - DNA, 48 bp, synthetic construct
  source 1..48: mol_type = other DNA
  misc_feature 1..48: note = Synthetic
atgaaaaggatgctaaaattttctcggaggcagtgcagaccgcactaa

SEQ ID NO: 9183 - DNA, 99 bp, synthetic construct
  source 1..99: mol_type = other DNA
  misc_feature 1..99: note = Synthetic
acgaagacgcgtcaacccagagtccaaatgccaaatgggcttgtgttgatgcgcatgatggggatcttgtgcgactcggtccgcactagcctgaggtaa

SEQ ID NO: 9184 - DNA, 168 bp, synthetic construct
  misc_feature 1..168: note = Synthetic
  source 1..168: mol_type = other DNA
atggacatattcgagaccttgagctcttactactccggagtgctgatatgcggcgtgctgctgctgacggccgcctgcgtcttcgccttcgtggatttcagcaagaacaccagcaacatcaccgactacgtgtggcgcgccgactcggtccgcactagcctgaggtaa

SEQ ID NO: 9185 - DNA, 33 bp, synthetic construct
  source 1..33: mol_type = other DNA
  misc_feature 1..33: note = Synthetic
atgaatttgaaaatcattgtcaatgtactgtaa

SEQ ID NO: 9186 - DNA, 42 bp, synthetic construct
  misc_feature 1..42: note = Synthetic
  source 1..42: mol_type = other DNA
ttgaagatgttgttaataagaagcttaaagatgttattgtaa

SEQ ID NO: 9187 - DNA, 165 bp, synthetic construct
  misc_feature 1..165: note = Synthetic
  source 1..165: mol_type = other DNA
atgaccacttctaaaggaaaggggggcggtccccctaggcgcaagcttaaagtgaccgcaaataagtcgcgaccagcaacgagcccaatgccaaagggcttcgtgctgtcgcgcatgctggggattctttggcacgccgactcggtccgcactagcctgaggtaa

SEQ ID NO: 9188 - DNA, 204 bp, synthetic construct
  misc_feature 1..204: note = Synthetic
  source 1..204: mol_type = other DNA
atgtggtatttatggcagggtggagtatttgttcagggccaggtagactttgacccattacgtggaggtttcgattaccgtgttttttacctgaatttccgcgtaccgtgtcaaagtcttctgtttttacgtaggtgtcagctgatcgctagggtatttatacctcagggtttgtgtcaagaggcccgactcggtccgcactag

SEQ ID NO: 9189 - DNA, 60 bp, synthetic construct
  misc_feature 1..60: note = Synthetic
  source 1..60: mol_type = other DNA
atgttaaatcctctacataatgatatagccattttcacgactcggtccgcactagcctga

SEQ ID NO: 9190 - DNA, 207 bp, synthetic construct
  misc_feature 1..207: note = Synthetic
  source 1..207: mol_type = other DNA
ctgccgcggcagaggcgctccgttccgctgctgtttcagatgacctggcattcgtctcggacgtttttgccgccctggcagaattttctgccgccgttgccgaggaagctgcacgaccggcacttgatgatgcgttcgtttctgatgattttgctgcctcttttgaggccaccgcatctcgtgctgaagcgactcggtccgcactag

SEQ ID NO: 9191 - DNA, 180 bp, synthetic construct
  misc_feature 1..180: note = Synthetic
  source 1..180: mol_type = other DNA
ctgctgtttcagatgacctggcattcgtctcggacgtttttgccgccctggcagaattttctgccgccgttgccgaggaagctgcacgaccggcacttgatgatgcgttcgtttctgatgattttgctgcctcttttgaggccaccgcatctcgtgctgaagcgactcggtccgcactag

SEQ ID NO: 9192 - DNA, 144 bp, synthetic construct
  misc_feature 1..144: note = Synthetic
  source 1..144: mol_type = other DNA
atcaaggtagtccccaggagaaaggctaagattatcaaagattatggagagagaaaaacaatggatagtgagggtagtatggagggtgtcagagaggcaaataagcagatggagggggatagtgacttacaagatcaggaataa

SEQ ID NO: 9193 - DNA, 168 bp, synthetic construct
  source 1..168: mol_type = other DNA
  misc_feature 1..168: note = Synthetic
atggagagagaaaaacaatggatagtgagggtagtatggagggtgtcagagaggcaaataagcagatggagggggatagtgacttacaagatcaggaataaacaattgccttgggaatacagacatcattggcaggtgcacgactcggtccgcactagcctgaggtaa

SEQ ID NO: 9194 - DNA, 144 bp, synthetic construct
  misc_feature 1..144: note = Synthetic
  source 1..144: mol_type = other DNA
atcaaggtagtccccaggagaaaggctaagattatcaaagattgccgagagagaaaaacaatggatagtgagggtagtatggagggtgtcagagaggcaaataagcagatggagggggatagtgacttacaagatcaggaataa

SEQ ID NO: 9195 - DNA, 171 bp, synthetic construct
  misc_feature 1..171: note = Synthetic
  source 1..171: mol_type = other DNA
attgccgagagagaaaaacaatggatagtgagggtagtatggagggtgtcagagaggcaaataagcagatggagggggatagtgacttacaagatcaggaataaacaattgccttgggaatacagacatcattggcaggtgcacgactcggtccgcactagcctgaggtaa

SEQ ID NO: 9196 - DNA, 168 bp, synthetic construct
  source 1..168: mol_type = other DNA
  misc_feature 1..168: note = Synthetic
atgagtaaagaaattcccacgccttacatgtggagttatcaaccccaaatgggattggcggcaggcgcctcccaggactactccacccgcatgaattggctcagcgccgggccttctatgatttctcgagttaatgatatcgactcggtccgcactagcctgaggtaa

SEQ ID NO: 9197 - DNA, 156 bp, synthetic construct
  source 1..156: mol_type = other DNA
  misc_feature 1..156: note = Synthetic
attcccacgccttacatgtggagttatcaaccccaaatgggattggcggcaggcgcctcccaggactactccacccgcatgaattggctcagcgccgggccttctatgatttctcgagttaatgatatcgactcggtccgcactagcctgaggtaa

SEQ ID NO: 9198 - DNA, 15 bp, synthetic construct
  misc_feature 1..15: note = Synthetic
  source 1..15: mol_type = other DNA
ctgcaaactccttaa

SEQ ID NO: 9199 - DNA, 39 bp, synthetic construct
  misc_feature 1..39: note = Synthetic
  source 1..39: mol_type = other DNA
atggaatttgtcgactcggtccgcactagcctgaggtaa

SEQ ID NO: 9200 - DNA, 168 bp, synthetic construct
  source 1..168: mol_type = other DNA
  misc_feature 1..168: note = Synthetic
atgtctaaaaaaccaggaggacccgggaagccccgggtcgtcaatatgctaaaacgcggcataccccgcgtattcccactagtgggagtgaagagggtagtaatgaacttgctagatggcagagggccaatacggtttgtcgactcggtccgcactagcctgaggtaa

SEQ ID NO: 9201 - DNA, 150 bp, synthetic construct
  misc_feature 1..150: note = Synthetic
  source 1..150: mol_type = other DNA
atgaaatctctcgctatgacagctttcttcggagagctaaacacgttagatattatggcattgataatgtctatatttaaacgccatccaaacaataccattttttcagtggataaggatggcgactcggtccgcactagcctgaggtaa

SEQ ID NO: 9202 - DNA, 21 bp, synthetic construct
  misc_feature 1..21: note = Synthetic
  source 1..21: mol_type = other DNA
atgaattatctgtttccttaa

SEQ ID NO: 9203 - DNA, 138 bp, synthetic construct
  misc_feature 1..138: note = Synthetic
  source 1..138: mol_type = other DNA
atgggcaattgttttccagcatacttgctaccggaactcacactacatcctttagaatacgaagacaagcctgcgcgtggaaacccgcagatcctcccgtccgtggaaaaacactctattataaaaatgcgcatatga

SEQ ID NO: 9204 - DNA, 168 bp, synthetic construct
  source 1..168: mol_type = other DNA
  misc_feature 1..168: note = Synthetic
atgccgcatcctcgggaagagaattcaatcgtcgttgaactcgaaccctcattggctacatttatcaaacaaggatttaataatctcgtaaaatggcccttgttaaacattggaatagttttgtataatacatctaccgccgactcggtccgcactagcctgaggtaa

SEQ ID NO: 9205 - DNA, 201 bp, synthetic construct
  source 1..201: mol_type = other DNA
  misc_feature 1..201: note = Synthetic
attccaaatcaatcgaacaacatcccgtttatcgccccgcatcctcgggaagagaattcaatcgtcgttgaactcgaaccctcattggctacatttatcaaacaaggatttaataatctcgtaaaatggcccttgttaaacattggaatagttttgtataatacatctaccgccgactcggtccgcactagcctgaggtaa

SEQ ID NO: 9206 - DNA, 57 bp, synthetic construct
  misc_feature 1..57: note = Synthetic
  source 1..57: mol_type = other DNA
atggggagagcgtgcgcgcaaagggtagttttagggatggtggatgtttttacttga

SEQ ID NO: 9207 - DNA, 117 bp, synthetic construct
  misc_feature 1..117: note = Synthetic
  source 1..117: mol_type = other DNA
atgattgacatgctagttttacgattaccgttcatcgattctcttgtttgctccagactctcaagcaatgacctgatagcctttgtagacctctcaaaacgactcggtccgcactag

SEQ ID NO: 9208 - DNA, 117 bp, synthetic construct
  source 1..117: mol_type = other DNA
  misc_feature 1..117: note = Synthetic
atgattgacatgctagttttacgattaccgttcatcgattctcttgtttgctccagactctcaagcaatgacgccatagcctttgtagacctctcaaaacgactcggtccgcactag

SEQ ID NO: 9209 - DNA, 123 bp, synthetic construct
  source 1..123: mol_type = other DNA
  misc_feature 1..123: note = Synthetic
atgctaaaacgcggcataccccgcgtattcccactagtgggagtgaagagggtagtaatgaacttgctagatggcagagggccaatacggtttgtcgactcggtccgcactagcctgaggtaa

SEQ ID NO: 9210 - DNA, 33 bp, synthetic construct
  misc_feature 1..33: note = Synthetic
  source 1..33: mol_type = other DNA
atgctcataacgacgttgtccaccaagccatga

SEQ ID NO: 9211 - DNA, 33 bp, synthetic construct
  source 1..33: mol_type = other DNA
  misc_feature 1..33: note = Synthetic
atgatgcggacgtcacacatagacaaccattga

SEQ ID NO: 9212 - DNA, 84 bp, synthetic construct
  source 1..84: mol_type = other DNA
  misc_feature 1..84: note = Synthetic
atgctcataacgacgttgtccaccaagccgccaaattatccggactataccatgatgcggacgtcacacatagacaaccattga

SEQ ID NO: 9213 - DNA, 165 bp, synthetic construct
  source 1..165: mol_type = other DNA
  misc_feature 1..165: note = Synthetic
acgatccaagttcagaatttgaattgctgtccaggacgttttgtttgtgttcataaaatgacactattaatcatactaatcatttctgctgctgttacagtcattgatcagttatatcaaaagttgccttatgatgacgactcggtccgcactagcctgaggtaa

SEQ ID NO: 9214 - DNA, 201 bp, synthetic construct
  source 1..201: mol_type = other DNA
  misc_feature 1..201: note = Synthetic
atttgggtgcgtgtgtccgagcaagccacggacatgtttgggttgtacttgcgttccgggatcacatgttgtcacatcgagactggtgcgtgtgtaagccgcgctcgcatgcacgcgtgtcgtcgactttgtctggtgtgcacttgcgaagaagacgcgagcacacggctcgtcgactcggtccgcactagcctgaggtaa

SEQ ID NO: 9215 - DNA, 201 bp, synthetic construct
  misc_feature 1..201: note = Synthetic
  source 1..201: mol_type = other DNA
atttgggtgcgtgtgtccgagcaagccacggacgcctttgggttgtacttgcgttccgggatcacatgttgtcacatcgagactggtgcgtgtgtaagccgcgctcgcatgcacgcgtgtcgtcgactttgtctggtgtgcacttgcgaagaagacgcgagcacacggctcgtcgactcggtccgcactagcctgaggtaa

SEQ ID NO: 9216 - DNA, 153 bp, synthetic construct
  misc_feature 1..153: note = Synthetic
  source 1..153: mol_type = other DNA
atggagcagatgttgcatcgtctgtctatatttaatgcgacggatagttgctttaattcctctaggttttcagagttgtctaaattggatatttcgttttctatgtttgtggggctggtggctgttgtcgtctcggaagggatcggtggttga

SEQ ID NO: 9217 - DNA, 180 bp, synthetic construct
  misc_feature 1..180: note = Synthetic
  source 1..180: mol_type = other DNA
aggcacagatttacgatggagcagatattgcatcgtctgtctatatttaatgcgacggataatcgctttaattcctctaggttttcagagctttctaaattggagatttcgttttctatgttcgtggggctggtggctgttgtcgtctcggaaggaattggtggttggggagtgaggtag

SEQ ID NO: 9218 - DNA, 216 bp, synthetic construct
  misc_feature 1..216: note = Synthetic
  source 1..216: mol_type = other DNA
acggagagctatcgtgctgagcggaacagagctttggctgtgacgaagatggatgtgtggaagcgtcaacggcttcaagaatgccgtgaattgtgtcctttgcctgtattaatgtcactgtcgaatatgttttcaaaaatcgaaatcgtatacgttaaatatctatttaaaatggacttttctactatcgactcggtccgcactagcctgaggtaa

SEQ ID NO: 9219 - DNA, 45 bp, synthetic construct
  source 1..45: mol_type = other DNA
  misc_feature 1..45: note = Synthetic
atacggagagctatcgtgctgagcggaacagagctttggctgtga

SEQ ID NO: 9220 - DNA, 216 bp, synthetic construct
  source 1..216: mol_type = other DNA
  misc_feature 1..216: note = Synthetic
acggagagctatcgtgctgagcggaacagagctttggctgtgacgaaggccgatgtgtggaagcgtcaacggcttcaagaatgccgtgaattgtgtcctttgcctgtattaatgtcactgtcgaatatgttttcaaaaatcgaaatcgtatacgttaaatatctatttaaaatggacttttctactatcgactcggtccgcactagcctgaggtaa

SEQ ID NO: 9221 - DNA, 45 bp, synthetic construct
  misc_feature 1..45: note = Synthetic
  source 1..45: mol_type = other DNA
atggacttttctactatcgactcggtccgcactagcctgaggtaa

SEQ ID NO: 9222 - DNA, 117 bp, synthetic construct
  misc_feature 1..117: note = Synthetic
  source 1..117: mol_type = other DNA
atctattcacatcttttgcttgtcgctgcaggtatggaggcgcaatttttgtacctctatgccttgatatattttctacaatgcatcaacgcatcgactcggtccgcactagcctga

SEQ ID NO: 9223 - DNA, 54 bp, synthetic construct
  source 1..54: mol_type = other DNA
  misc_feature 1..54: note = Synthetic
atattttctacaatgcatcaacgcatcgactcggtccgcactagcctgaggtaa

SEQ ID NO: 9224 - DNA, 177 bp, synthetic construct
  misc_feature 1..177: note = Synthetic
  source 1..177: mol_type = other DNA
atttttataatggccgggctactaagtacttttgacacatttagttccaggagaagtgagagcatcaataagtctggcggaggagcaattatacctggtcaaagaagtaccgtttctgtcttcacattaggcccgagtgtgacagatgacgactcggtccgcactagcctgaggtaa

SEQ ID NO: 9225 - DNA, 168 bp, synthetic construct
  misc_feature 1..168: note = Synthetic
  source 1..168: mol_type = other DNA
atggcagggttattaagtgtctttgacacatttagttctaaaaggagtgagagcataaatagaggaggtggtggtgcggttatacctggacaaaagaacaccgtctcagtatttgttctaggctcaagtattgtagacgacgactcggtccgcactagcctgaggtaa

SEQ ID NO: 9226 - DNA, 192 bp, synthetic construct
  source 1..192: mol_type = other DNA
  misc_feature 1..192: note = Synthetic
ttgatttctaagcatagtgccaaagccgcagggttattaagtgtctttgacacatttagttctaaaaggagtgagagcataaatagaggaggtggtggtgcggttatacctggacaaaagaacaccgtctcagtatttgttctaggctcaagtattgtagacgacgactcggtccgcactagcctgaggtaa

SEQ ID NO: 9227 - DNA, 24 bp, synthetic construct
  misc_feature 1..24: note = Synthetic
  source 1..24: mol_type = other DNA
atggccgcgagacggcacctttaa

SEQ ID NO: 9228 - DNA, 159 bp, synthetic construct
  misc_feature 1..159: note = Synthetic
  source 1..159: mol_type = other DNA
agggagtccatcctcgcgagcatcgtgccgaagatccgcgcgtacatgcgcgacccgaacacggccaccaagtcctacacggacttcatcgccgacaacaagtccatcttcgtggtcaacctgtacaacgtcgactcggtccgcactagcctgaggtaa

SEQ ID NO: 9229 - DNA, 150 bp, synthetic construct
  source 1..150: mol_type = other DNA
  misc_feature 1..150: note = Synthetic
atcctcgcgagcatcgtgccgaagatccgcgcgtacatgcgcgacccgaacacggccaccaagtcctacacggacttcatcgccgacaacaagtccatcttcgtggtcaacctgtacaacgtcgactcggtccgcactagcctgaggtaa

SEQ ID NO: 9230 - DNA, 129 bp, synthetic construct
  misc_feature 1..129: note = Synthetic
  source 1..129: mol_type = other DNA
gtggcctccctttacatatgtcaatctctaaattgcatgcactggatgatgttactcgcaattacatcattacaatgccatgctttagaacttaccctcaacaaatgtttgttactcctttggccgtag

SEQ ID NO: 9231 - DNA, 129 bp, synthetic construct
  misc_feature 1..129: note = Synthetic
  source 1..129: mol_type = other DNA
gtggcctccctttacatatgtcaatctctaaattgcatgcactggatgatgttactcgcaattacatcattacaatgccatgctttagaacttatcctcaacaaatgtttgttactcctttggccgtag

SEQ ID NO: 9232 - DNA, 39 bp, synthetic construct
  source 1..39: mol_type = other DNA
  misc_feature 1..39: note = Synthetic
ttgtttataatttcgctaccttattacctctggtactaa

SEQ ID NO: 9233 - DNA, 168 bp, synthetic construct
  misc_feature 1..168: note = Synthetic
  source 1..168: mol_type = other DNA
atgaagaagaaggagtcgggagtagtggagagaggacgcggtacgcgccctccgaccaaccgtggaggaaaagttcctccgaagaaggaaagagatcgaggaggccaagtggtttcacgctctgggaatccaagttccaccgactcggtccgcactagcctgaggtaa

SEQ ID NO: 9234 - DNA, 33 bp, synthetic construct
  source 1..33: mol_type = other DNA
  misc_feature 1..33: note = Synthetic
gtggcactgccaagaagaaggagtcgggagtag

SEQ ID NO: 9235 - DNA, 54 bp, synthetic construct
  source 1..54: mol_type = other DNA
  misc_feature 1..54: note = Synthetic
attgcactcctcggatttcgatttagaaaacagctgtacgactgtcttccataa

SEQ ID NO: 9236 - DNA, 168 bp, synthetic construct
  source 1..168: mol_type = other DNA
  misc_feature 1..168: note = Synthetic
atggaatattgggggcacacaaacaatccagacaagattaaccggaaagtcggtgtagatcaggtgagagacagaagcaaaacactaaaaatcataacattcatcatatccatgatgacatcaatcatgagtacagtcgccgactcggtccgcactagcctgaggtaa

SEQ ID NO: 9237 - DNA, 48 bp, synthetic construct
  source 1..48: mol_type = other DNA
  misc_feature 1..48: note = Synthetic
atgatatttctttcaggccacctcgctatggttacctgcaactggtaa

SEQ ID NO: 9238 - DNA, 57 bp, synthetic construct
  source 1..57: mol_type = other DNA
  misc_feature 1..57: note = Synthetic
atgacttctgattcaaaaagtatcgaaaacaaacatcagcgactcggtccgcactag

SEQ ID NO: 9239 - DNA, 126 bp, synthetic construct
  misc_feature 1..126: note = Synthetic
  source 1..126: mol_type = other DNA
aagttcttagagttttcgaatagagtatacgaagctctctattacgttcactcgttgctttattctagtatgacttctgattcgaaaagtatcgaaaacaaacatcagcgactcggtccgcactag

SEQ ID NO: 9240 - DNA, 21 bp, synthetic construct
  source 1..21: mol_type = other DNA
  misc_feature 1..21: note = Synthetic
atgaaaatcaatggcggataa

SEQ ID NO: 9241 - DNA, 168 bp, synthetic construct
  source 1..168: mol_type = other DNA
  misc_feature 1..168: note = Synthetic
atggagggatctaaacgcaaacacgacagtcggcgaccacaacaagaacaggagcagcatcgtccacgtacaccgccatcatatgaagaaattgcaaaatatggacactcatttaacgtgaaaagatttacgaatgaagacgactcggtccgcactagcctgaggtaa

SEQ ID NO: 9242 - DNA, 171 bp, synthetic construct
  misc_feature 1..171: note = Synthetic
  source 1..171: mol_type = other DNA
atagccgagggatctaaacgcaaacacgacagtcggcgaccacaacaagaacaggagcagcatcgtccacgtacaccgccatcatatgaagaaattgcaaaatatggacactcatttaacgtgaaaagatttacgaatgaagacgactcggtccgcactagcctgaggtaa

SEQ ID NO: 9243 - DNA, 36 bp, synthetic construct
  misc_feature 1..36: note = Synthetic
  source 1..36: mol_type = other DNA
atgatttttttatcgactcggtccgcactagcctga

SEQ ID NO: 9244 - DNA, 189 bp, synthetic construct
  misc_feature 1..189: note = Synthetic
  source 1..189: mol_type = other DNA
atcccagtcttcacaggcgcaaacgtaaaagaaaatatttgtgatttgcattcgaggccgcagtgtggcactcggctaatggtaaagtatatcttccaccatcgacaccggtggccagagtccaaagcaccgatgaatacattcaaagaacaaatatctactatcatgcatttagtgacagattgttaa

SEQ ID NO: 9245 - DNA, 168 bp, synthetic construct
  source 1..168: mol_type = other DNA
  misc_feature 1..168: note = Synthetic
atggcttctagcattatggcaggcatagcaggcgatgtgctaggctcagttgtgggtggattagttggagccggtgctaacgccataaaccaatctgttgaatttgggtacaaccaagcactgcaatctaatgctttccacgactcggtccgcactagcctgaggtaa

SEQ ID NO: 9246 - DNA, 153 bp, synthetic construct
  source 1..153: mol_type = other DNA
  misc_feature 1..153: note = Synthetic
atggcaggcatagcaggcgatgtgctaggctcagttgtgggtggattagttggagccggtgctaacgccataaaccaatctgttgaatttgggtacaaccaagcactgcaatctaatgctttccacgactcggtccgcactagcctgaggtaa

SEQ ID NO: 9247 - DNA, 24 bp, synthetic construct
  source 1..24: mol_type = other DNA
  misc_feature 1..24: note = Synthetic
gtgtacgaacacaacacgaagtag

SEQ ID NO: 9248 - DNA, 204 bp, synthetic construct
  source 1..204: mol_type = other DNA
  misc_feature 1..204: note = Synthetic
gtgaggtttccggccttgtctagggtaagaccgctgcccattttaagcgcaagcatgccgtgggaggtgtccaaaggttcggagacgcgtagagagagaactccagggggactttcttggaaaccattgggtgaaacaaatggaggggtaagaaagggcacagttggaggcccggtttctgtgtcacgactcggtccgcactag

SEQ ID NO: 9249 - DNA, 36 bp, synthetic construct
  source 1..36: mol_type = other DNA
  misc_feature 1..36: note = Synthetic
ttgaaaatctgtaacactgatcatgatgggatatga

SEQ ID NO: 9250 - DNA, 168 bp, synthetic construct
  misc_feature 1..168: note = Synthetic
  source 1..168: mol_type = other DNA
atgatgggatatgaggaaaaagtgtcagctactggaaagactcgtttaaagatactggcatgtctgatcgttttaatactagctgcggcaataactatgttaacgctggaaattatatcgaaccaaaaacgtaccactaccgactcggtccgcactagcctgaggtaa

SEQ ID NO: 9251 - DNA, 36 bp, synthetic construct
  misc_feature 1..36: note = Synthetic
  source 1..36: mol_type = other DNA
ttgaaaatctgtaacactgatcgccatgggatatga

SEQ ID NO: 9252 - DNA, 174 bp, synthetic construct
  misc_feature 1..174: note = Synthetic
  source 1..174: mol_type = other DNA
ctgatcgccatgggatatgaggaaaaagtgtcagctactggaaagactcgtttaaagatactggcatgtctgatcgttttaatactagctgcggcaataactatgttaacgctggaaattatatcgaaccaaaaacgtaccactaccgactcggtccgcactagcctgaggtaa

SEQ ID NO: 9253 - DNA, 177 bp, synthetic construct
  source 1..177: mol_type = other DNA
  misc_feature 1..177: note = Synthetic
ctgaccataatggggaaaaaatcatctactggaactggaaaaactaatctaaagatactggcatgtctactattgatatttctaatggcaacaatatttttgctaatactggaaattatatcgggccaaagatattccaatgatgattccgactcggtccgcactagcctgaggtaa

SEQ ID NO: 9254 - DNA, 177 bp, synthetic construct
  misc_feature 1..177: note = Synthetic
  source 1..177: mol_type = other DNA
ctgaccatagccgggaaaaaatcatctactggaactggaaaaactaatctaaagatactggcatgtctactattgatatttctaatggcaacaatatttttgctaatactggaaattatatcgggccaaagatattccaatgatgattccgactcggtccgcactagcctgaggtaa

SEQ ID NO: 9255 - DNA, 36 bp, synthetic construct
  misc_feature 1..36: note = Synthetic
  source 1..36: mol_type = other DNA
attcccaacccgcgctaccaccctagcatcctttaa

SEQ ID NO: 9256 - DNA, 150 bp, synthetic construct
  source 1..150: mol_type = other DNA
  misc_feature 1..150: note = Synthetic
gtgcgccttcccgttccgcactatcgaggaagatctcgtcgtaggagaggcatggcgggtagtggtcgccggcgggctttgcgcaggcgcatgaaaggcggaattttacccgctctgatacccgactcggtccgcactagcctgaggtaa

SEQ ID NO: 9257 - DNA, 30 bp, synthetic construct
  source 1..30: mol_type = other DNA
  misc_feature 1..30: note = Synthetic
atgactctgccgttttgcaggccgctctga

SEQ ID NO: 9258 - DNA, 174 bp, synthetic construct
  source 1..174: mol_type = other DNA
  misc_feature 1..174: note = Synthetic
ttgcaggccgctctgacttgccgcgtgcgccttcccgttccgcactatcgaggaagatctcgtcgtaggagaggcatggcgggtagtggtcgccggcgggctttgcgcaggcgcatgaaaggcggaattttacccgctctgatacccgactcggtccgcactagcctgaggtaa

SEQ ID NO: 9259 - DNA, 114 bp, synthetic construct
  misc_feature 1..114: note = Synthetic
  source 1..114: mol_type = other DNA
atgttgaagcgttcagtttatttcgggcgtgaagcaccagccagtcaaggtaaagcttggctctgcgggccgttgatagctgtagtcttgtgccgctttcgtaggaactcatag

SEQ ID NO: 9260 - DNA, 81 bp, synthetic construct
  source 1..81: mol_type = other DNA
  misc_feature 1..81: note = Synthetic
ctgatgggctgcgacgggtgtgcttgtttaggaaggctcggccctcaacggtctagctcgactcggtccgcactagcctga

SEQ ID NO: 9261 - DNA, 111 bp, synthetic construct
  source 1..111: mol_type = other DNA
  misc_feature 1..111: note = Synthetic
ttgtttcggagaatggcccaaaaattgcagatgttgagcgtggccattagcccgccccattctcgcccgtgggccttggcctcatttataaatgccttgcatattttgtag

SEQ ID NO: 9262 - DNA, 180 bp, synthetic construct
  source 1..180: mol_type = other DNA
  misc_feature 1..180: note = Synthetic
acgaggggagttatggacaccaagggcatcctgctcgtcgctgtgctgactgccttgctttgtttgcaatctggggacacgctgggagcgtcctggcatagaccggacaagtgctgtctcggttaccagaaaagaccattaccacaggtgctcgactcggtccgcactagcctgaggtaa

SEQ ID NO: 9263 - DNA, 159 bp, synthetic construct
  misc_feature 1..159: note = Synthetic
  source 1..159: mol_type = other DNA
aagggcatcctgctcgtcgctgtgctgactgccttgctttgtttgcaatctggggacacgctgggagcgtcctggcatagaccggacaagtgctgtctcggttaccagaaaagaccattaccacaggtgctcgactcggtccgcactagcctgaggtaa

SEQ ID NO: 9264 - DNA, 15 bp, synthetic construct
  misc_feature 1..15: note = Synthetic
  source 1..15: mol_type = other DNA
atgtataatcattaa

SEQ ID NO: 9265 - DNA, 33 bp, synthetic construct
  source 1..33: mol_type = other DNA
  misc_feature 1..33: note = Synthetic
atggcaggtgcgtggctcgggagggacctgtaa

SEQ ID NO: 9266 - DNA, 120 bp, synthetic construct
  source 1..120: mol_type = other DNA
  misc_feature 1..120: note = Synthetic
ataaagagaaagaaaactagcgtaacgatgaagccgaaaacgacgagggtcggcagggcactaccgccgctgccgttttttgcgccgtgcgggtgcacggtggtagtgccgttagtctga

SEQ ID NO: 9267 - DNA, 21 bp, synthetic construct
  source 1..21: mol_type = other DNA
  misc_feature 1..21: note = Synthetic
atgacaagtctgaagagatga

SEQ ID NO: 9268 - DNA, 120 bp, synthetic construct
  misc_feature 1..120: note = Synthetic
  source 1..120: mol_type = other DNA
ataaagagaaagaaaaggagcgtaacgatgaagccgaaaacgacgagggtcggcagggcactaccgccgctgccgttttttgcgccgtgcgggtgcacggtggtagtgccgttagtctga

SEQ ID NO: 9269 - DNA, 120 bp, synthetic construct
  source 1..120: mol_type = other DNA
  misc_feature 1..120: note = Synthetic
ataaagagaaagaaaagtaacgtaacgatgaagccgaaaacgacgagggtcggcagggcactaccgccgctgccgttttttgcgccgtgcgggtgcacggtggtagtgccgttagtctga

SEQ ID NO: 9270 - DNA, 120 bp, synthetic construct
  misc_feature 1..120: note = Synthetic
  source 1..120: mol_type = other DNA
ataaagagaaagaaaagtagcataacgatgaagccgaaaacgacgagggtcggcagggcactaccgccgctgccgttttttgcgccgtgcgggtgcacggtggtagtgccgttagtctga

SEQ ID NO: 9271 - DNA, 120 bp, synthetic construct
  misc_feature 1..120: note = Synthetic
  source 1..120: mol_type = other DNA
ataaagagaaagaaaagtagcgcaacgatgaagccgaaaacgacgagggtcggcagggcactaccgccgctgccgttttttgcgccgtgcgggtgcacggtggtagtgccgttagtctga

SEQ ID NO: 9272 - DNA, 120 bp, synthetic construct
  misc_feature 1..120: note = Synthetic
  source 1..120: mol_type = other DNA
ataaagagaaagaaaagtagcgtaacaatgaagccgaaaacgacgagggtcggcagggcactaccgccgctgccgttttttgcgccgtgcgggtgcacggtggtagtgccgttagtctga

SEQ ID NO: 9273 - DNA, 120 bp, synthetic construct
  misc_feature 1..120: note = Synthetic
  source 1..120: mol_type = other DNA
ataaagagaaagaaaagtagcgtaacgaagaagccgaaaacgacgagggtcggcagggcactaccgccgctgccgttttttgcgccgtgcgggtgcacggtggtagtgccgttagtctga

SEQ ID NO: 9274 - DNA, 120 bp, synthetic construct
  misc_feature 1..120: note = Synthetic
  source 1..120: mol_type = other DNA
ataaagagaaagaaaagtagcgtaacgataaagccgaaaacgacgagggtcggcagggcactaccgccgctgccgttttttgcgccgtgcgggtgcacggtggtagtgccgttagtctga

SEQ ID NO: 9275 - DNA, 120 bp, synthetic construct
  source 1..120: mol_type = other DNA
  misc_feature 1..120: note = Synthetic
ataaagagaaagaaaagtagcgtaacgatgaaaccgaaaacgacgagggtcggcagggcactaccgccgctgccgttttttgcgccgtgcgggtgcacggtggtagtgccgttagtctga

SEQ ID NO: 9276 - DNA, 120 bp, synthetic construct
  source 1..120: mol_type = other DNA
  misc_feature 1..120: note = Synthetic
ataaagagaaagaaaagtagcgtaacgttgaagccgaaaacgacgagggtcggcagggcactaccgccgctgccgttttttgcgccgtgcgggtgcacggtggtagtgccgttagtctga

SEQ ID NO: 9277 - DNA, 120 bp, synthetic construct
  source 1..120: mol_type = other DNA
  misc_feature 1..120: note = Synthetic
ataaagagaaagaaaagtagcgtaatgatgaagccgaaaacgacgagggtcggcagggcactaccgccgctgccgttttttgcgccgtgcgggtgcacggtggtagtgccgttagtctga

SEQ ID NO: 9278 - DNA, 120 bp, synthetic construct
  misc_feature 1..120: note = Synthetic
  source 1..120: mol_type = other DNA
ataaagagaaagaaaagtagcgtaccgatgaagccgaaaacgacgagggtcggcagggcactaccgccgctgccgttttttgcgccgtgcgggtgcacggtggtagtgccgttagtctga

SEQ ID NO: 9279 - DNA, 120 bp, synthetic construct
  misc_feature 1..120: note = Synthetic
  source 1..120: mol_type = other DNA
ataaagagaaagaaaagtagcgttacgatgaagccgaaaacgacgagggtcggcagggcactaccgccgctgccgttttttgcgccgtgcgggtgcacggtggtagtgccgttagtctga

SEQ ID NO: 9280 - DNA, 120 bp, synthetic construct
  misc_feature 1..120: note = Synthetic
  source 1..120: mol_type = other DNA
ataaagagaaagaaaagtagcgtaacgatgaagcctaaaacgacgagggtcggcagggcactaccgccgctgccgttttttgcgccgtgcgggtgcacggtggtagtgccgttagtctga

SEQ ID NO: 9281 - DNA, 120 bp, synthetic construct
  misc_feature 1..120: note = Synthetic
  source 1..120: mol_type = other DNA
ataaagagaaagaaaagtagcgtaacgatgaagctgaaaacgacgagggtcggcagggcactaccgccgctgccgttttttgcgccgtgcgggtgcacggtggtagtgccgttagtctga

SEQ ID NO: 9282 - DNA, 120 bp, synthetic construct
  source 1..120: mol_type = other DNA
  misc_feature 1..120: note = Synthetic
ataaagagaaagaaaagtagcgtaacgatgaaggcgaaaacgacgagggtcggcagggcactaccgccgctgccgttttttgcgccgtgcgggtgcacggtggtagtgccgttagtctga

SEQ ID NO: 9283 - DNA, 120 bp, synthetic construct
  misc_feature 1..120: note = Synthetic
  source 1..120: mol_type = other DNA
ataaagagaaagaaaagtagcgtaacgatgaggccgaaaacgacgagggtcggcagggcactaccgccgctgccgttttttgcgccgtgcgggtgcacggtggtagtgccgttagtctga

SEQ ID NO: 9284 - DNA, 93 bp, synthetic construct
  source 1..93: mol_type = other DNA
  misc_feature 1..93: note = Synthetic
atgcagccgaaaacgacgagggtcggcagggcactaccgccgctgccgttttttgcgccgtgcgggtgcacggtggtagtgccgttagtctga

SEQ ID NO: 9285 - DNA, 120 bp, synthetic construct
  source 1..120: mol_type = other DNA
  misc_feature 1..120: note = Synthetic
ataaagagaaagaaaagtagcgtaacggccaagccgaaaacgacgagggtcggcagggcactaccgccgctgccgttttttgcgccgtgcgggtgcacggtggtagtgccgttagtctga

SEQ ID NO: 9286 - DNA, 120 bp, synthetic construct
  misc_feature 1..120: note = Synthetic
  source 1..120: mol_type = other DNA
acgcagcgcctttggtcggcaaccagcgtcttgacagtgaggagaaagcaaatttctgctcgacacatcaaaatgaagtgtacgccaggttccggctcgactcggtccgcactagcctga

SEQ ID NO: 9287 - DNA, 144 bp, synthetic construct
  source 1..144: mol_type = other DNA
  misc_feature 1..144: note = Synthetic
atgtttgacgacttttcagcaggagcaggagtttccgaaagagatctatttactagagaggaagaagaatcctttttaccaaaagaagatggggactttaaaatgtctttatctaacgactcggtccgcactagcctgaggtaa

SEQ ID NO: 9288 - DNA, 168 bp, synthetic construct
  misc_feature 1..168: note = Synthetic
  source 1..168: mol_type = other DNA
atggcgagcccggaagagaggctcctagacgagctcaataacgtaattgtgtcatttctgtgtgactctgggtctctggaagtggagagatgctccggggcgcatgtgttctccaggggcagctcccaacccctctgcaccgactcggtccgcactagcctgaggtaa

SEQ ID NO: 9289 - DNA, 168 bp, synthetic construct
  source 1..168: mol_type = other DNA
  misc_feature 1..168: note = Synthetic
atggcgagcccggaagagaggctcctagacgagctcaataacttaattgtgtcatttctgtgtgactctgggtctctggaagtggagagatgctccggggcgcatgtgttctccaggggcagctcccaacccctctgcaccgactcggtccgcactagcctgaggtaa

SEQ ID NO: 9290 - DNA, 171 bp, synthetic construct
  source 1..171: mol_type = other DNA
  misc_feature 1..171: note = Synthetic
atcgccgcgagcccggaagagaggctcctagacgagctcaataacgtaattgtgtcatttctgtgtgactctgggtctctggaagtggagagatgctccggggcgcatgtgttctccaggggcagctcccaacccctctgcaccgactcggtccgcactagcctgaggtaa

SEQ ID NO: 9291 - DNA, 171 bp, synthetic construct
  misc_feature 1..171: note = Synthetic
  source 1..171: mol_type = other DNA
atcgccgcgagcccggaagagaggctcctagacgagctcaataacttaattgtgtcatttctgtgtgactctgggtctctggaagtggagagatgctccggggcgcatgtgttctccaggggcagctcccaacccctctgcaccgactcggtccgcactagcctgaggtaa

SEQ ID NO: 9292 - DNA, 51 bp, synthetic construct
  source 1..51: mol_type = other DNA
  misc_feature 1..51: note = Synthetic
acgaataagatacaaacacaaatgtttacgactcggtccgcactagcctga

SEQ ID NO: 9293 - DNA, 30 bp, synthetic construct
  misc_feature 1..30: note = Synthetic
  source 1..30: mol_type = other DNA
atgctcgcaagttctcaggggaagagatag

SEQ ID NO: 9294 - DNA, 57 bp, synthetic construct
  source 1..57: mol_type = other DNA
  misc_feature 1..57: note = Synthetic
atgattccctatatgtttaagattggaatgcgcatcttctatatgagtggatgttga

SEQ ID NO: 9295 - DNA, 72 bp, synthetic construct
  misc_feature 1..72: note = Synthetic
  source 1..72: mol_type = other DNA
atcttcttcatcatcctcgtattcggtgagatcatcggattcatagtcgcgactcggtccgcactagcctga

SEQ ID NO: 9296 - DNA, 99 bp, synthetic construct
  source 1..99: mol_type = other DNA
  misc_feature 1..99: note = Synthetic
atgcattcggacatttatacaagggagtcctgttctaatattggcatcaatgttcggatctataggcttgattttcgcattgactttacacagacataa

SEQ ID NO: 9297 - DNA, 168 bp, synthetic construct
  source 1..168: mol_type = other DNA
  misc_feature 1..168: note = Synthetic
atgttcggatctataggcttgattttcgcattgactttacacagacataaacatcccctgaatctgtacctactttgtggatttacactgttagaatctctaacgctggcctctgttgttactttctatgatgcgcgtatcgactcggtccgcactagcctgaggtaa

SEQ ID NO: 9298 - DNA, 99 bp, synthetic construct
  source 1..99: mol_type = other DNA
  misc_feature 1..99: note = Synthetic
atgcattcggacatttatacaagggagtcctgttctaatattggcatcagccttcggatctataggcttgattttcgcattgactttacacagacataa

SEQ ID NO: 9299 - DNA, 150 bp, synthetic construct
  source 1..150: mol_type = other DNA
  misc_feature 1..150: note = Synthetic
ttgattttcgcattgactttacacagacataaacatcccctgaatctgtacctactttgtggatttacactgttagaatctctaacgctggcctctgttgttactttctatgatgcgcgtatcgactcggtccgcactagcctgaggtaa

SEQ ID NO: 9300 - DNA, 24 bp, synthetic construct
  source 1..24: mol_type = other DNA
  misc_feature 1..24: note = Synthetic
atgatttcagttattttaatataa

SEQ ID NO: 9301 - DNA, 186 bp, synthetic construct
  misc_feature 1..186: note = Synthetic
  source 1..186: mol_type = other DNA
ttggcacaggtgtacactatgagtcccttgatgcttcgattattgccgcttctatgtattatcataagcgcacattttgtaccccgcccggagacgagtccttctttagtatacgaaatagggtcaactgttactttccattgtcgcctcaacacaaccgactcggtccgcactagcctgaggtaa

SEQ ID NO: 9302 - DNA, 156 bp, synthetic construct
  source 1..156: mol_type = other DNA
  misc_feature 1..156: note = Synthetic
atgcttcgattattgccgcttctatgtattatcataagcgcacattttgtaccccgcccggagacgagtccttctttagtatacgaaatagggtcaactgttactttccattgtcgcctcaacacaaccgactcggtccgcactagcctgaggtaa

SEQ ID NO: 9303 - DNA, 120 bp, synthetic construct
  source 1..120: mol_type = other DNA
  misc_feature 1..120: note = Synthetic
ataaagagaaagaaaagtagtgtaacgatgaagccgaaaacgacgagggtcggcagggcactaccgccgctgccgttttttgcgccgtgcgggtgcacggtggtagtgccgttagtctga

SEQ ID NO: 9304 - DNA, 120 bp, synthetic construct
  source 1..120: mol_type = other DNA
  misc_feature 1..120: note = Synthetic
ataaagagaaagaaaagtcgcgtaacgatgaagccgaaaacgacgagggtcggcagggcactaccgccgctgccgttttttgcgccgtgcgggtgcacggtggtagtgccgttagtctga

SEQ ID NO: 9305 - DNA, 93 bp, synthetic construct
  misc_feature 1..93: note = Synthetic
  source 1..93: mol_type = other DNA
atgaagccgaaaacgacgagggtcggcagggcactaccgccgctgccgttttttgcgccgtgcgggtgcacggtggtagtgccgttagtctga

SEQ ID NO: 9306 - DNA, 27 bp, synthetic construct
  source 1..27: mol_type = other DNA
  misc_feature 1..27: note = Synthetic
attccgactcggtccgcactagcctga

SEQ ID NO: 9307 - DNA, 120 bp, synthetic construct
  misc_feature 1..120: note = Synthetic
  source 1..120: mol_type = other DNA
ataaagagaaagaaaagtagcgtaacgatgaagccgaaaacgacgagggtcggcagggcactaccgccgctgccgttttttgcgccgtgcgggtgcacggtggtagtgccgttagtctga

SEQ ID NO: 9308 - DNA, 120 bp, synthetic construct
  misc_feature 1..120: note = Synthetic
  source 1..120: mol_type = other DNA
ataaagagaaagaaaagtagcgtaacgatgaagccgaatacgacgagggtcggcagggcactaccgccgctgccgttttttgcgccgtgcgggtgcacggtggtagtgccgttagtctga

SEQ ID NO: 9309 - DNA, 120 bp, synthetic construct
  source 1..120: mol_type = other DNA
  misc_feature 1..120: note = Synthetic
ataaagagaaagaaaagtagcgtaacgatgaagccgagaacgacgagggtcggcagggcactaccgccgctgccgttttttgcgccgtgcgggtgcacggtggtagtgccgttagtctga

SEQ ID NO: 9310 - DNA, 39 bp, synthetic construct
  misc_feature 1..39: note = Synthetic
  source 1..39: mol_type = other DNA
ataaagagaaagaaaagtagcgtaacgatgaagccgtaa

SEQ ID NO: 9311 - DNA, 111 bp, synthetic construct
  source 1..111: mol_type = other DNA
  misc_feature 1..111: note = Synthetic
atgatacacctatattattttaactgttttacagatagagccatccaacaggctatcagaggggagaagtatacgtggtgcacattcacgactcggtccgcactagcctga

SEQ ID NO: 9312 - DNA, 18 bp, synthetic construct
  source 1..18: mol_type = other DNA
  misc_feature 1..18: note = Synthetic
acggatatacaaaactga

SEQ ID NO: 9313 - DNA, 168 bp, synthetic construct
  misc_feature 1..168: note = Synthetic
  source 1..168: mol_type = other DNA
atggaagttatcgctgatcgtctagacgatatagtggaacaaaatatagcggatgaaaaatttgtagattttgttatacacggtctactagaacatcaatgtccctccatacttcggccattacttaggttgttgattgacgactcggtccgcactagcctgaggtaa

SEQ ID NO: 9314 - DNA, 15 bp, synthetic construct
  misc_feature 1..15: note = Synthetic
  source 1..15: mol_type = other DNA
atgaaaaatttgtag

SEQ ID NO: 9315 - DNA, 87 bp, synthetic construct
  misc_feature 1..87: note = Synthetic
  source 1..87: mol_type = other DNA
atttctacaactcagatgctgccaggtacaaagagctcagccatatttccggtatatgacgactcggtccgcactagcctgaggtaa

SEQ ID NO: 9316 - DNA, 180 bp, synthetic construct
  misc_feature 1..180: note = Synthetic
  source 1..180: mol_type = other DNA
attaccggtaccatgggagacttgtcatgttggacaaaggtgccgggttttacgttaaccggcgaacttcagtacttaaaacaagtggatgatattttaaggtatggagttcggaaacgcgatcgaacaggaatcggaacgttatctttattcgactcggtccgcactagcctgaggtaa

SEQ ID NO: 9317 - DNA, 183 bp, synthetic construct
  source 1..183: mol_type = other DNA
  misc_feature 1..183: note = Synthetic
attattaccggtaccgccggagacttgtcatgttggacaaaggtgccgggttttacgttaaccggcgaacttcagtacttaaaacaagtggatgatattttaaggtatggagttcggaaacgcgatcgaacaggaatcggaacgttatctttattcgactcggtccgcactagcctgaggtaa

SEQ ID NO: 9318 - DNA, 54 bp, synthetic construct
  source 1..54: mol_type = other DNA
  misc_feature 1..54: note = Synthetic
atcctgaatacagaaatcaaaacgttgcctccttactttgtttggcatgattaa

SEQ ID NO: 9319 - DNA, 54 bp, synthetic construct
  misc_feature 1..54: note = Synthetic
  source 1..54: mol_type = other DNA
atcctgaatacagaaatcaaaacgttgcctccttactttgtttggcgccattaa

SEQ ID NO: 9320 - DNA, 183 bp, synthetic construct
  misc_feature 1..183: note = Synthetic
  source 1..183: mol_type = other DNA
attcgtggtgtcaaaatgagcaaagatttggtgcatcctagtcttatcagggcagggatagtagaactggaaatggcagaagagactactgatctgattaacaggaccatagagagcaaccaagctcaccttcagggggagccgctttatgttgacgactcggtccgcactagcctgaggtaa

SEQ ID NO: 9321 - DNA, 168 bp, synthetic construct
  source 1..168: mol_type = other DNA
  misc_feature 1..168: note = Synthetic
atgaccatgcagactctgctaatactgctatcccttttatcccccgcccttgccacttttgattactctaaatgcaaatttgttgagctatggaatttcttaaactgctataatgctacaatggatatgccttcctattacgactcggtccgcactagcctgaggtaa

SEQ ID NO: 9322 - DNA, 162 bp, synthetic construct
  source 1..162: mol_type = other DNA
  misc_feature 1..162: note = Synthetic
atgcagactctgctaatactgctatcccttttatcccccgcccttgccacttttgattactctaaatgcaaatttgttgagctatggaatttcttaaactgctataatgctacaatggatatgccttcctattacgactcggtccgcactagcctgaggtaa

SEQ ID NO: 9323 - DNA, 45 bp, synthetic construct
  source 1..45: mol_type = other DNA
  misc_feature 1..45: note = Synthetic
acgctaaatacaatgaaaaaggatatgaatatgcatgtagattaa

SEQ ID NO: 9324 - DNA, 186 bp, synthetic construct
  misc_feature 1..186: note = Synthetic
  source 1..186: mol_type = other DNA
atgctgtctttcgctgctgagggtgacgatcccgcaaaagcggcctttgactccctgcaagcctcagcgaccgaatatatcggttatgcgtgggcgatggttgttgtcattgtcggcgcaactatcggtatcaagctgtttaagaaatttacctcgaacgactcggtccgcactagcctgaggtaa

SEQ ID NO: 9325 - DNA, 162 bp, synthetic construct
  source 1..162: mol_type = other DNA
  misc_feature 1..162: note = Synthetic
agggtgacgatcccgcaaaagcggcctttgactccctgcaagcctcagcgaccgaatatatcggttatgcgtgggcgatggttgttgtcattgtcggcgcaactatcggtatcaagctgtttaagaaatttacctcgaacgactcggtccgcactagcctga

SEQ ID NO: 9326 - DNA, 132 bp, synthetic construct
  source 1..132: mol_type = other DNA
  misc_feature 1..132: note = Synthetic
ctgcaagcctcagcgaccgaatatatcggttatgcgtgggcgatggttgttgtcattgtcggcgcaactatcggtatcaagctgtttaagaaatttacctcgaacgactcggtccgcactagcctgaggtaa

SEQ ID NO: 9327 - DNA, 135 bp, synthetic construct
  source 1..135: mol_type = other DNA
  misc_feature 1..135: note = Synthetic
atgttaaaccaggtggcactagtagtggggatgcaaccactgcttttgctaattctgtgtttaacatttgtcaagctgtttccgccaatgtatgctcgcttatggcatgcaatggacacaaaattgaagatttga

SEQ ID NO: 9328 - DNA, 45 bp, synthetic construct
  misc_feature 1..45: note = Synthetic
  source 1..45: mol_type = other DNA
atgtctatcgtgcggaccatgttgacccgactcggtccgcactag

SEQ ID NO: 9329 - DNA, 45 bp, synthetic construct
  source 1..45: mol_type = other DNA
  misc_feature 1..45: note = Synthetic
atgttgcacctagtgacccatctcaattcccaaatcgctgactga

SEQ ID NO: 9330 - DNA, 51 bp, synthetic construct
  misc_feature 1..51: note = Synthetic
  source 1..51: mol_type = other DNA
atgatcaatatattagcgctagacatattacagaactattttagattatga

SEQ ID NO: 9331 - DNA, 75 bp, synthetic construct
  source 1..75: mol_type = other DNA
  misc_feature 1..75: note = Synthetic
acggaagagtattcgataaggcagatggaaaatctaaacgagatgctaaaaataatgcagctaaattggctgtag

SEQ ID NO: 9332 - DNA, 168 bp, synthetic construct
  source 1..168: mol_type = other DNA
  misc_feature 1..168: note = Synthetic
atggctcgaaatctgcgcgaggccatggccgagagcctgggccgcacttcgcgcagcttggccgcagagcagtccgttctcttctcgcgcctggaagtgcgcatcgaggtcgaggagcagattgaggcgcgcgaggacatcgactcggtccgcactagcctgaggtaa

SEQ ID NO: 9333 - DNA, 144 bp, synthetic construct
  source 1..144: mol_type = other DNA
  misc_feature 1..144: note = Synthetic
atggccgagagcctgggccgcacttcgcgcagcttggccgcagagcagtccgttctcttctcgcgcctggaagtgcgcatcgaggtcgaggagcagattgaggcgcgcgaggacatcgactcggtccgcactagcctgaggtaa

SEQ ID NO: 9334 - DNA, 195 bp, synthetic construct
  misc_feature 1..195: note = Synthetic
  source 1..195: mol_type = other DNA
acgaaaacatttttcattaagtttatcatgaatgtgtataataaagccgattcgttttctttagagtctgattctatcaaagatgttatacacgattatatttgttggcttagtatgactgatgaaatgagaccatctatcggaaacgtctttaaagcgatggaaaccgactcggtccgcactagcctgaggtaa

SEQ ID NO: 9335 - DNA, 87 bp, synthetic construct
  source 1..87: mol_type = other DNA
  misc_feature 1..87: note = Synthetic
atactattcatccaacttaaacaacgaaaacatttttcattaagtttatcgccaatgtgtataataaagccgattcgttttctttag

SEQ ID NO: 9336 - DNA, 195 bp, synthetic construct
  source 1..195: mol_type = other DNA
  misc_feature 1..195: note = Synthetic
acgaaaacatttttcattaagtttatcgccaatgtgtataataaagccgattcgttttctttagagtctgattctatcaaagatgttatacacgattatatttgttggcttagtatgactgatgaaatgagaccatctatcggaaacgtctttaaagcgatggaaaccgactcggtccgcactagcctgaggtaa

SEQ ID NO: 9337 - DNA, 39 bp, synthetic construct
  source 1..39: mol_type = other DNA
  misc_feature 1..39: note = Synthetic
atcgcccggaccatgttgacccgactcggtccgcactag

SEQ ID NO: 9338 - DNA, 156 bp, synthetic construct
  source 1..156: mol_type = other DNA
  misc_feature 1..156: note = Synthetic
ttggtgcatcctagtcttatcagggcagggatagtagaactggaaatggcagaagagactactgatctgattaacaggaccatagagagcaaccaagctcaccttcagggggagccgctttatgttgacgactcggtccgcactagcctgaggtaa

SEQ ID NO: 9339 - DNA, 27 bp, synthetic construct
  source 1..27: mol_type = other DNA
  misc_feature 1..27: note = Synthetic
atgatatattgcatacttgatcaatag

SEQ ID NO: 9340 - DNA, 150 bp, synthetic construct
  source 1..150: mol_type = other DNA
  misc_feature 1..150: note = Synthetic
ttgatcggtatttgtgtagcagttaccgttgccatcctatacgcgatgtataataagatcaagaactcacaaaatccgaatccaagtccgaatttaaattcgcctcctccagaaacaagaaacgactcggtccgcactagcctgaggtaa

SEQ ID NO: 9341 - DNA, 153 bp, synthetic construct
  source 1..153: mol_type = other DNA
  misc_feature 1..153: note = Synthetic
ttgttgatcggtatttgtgtagcagttaccgtcgccatcctatactcgatgtataataagatcaagaactcacaaaatccgaatccaagtccgaatttaaattcgcctcctccagaaccaaaaaacgactcggtccgcactagcctgaggtaa

SEQ ID NO: 9342 - DNA, 165 bp, synthetic construct
  misc_feature 1..165: note = Synthetic
  source 1..165: mol_type = other DNA
attggtattcttcttttgatcggtatttgtgtagcagttaccgttgccatcctatacgcgatgtataataagatcaagaactcacaaaatccgaatccaagtccgaatttaaattcgcctcctccagaaacaagaaacgactcggtccgcactagcctgaggtaa

SEQ ID NO: 9343 - DNA, 57 bp, synthetic construct
  misc_feature 1..57: note = Synthetic
  source 1..57: mol_type = other DNA
atccaagctgcgaagacggcggtactgagtctccctgttgttatcagcccaacatga

SEQ ID NO: 9344 - DNA, 168 bp, synthetic construct
  source 1..168: mol_type = other DNA
  misc_feature 1..168: note = Synthetic
atgagcaagcgcaagtttaaagaagaactgctgcagacgctggtgcctgagatctatggccctccggacgtgaagcctgacattaagccccgcgatatcaagcgtgttaaaaagcgggaaaagaaagaggaactcgcggtcgactcggtccgcactagcctgaggtaa

SEQ ID NO: 9345 - DNA, 15 bp, synthetic construct
  misc_feature 1..15: note = Synthetic
  source 1..15: mol_type = other DNA
atgatctatctgtga

SEQ ID NO: 9346 - DNA, 135 bp, synthetic construct
  misc_feature 1..135: note = Synthetic
  source 1..135: mol_type = other DNA
atggctcgagttcgatatgttcaacggtctccaaccgtaacagggagtcaacaggacaaagacccagagtcggaggagcatagttgttcttcatcgatgaagtgtgaaacggttctgctattctttgaaagttga

SEQ ID NO: 9347 - DNA, 24 bp, synthetic construct
  misc_feature 1..24: note = Synthetic
  source 1..24: mol_type = other DNA
ctggttcacttgtttgaaaactaa

SEQ ID NO: 9348 - DNA, 33 bp, synthetic construct
  source 1..33: mol_type = other DNA
  misc_feature 1..33: note = Synthetic
atgaaatcaacgactcggtccgcactagcctga

SEQ ID NO: 9349 - DNA, 192 bp, synthetic construct
  source 1..192: mol_type = other DNA
  misc_feature 1..192: note = Synthetic
acgctgctgagcgcggagcacgtcgcgcacaaggttaacgggtacaacatgttccgtcgcagcttcttcccggacagcgacgtcttcgtgtacttcagcgactctctgagccgcgtggacctggagttcgccttcttcctgttcctggcgggcatcgtgggctcggtcaaggaccgactcggtccgcactag

SEQ ID NO: 9350 - DNA, 60 bp, synthetic construct
  misc_feature 1..60: note = Synthetic
  source 1..60: mol_type = other DNA
ttgtcgtccacctgtacgcctccaaacatttttcaacatataaatggaaagctactttag

SEQ ID NO: 9351 - DNA, 168 bp, synthetic construct
  source 1..168: mol_type = other DNA
  misc_feature 1..168: note = Synthetic
atggaaagctactttagttactataacgacgagttcaccgccggcggcgttcaggacgccgagctcttcagcccggaggagcagaatgcctttctccccaaagaccccggcactgccgactcccccctagtcccggctaccgactcggtccgcactagcctgaggtaa

SEQ ID NO: 9352 - DNA, 27 bp, synthetic construct
  misc_feature 1..27: note = Synthetic
  source 1..27: mol_type = other DNA
atgatatattgtatacttgatcaatag

SEQ ID NO: 9353 - DNA, 105 bp, synthetic construct
  misc_feature 1..105: note = Synthetic
  source 1..105: mol_type = other DNA
atgtataataagatcaagaactcacaaaatccaagtccgaatgtaaacttgcctcctccagaaacaagaaataccagcgactcggtccgcactagcctgaggtaa

SEQ ID NO: 9354 - DNA, 141 bp, synthetic construct
  misc_feature 1..141: note = Synthetic
  source 1..141: mol_type = other DNA
atttgtgtagcagttaccgtcgccatcctatacgcgatgtataataagatcaagaactcacaaaatccaagtccgaatgtaaacttgcctcctccagaaacaagaaataccagcgactcggtccgcactagcctgaggtaa

SEQ ID NO: 9355 - DNA, 48 bp, synthetic construct
  misc_feature 1..48: note = Synthetic
  source 1..48: mol_type = other DNA
ctgatcaaaataatcgcttgcacctccatcgagcaaaatttcgtctag

SEQ ID NO: 9356 - DNA, 24 bp, synthetic construct
  source 1..24: mol_type = other DNA
  misc_feature 1..24: note = Synthetic
atgttctcttcttttacagtatga

SEQ ID NO: 9357 - DNA, 213 bp, synthetic construct
  misc_feature 1..213: note = Synthetic
  source 1..213: mol_type = other DNA
atcgcacaaaaaagtgtcccggcccgagcgcagtccgacttcccgatgcagagaagcagcgcctgtatgggaataagtgtcccgacccgagcgcagaccgacctcccaaagcagagaagcagcgcctgtatgggaataagtgttccggcccgagcgcagtccgacctcccaaagcagaagagcagcgactcggtccgcactagcctgaggtaa

SEQ ID NO: 9358 - DNA, 213 bp, synthetic construct
  misc_feature 1..213: note = Synthetic
  source 1..213: mol_type = other DNA
atcgcacaaaaaagtgtcccggcccgagcgcagtccgacttcccggcccagagaagcagcgcctgtatgggaataagtgtcccgacccgagcgcagaccgacctcccaaagcagagaagcagcgcctgtatgggaataagtgttccggcccgagcgcagtccgacctcccaaagcagaagagcagcgactcggtccgcactagcctgaggtaa

SEQ ID NO: 9359 - DNA, 57 bp, synthetic construct
  misc_feature 1..57: note = Synthetic
  source 1..57: mol_type = other DNA
attaaatttctatattttacttttgctattaatttaataactgtaaataaaagatga

SEQ ID NO: 9360 - DNA, 189 bp, synthetic construct
  source 1..189: mol_type = other DNA
  misc_feature 1..189: note = Synthetic
ctggagatcctccatacagccatggaacaggaacaggatacaccatggacacagtcaacagaacacaccaatattcagagaaggggaagtggacgacaaatacagaaactggggcaccccaactcaacccaattgatggaccactacctgaggataatgagcgactcggtccgcactagcctgaggtaa

SEQ ID NO: 9361 - DNA, 189 bp, synthetic construct
  source 1..189: mol_type = other DNA
  misc_feature 1..189: note = Synthetic
ctggagatcctccatacagccgccgaacaggaacaggatacaccatggacacagtcaacagaacacaccaatattcagagaaggggaagtggacgacaaatacagaaactggggcaccccaactcaacccaattgatggaccactacctgaggataatgagcgactcggtccgcactagcctgaggtaa

SEQ ID NO: 9362 - DNA, 168 bp, synthetic construct
  misc_feature 1..168: note = Synthetic
  source 1..168: mol_type = other DNA
atgaaaaaaaacactgtatttgaaatggatcaaataataggatataaatttcttgcacctgatccgaaagttggagttttttataggcctttacattttcaatacgtttcttattctaactttattaatcacaggcttcacgactcggtccgcactagcctgaggtaa

SEQ ID NO: 9363 - DNA, 72 bp, synthetic construct
  source 1..72: mol_type = other DNA
  misc_feature 1..72: note = Synthetic
atgtacaccttctggacaataacattaacaatattatcagtcatcgactcggtccgcactagcctgaggtaa

SEQ ID NO: 9364 - DNA, 138 bp, synthetic construct
  source 1..138: mol_type = other DNA
  misc_feature 1..138: note = Synthetic
atgtcgaatttctacgggacccatcagggagatctctctggatcacagaaaggcgaagagcaacaggtgcaaggtgtaatcaggtatgtttctatgattgttagcttgttcgactcggtccgcactagcctgaggtaa

SEQ ID NO: 9365 - DNA, 156 bp, synthetic construct
  misc_feature 1..156: note = Synthetic
  source 1..156: mol_type = other DNA
atgcaccaaaagagaactgcaatgtttcaggacccacaggagcgacccagaaagttaccacagttatgcacagagctgcaaacaactatacatgatataatattagaatgtgtgtactgcaagcaacacgactcggtccgcactagcctgaggtaa

SEQ ID NO: 9366 - DNA, 156 bp, synthetic construct
  misc_feature 1..156: note = Synthetic
  source 1..156: mol_type = other DNA
atgcaccaaaagagaactgcaatgtttcaggacccacaggagcgacccagaaagttaccacagttatgcacagagctgcaaacaactatacatgatataatattagagcctgtgtactgcaagcaacacgactcggtccgcactagcctgaggtaa

SEQ ID NO: 9367 - DNA, 24 bp, synthetic construct
  source 1..24: mol_type = other DNA
  misc_feature 1..24: note = Synthetic
attgtgcgcctttctcactgctag

SEQ ID NO: 9368 - DNA, 126 bp, synthetic construct
  source 1..126: mol_type = other DNA
  misc_feature 1..126: note = Synthetic
ctgttaactctccaaacacccaccggtcaaatccattggggcaatctctctaagataggggtggtagggataggaagtgcaagctacaaagttatgaccgactcggtccgcactagcctgaggtaa

SEQ ID NO: 9369 - DNA, 192 bp, synthetic construct
  misc_feature 1..192: note = Synthetic
  source 1..192: mol_type = other DNA
atcaagactcatccagtgtccatcgccggtctcaaggtgaacgtctctgccatattcatggcagtactgttaactctccaaacacccaccggtcaaatccattggggcaatctctctaagataggggtggtagggataggaagtgcaagctacaaagttatgaccgactcggtccgcactagcctgaggtaa

SEQ ID NO: 9370 - DNA, 57 bp, synthetic construct
  misc_feature 1..57: note = Synthetic
  source 1..57: mol_type = other DNA
atgagccttgtgtcgggaatacttaggaaatcagcaaaattccatgtggcttcctaa

SEQ ID NO: 9371 - DNA, 135 bp, synthetic construct
  misc_feature 1..135: note = Synthetic
  source 1..135: mol_type = other DNA
atggctctcgtccgatatggtccacggtctccaactgtaacagggagtcaacagaacaaagacccagagtcggaagagcatagttgttcttcatcgatgaaatgtgaaagggttctgctattctttgaaagttga

SEQ ID NO: 9372 - DNA, 102 bp, synthetic construct
  source 1..102: mol_type = other DNA
  misc_feature 1..102: note = Synthetic
atgacctttatgttgctattagaggttcttgtgaaaagaacctacaacttatgcgtaaggttgacttgtataatggtgctgtcacgactcggtccgcactag

SEQ ID NO: 9373 - DNA, 39 bp, synthetic construct
  misc_feature 1..39: note = Synthetic
  source 1..39: mol_type = other DNA
agggacattttctcagactggataaatggcagaaactaa

SEQ ID NO: 9374 - DNA, 24 bp, synthetic construct
  source 1..24: mol_type = other DNA
  misc_feature 1..24: note = Synthetic
ctgctggcgtatgaccaaagatga

SEQ ID NO: 9375 - DNA, 84 bp, synthetic construct
  misc_feature 1..84: note = Synthetic
  source 1..84: mol_type = other DNA
atgaacgcctccgcgcctttgatttctttcacgatcccgttttgtgagttgctgattcgttcgcggttccagattacctgctga

SEQ ID NO: 9376 - DNA, 84 bp, synthetic construct
  source 1..84: mol_type = other DNA
  misc_feature 1..84: note = Synthetic
atgaacgtgtccgcgcctttgatttctttcacgatcccgttttgtgagttgctgattcgttcgcggttccagattacctgctga

SEQ ID NO: 9377 - DNA, 189 bp, synthetic construct
  source 1..189: mol_type = other DNA
  misc_feature 1..189: note = Synthetic
ctggagatcctccatacagccatgggacaggaacaggatacaccatggacacagtcaacagaacacatcaatattcagaaaaggggaagtggacaacaaacacggaaactggagcgccccaacttaacccaattgatggaccactacctgaggacaatgaacgactcggtccgcactagcctgaggtaa

SEQ ID NO: 9378 - DNA, 189 bp, synthetic construct
  source 1..189: mol_type = other DNA
  misc_feature 1..189: note = Synthetic
ctggagatcctccatacagccgccggacaggaacaggatacaccatggacacagtcaacagaacacatcaatattcagaaaaggggaagtggacaacaaacacggaaactggagcgccccaacttaacccaattgatggaccactacctgaggacaatgaacgactcggtccgcactagcctgaggtaa

SEQ ID NO: 9379 - DNA, 168 bp, synthetic construct
  source 1..168: mol_type = other DNA
  misc_feature 1..168: note = Synthetic
atggggactatcgcagaattcaaccctgtgacatgggccgagcatggctcacttagccctatgttactcgagcaaggaccggataaaaagattatcccgcagtacagattcatagcacctaaacctgaagctggaaggaccgactcggtccgcactagcctgaggtaa

SEQ ID NO: 9380 - DNA, 108 bp, synthetic construct
  source 1..108: mol_type = other DNA
  misc_feature 1..108: note = Synthetic
atgttactcgagcaaggaccggataaaaagattatcccgcagtacagattcatagcacctaaacctgaagctggaaggaccgactcggtccgcactagcctgaggtaa

SEQ ID NO: 9381 - DNA, 222 bp, synthetic construct
  misc_feature 1..222: note = Synthetic
  source 1..222: mol_type = other DNA
attctatttcaacctgtactcgactctgaatacgttatttcttttattgacagagccattgcggaggatagagaatatggaacgtttgaatctgtaacccaggcttatcagcagatcattagtcatactttacagctgagacgatatgaatttgaaactgggtgcatgattatgttttctgctaattctggaaacgactcggtccgcactagcctgaggtaa

SEQ ID NO: 9382 - DNA, 84 bp, synthetic construct
  misc_feature 1..84: note = Synthetic
  source 1..84: mol_type = other DNA
ctgtactcgactctgaatacgttatttcttttattgacagagccattgcggaggatagagaatatggaacgtttgaatctgtaa

SEQ ID NO: 9383 - DNA, 168 bp, synthetic construct
  misc_feature 1..168: note = Synthetic
  source 1..168: mol_type = other DNA
atgtcaccacaacgagaccgaataaatgccttctacaaagacaacccacatcctaagggaagtaggatagttattaacagagaacatcttatgattgatagaccttatgttttgctggctgttctattcgtcatgtttctcgactcggtccgcactagcctgaggtaa

SEQ ID NO: 9384 - DNA, 153 bp, synthetic construct
  misc_feature 1..153: note = Synthetic
  source 1..153: mol_type = other DNA
acggctgggagacggcgacagagcttgttgaagatacgcaggccattgcccgttacggtcgtaatgttacgaagatggatgcctttggctgtaccagccgggggcaggcacaccgcgccgggctgtggctcgactcggtccgcactagcctga

SEQ ID NO: 9385 - DNA, 168 bp, synthetic construct
  source 1..168: mol_type = other DNA
  misc_feature 1..168: note = Synthetic
atgaggtgtcacgagttcaatcggctgtccggtaaggtttgtcgattattactgttctacttcggcaagtcagcctcgcaacagccagctggtttggccccagcttgtccacccagcatgaggcacaaatgccgcctcaatacggtcgacgttgggcagtctcagtga

SEQ ID NO: 9386 - DNA, 177 bp, synthetic construct
  source 1..177: mol_type = other DNA
  misc_feature 1..177: note = Synthetic
acggggagcatgtccgactccaaggaggtccctagccttccatttttgcgacacttgctcgaagagttggacagccatgaggacagcttgctgctgtttctgtgtcacgacgcggccccgggctgcacgacggtcacgcaagctttgtgcgactcggtccgcactagcctgaggtaa

SEQ ID NO: 9387 - DNA, 132 bp, synthetic construct
  misc_feature 1..132: note = Synthetic
  source 1..132: mol_type = other DNA
ttgcgacacttgctcgaagagttggacagccatgaggacagcttgctgctgtttctgtgtcacgacgcggccccgggctgcacgacggtcacgcaagctttgtgcgactcggtccgcactagcctgaggtaa

SEQ ID NO: 9388 - DNA, 168 bp, synthetic construct
  source 1..168: mol_type = other DNA
  misc_feature 1..168: note = Synthetic
atgagtatactacctgttatatttcttcctatatttttttattctccattcgttcagacttttaacgtgcctgaatgtatcgacaaagggcaatattttgcatcattcatggagttagaaaacgagccagtaatcttacccgactcggtccgcactagcctgaggtaa

SEQ ID NO: 9389 - DNA, 24 bp, synthetic construct
  source 1..24: mol_type = other DNA
  misc_feature 1..24: note = Synthetic
atgtttctaacaggccaggattaa

SEQ ID NO: 9390 - DNA, 111 bp, synthetic construct
  misc_feature 1..111: note = Synthetic
  source 1..111: mol_type = other DNA
acgacgcccacgtacggtccacgtcgcccttcaatgtctctcttgaccaataggcgtagccggcgagttgacaaggaccagtgcgactcggtccgcactagcctgaggtaa

SEQ ID NO: 9391 - DNA, 120 bp, synthetic construct
  misc_feature 1..120: note = Synthetic
  source 1..120: mol_type = other DNA
ctgggaaacgccctgctgtggataagcttgaggacttgttggagggtggggatggacctttggaccttagtacccggaaactgccaaggcaatgagtgccctgcagctgtgtttatttaa

SEQ ID NO: 9392 - DNA, 168 bp, synthetic construct
  source 1..168: mol_type = other DNA
  misc_feature 1..168: note = Synthetic
atgggtgcacaagtatctagacaaaatgttgggacacactccacacaaaattcagtgagcaatggatctagcttaaattatttcaacatcaattattttaaagacgcagcttcaagtggtgcttctagattggatttttccgactcggtccgcactagcctgaggtaa

SEQ ID NO: 9393 - DNA, 186 bp, synthetic construct
  misc_feature 1..186: note = Synthetic
  source 1..186: mol_type = other DNA
gtgcatatgccccgcacggagtcgcggacacgcttcctccggcgtcacgggcacgggccttccgcggagtcgttggcacttgcccctctcttcgtgcgtacggagacgcgcgttgctggcgtgttcctactcgcacagaccaagcaggtggccctcgcgtcgcggcggcgactcggtccgcactag

SEQ ID NO: 9394 - DNA, 192 bp, synthetic construct
  source 1..192: mol_type = other DNA
  misc_feature 1..192: note = Synthetic
atcgcttcccgacctccggtcccgatggccgtcccgcaatttcaccgccccagcaccgttaccaccgatagcgtccgggcgcttggcatgcgcgggctcgtcttggccaccaataactctcagtttatcatggataacaaccacccgcacccccagggcacccacgactcggtccgcactagcctgaggtaa

SEQ ID NO: 9395 - DNA, 63 bp, synthetic construct
  source 1..63: mol_type = other DNA
  misc_feature 1..63: note = Synthetic
atggataacaaccacccgcacccccagggcacccacgactcggtccgcactagcctgaggtaa

SEQ ID NO: 9396 - DNA, 168 bp, synthetic construct
  source 1..168: mol_type = other DNA
  misc_feature 1..168: note = Synthetic
atgcctttcttccagaaggtactgaacgtcttcgagagccttcgtcatcctcggcactcgcgtccgcatcggcgccgccccgccagcaagtttatttccgggattgacctcgcgacgggaaccgtgctggtctcggaaaacgactcggtccgcactagcctgaggtaa

SEQ ID NO: 9397 - DNA, 153 bp, synthetic construct
  misc_feature 1..153: note = Synthetic
  source 1..153: mol_type = other DNA
aaggtactgaacgtcttcgagagccttcgtcatcctcggcactcgcgtccgcatcggcgccgccccgccagcaagtttatttccgggattgacctcgcgacgggaaccgtgctggtctcggaaaacgactcggtccgcactagcctgaggtaa

SEQ ID NO: 9398 - DNA, 120 bp, synthetic construct
  misc_feature 1..120: note = Synthetic
  source 1..120: mol_type = other DNA
ttgcagggcgaacatatgtatcacagcttgttttttacctgcagactacgcctccccgatacggggacgaagcctcaagatgggcctgattgggctgtttatgggcctccgtataggtga

SEQ ID NO: 9399 - DNA, 54 bp, synthetic construct
  source 1..54: mol_type = other DNA
  misc_feature 1..54: note = Synthetic
atgataacacatattcattggggagaaaccctccacttatatatcctcctttaa

SEQ ID NO: 9400 - DNA, 198 bp, synthetic construct
  misc_feature 1..198: note = Synthetic
  source 1..198: mol_type = other DNA
ctgaacaattcgcccaagatgacgaacgtatttccatgctggagttcagtgacggagaatccatcggaagccatgacacagttccaggaactcgtttccgattcaccaagaggttttgcatcgtcacttacagtcagacaccgccagactttgatgctgacgcaattgtgcgaatcgactcggtccgcactagcctga

SEQ ID NO: 9401 - DNA, 198 bp, synthetic construct
  misc_feature 1..198: note = Synthetic
  source 1..198: mol_type = other DNA
ctgaacaattcgcccaagatgacgaacgtatttccgccctggagttcagtgacggagaatccatcggaagccatgacacagttccaggaactcgtttccgattcaccaagaggttttgcatcgtcacttacagtcagacaccgccagactttgatgctgacgcaattgtgcgaatcgactcggtccgcactagcctga

SEQ ID NO: 9402 - DNA, 159 bp, synthetic construct
  source 1..159: mol_type = other DNA
  misc_feature 1..159: note = Synthetic
atggcatcccctgctgcacctcgtgctgtttcctttgccgataacaatgatataacaaatacaaacctatctcgaggtagaggacgtaatccaaaaccacgagctgcaccaaataacactgtctcttggtacactgcgactcggtccgcactagcctga

SEQ ID NO: 9403 - DNA, 216 bp, synthetic construct
  source 1..216: mol_type = other DNA
  misc_feature 1..216: note = Synthetic
ttgaaacctcttaggatccacaaaaacaacaacctctgtatggaaaatgcgctattttatctcagcttttctcccaaacctcggtttcttcctattcttatgttttccctagtatatttgcctccttataagaaaagaagcacaagctcggtcgcacggattattccttctgctaatctattattttgttcctcgactcggtccgcactagcctga

SEQ ID NO: 9404 - DNA, 42 bp, synthetic construct
  misc_feature 1..42: note = Synthetic
  source 1..42: mol_type = other DNA
atgttaaccaacctgatgtgtttaccgagtcttacattatga

SEQ ID NO: 9405 - DNA, 27 bp, synthetic construct
  source 1..27: mol_type = other DNA
  misc_feature 1..27: note = Synthetic
gtgttggaagatcaaccaaggatgtga

SEQ ID NO: 9406 - DNA, 54 bp, synthetic construct
  misc_feature 1..54: note = Synthetic
  source 1..54: mol_type = other DNA
ataatccagattccgagtatatataacataacagatcgactcggtccgcactag

SEQ ID NO: 9407 - DNA, 120 bp, synthetic construct
  source 1..120: mol_type = other DNA
  misc_feature 1..120: note = Synthetic
ataaattattttttgaggtctctggagacagcctctatagaagacaacccagccaaccttgcaaagatggggtcattccaccagcaccaggagcagaatcagcgactcggtccgcactag

SEQ ID NO: 9408 - DNA, 171 bp, synthetic construct
  misc_feature 1..171: note = Synthetic
  source 1..171: mol_type = other DNA
atagccaacctgcacgcggcgtacatcgactacgcgctgcggcgctcgcagcacatgcaggccgagatgagcggcgccgacaacgtgctgctcaaggactaccagctcttcgtggccaaagtcttcctggggctggacagcatcgactcggtccgcactagcctgaggtaa

SEQ ID NO: 9409 - DNA, 72 bp, synthetic construct
  misc_feature 1..72: note = Synthetic
  source 1..72: mol_type = other DNA
aggactaccagctcttcgtggccaaagtcttcctggggctggacagcatcgactcggtccgcactagcctga

SEQ ID NO: 9410 - DNA, 201 bp, synthetic construct
  misc_feature 1..201: note = Synthetic
  source 1..201: mol_type = other DNA
attttgaccgcgaaatttgaacgagcagcagccatgccggggttctacgagattgtcctgaaggtcccgagtgacctggacgagcgcctgccgggcatttctaactcgtttgttaactgggtggccgagaaggaatgggacgtgccgccggattctgacatggatccgaatctcgactcggtccgcactagcctgaggtaa

SEQ ID NO: 9411 - DNA, 201 bp, synthetic construct
  misc_feature 1..201: note = Synthetic
  source 1..201: mol_type = other DNA
gtgaagatcgagtctgcacaccttccgaaagccatggcgcacgagccaatccccttctctttcctgcggaatctgctggcagagctggacgctagcgagcacgaggtcttacggttcctgtgccgcgatgtggcgcctgctagcaagactgcagaagacgctttgcgagcgttcgactcggtccgcactagcctgaggtaa

SEQ ID NO: 9412 - DNA, 96 bp, synthetic construct
  source 1..96: mol_type = other DNA
  misc_feature 1..96: note = Synthetic
acgaggtcttacggttcctgtgccgcgatgtggcgcctgctagcaagactgcagaagacgctttgcgagcgttcgactcggtccgcactagcctga

SEQ ID NO: 9413 - DNA, 201 bp, synthetic construct
  misc_feature 1..201: note = Synthetic
  source 1..201: mol_type = other DNA
gtgaagatcgagtctgcacaccttccgaaagccgccgcgcacgagccaatccccttctctttcctgcggaatctgctggcagagctggacgctagcgagcacgaggtcttacggttcctgtgccgcgatgtggcgcctgctagcaagactgcagaagacgctttgcgagcgttcgactcggtccgcactagcctgaggtaa

SEQ ID NO: 9414 - DNA, 168 bp, synthetic construct
  misc_feature 1..168: note = Synthetic
  source 1..168: mol_type = other DNA
atgttttgcacctcaccggctacgcggggcgactcgtccgagtcaaaacccggggcatcggttgatgttaacggaaagatggaatatggatctgcaccaggacccctgaacggccgggatacgtcgcggggccccggcgccgactcggtccgcactagcctgaggtaa

SEQ ID NO: 9415 - DNA, 24 bp, synthetic construct
  source 1..24: mol_type = other DNA
  misc_feature 1..24: note = Synthetic
atggatctgcaccaggacccctga

SEQ ID NO: 9416 - DNA, 21 bp, synthetic construct
  misc_feature 1..21: note = Synthetic
  source 1..21: mol_type = other DNA
atggtccacgtcccacgttag

SEQ ID NO: 9417 - DNA, 24 bp, synthetic construct
  source 1..24: mol_type = other DNA
  misc_feature 1..24: note = Synthetic
atgtcaagccgaagcatgaagtga

SEQ ID NO: 9418 - DNA, 78 bp, synthetic construct
  misc_feature 1..78: note = Synthetic
  source 1..78: mol_type = other DNA
atgcagaacatgcgtgacgaagagctggccattgctcaggtcgaagagatgcaggcgactcggtccgcactagcctga

SEQ ID NO: 9419 - DNA, 24 bp, synthetic construct
  misc_feature 1..24: note = Synthetic
  source 1..24: mol_type = other DNA
atgtcaagccgaagcgccaagtga

SEQ ID NO: 9420 - DNA, 222 bp, synthetic construct
  source 1..222: mol_type = other DNA
  misc_feature 1..222: note = Synthetic
attctatttcaacctgtactcgactctgaatacgttatttcttttattgacagaatgattgcggaggatagagaatatggaacgtttgaatctgtaacccaggcttatcagcagatcattagtcatactttacagctgagacgatatgaatttgaaactgggtgcatgattatgttttctgctaattctggaaacgactcggtccgcactagcctgaggtaa

SEQ ID NO: 9421 - DNA, 21 bp, synthetic construct
  source 1..21: mol_type = other DNA
  misc_feature 1..21: note = Synthetic
atggaacgtttgaatctgtaa

SEQ ID NO: 9422 - DNA, 60 bp, synthetic construct
  source 1..60: mol_type = other DNA
  misc_feature 1..60: note = Synthetic
atgcacccgagcggggacgtaaatggtgtacgaaagtacttttgcgtgacgtccgtgtga

SEQ ID NO: 9423 - DNA, 168 bp, synthetic construct
  misc_feature 1..168: note = Synthetic
  source 1..168: mol_type = other DNA
atgggctccagtgagcaggaactgaaagccattgtcaaagatcttggttgtgggccatattttttgggcacctatgacaagcgctttccaggctttgtttctccacacaagctcgcctgcgccatagtcaatacggccggcgactcggtccgcactagcctgaggtaa

SEQ ID NO: 9424 - DNA, 147 bp, synthetic construct
  source 1..147: mol_type = other DNA
  misc_feature 1..147: note = Synthetic
ctgaaagccattgtcaaagatcttggttgtgggccatattttttgggcacctatgacaagcgctttccaggctttgtttctccacacaagctcgcctgcgccatagtcaatacggccggcgactcggtccgcactagcctgaggtaa

SEQ ID NO: 9425 - DNA, 192 bp, synthetic construct
  source 1..192: mol_type = other DNA
  misc_feature 1..192: note = Synthetic
atgcaacctataccaatagtagcaatagtagcattagtagtagcaataataatagcaatagttgtgtggtccatagtaatcatagaatataggaaaatattaagacaaagaaaaatagacaggttaattgatagactaatagaaagagcagaagacagtggcaatgagacgactcggtccgcactagcctga

SEQ ID NO: 9426 - DNA, 192 bp, synthetic construct
  misc_feature 1..192: note = Synthetic
  source 1..192: mol_type = other DNA
atgcaacctataccaatagtagcaatagtagcattagtagtagcaataataatagcaatagttgtgtggtccatagtaatcatagaatataggaaaatattaagacaaagaaaaatagacaggttaattgatagactaatagaaagagcagaagacagtggcagccagacgactcggtccgcactagcctga

SEQ ID NO: 9427 - DNA, 15 bp, synthetic construct
  misc_feature 1..15: note = Synthetic
  source 1..15: mol_type = other DNA
atgtgttcactttag

SEQ ID NO: 9428 - DNA, 72 bp, synthetic construct
  misc_feature 1..72: note = Synthetic
  source 1..72: mol_type = other DNA
atgacggaccagcttacactcggctgcagatcccacccgtattgtccaccgactcggtccgcactagcctga

SEQ ID NO: 9429 - DNA, 30 bp, synthetic construct
  misc_feature 1..30: note = Synthetic
  source 1..30: mol_type = other DNA
aagattattaatacgctaggtacgatttaa

SEQ ID NO: 9430 - DNA, 24 bp, synthetic construct
  source 1..24: mol_type = other DNA
  misc_feature 1..24: note = Synthetic
atgttgacgggaaaaaggatttga

SEQ ID NO: 9431 - DNA, 213 bp, synthetic construct
  source 1..213: mol_type = other DNA
  misc_feature 1..213: note = Synthetic
gtgggtgtgattaaaaaaccgctgcacttgggcaatcgcaaaaacatgttgttcttgtcttttttactcgtgtgtctttgtgaagaggtgcgaatgctcaacctaatgactacagaagtttcggcaactgaatttgcatcaattgcgtctaaaaacatggaaacggatgtatcgacatccagcgacgactcggtccgcactagcctgaggtaa

SEQ ID NO: 9432 - DNA, 213 bp, synthetic construct
  source 1..213: mol_type = other DNA
  misc_feature 1..213: note = Synthetic
gtgggtgtgattaaaaaaccgctgcacttgggcaatcgcaaaaacgccttgttcttgtcttttttactcgtgtgtctttgtgaagaggtgcgaatgctcaacctaatgactacagaagtttcggcaactgaatttgcatcaattgcgtctaaaaacatggaaacggatgtatcgacatccagcgacgactcggtccgcactagcctgaggtaa

SEQ ID NO: 9433 - DNA, 78 bp, synthetic construct
  misc_feature 1..78: note = Synthetic
  source 1..78: mol_type = other DNA
atgactagcatcaagcaaactaatttctttgagcaagagagttccgattacaccatgctggtggtagatgacctttga

SEQ ID NO: 9434 - DNA, 21 bp, synthetic construct
  misc_feature 1..21: note = Synthetic
  source 1..21: mol_type = other DNA
atggtcacagcatatatataa

SEQ ID NO: 9435 - DNA, 168 bp, synthetic construct
  misc_feature 1..168: note = Synthetic
  source 1..168: mol_type = other DNA
atgggcgctcaagtttcaacacagaaaagtggatctcatgagaatcaaaatatattaactaatggatctaatcaaaccttcacagttattaattattacaaagatgcagctagttcatcttcagctggacaatctttttccgactcggtccgcactagcctgaggtaa

SEQ ID NO: 9436 - DNA, 168 bp, synthetic construct
  source 1..168: mol_type = other DNA
  misc_feature 1..168: note = Synthetic
atggcaccaaaaagaaaagcatcatccacctgtaaaacacccaaaagacaatgtatacctaagccgggatgctgccctaatgttgcctcagttccaaaactgcttgttaaaggaggagtggaagtattatctgtggttaccgactcggtccgcactagcctgaggtaa

SEQ ID NO: 9437 - DNA, 93 bp, synthetic construct
  source 1..93: mol_type = other DNA
  misc_feature 1..93: note = Synthetic
atgagaacactggtgaaatctctgagaaagtcaagctgggtactaaggcactggctggtcaatggctggcttacggtgttactcgcagtgtga

SEQ ID NO: 9438 - DNA, 93 bp, synthetic construct
  source 1..93: mol_type = other DNA
  misc_feature 1..93: note = Synthetic
atgagaacactggtgaaatctctgagaaagtcaagctgggtactaaggcactggctggtcagccgctggcttacggtgttactcgcagtgtga

SEQ ID NO: 9439 - DNA, 210 bp, synthetic construct
  misc_feature 1..210: note = Synthetic
  source 1..210: mol_type = other DNA
atgtctatgggggcgctaacggatcttgggcaaaatatgctgtacgcaaactcagcccatgctctagacatgacatttgaggtggatccaatggatgagcctacccttctttatgttttatttgaagttttcgacgtggtacgcattcaccagccacaccgcggcgtcattgaagcggtctacctgccgactcggtccgcactagcctga

SEQ ID NO: 9440 - DNA, 15 bp, synthetic construct
  source 1..15: mol_type = other DNA
  misc_feature 1..15: note = Synthetic
ttgatccgcggctaa

SEQ ID NO: 9441 - DNA, 207 bp, synthetic construct
  misc_feature 1..207: note = Synthetic
  source 1..207: mol_type = other DNA
attacaaagttacctgtcaaacggtgcagccaagccaagttagaactcgtcagaatgaatattatcaagcagcaaggcggcatgtttggaccaaataaaaacatctcagaatggtgtatccctcaaaacgagggaaaatcccctaaaacgagggataaaacatccctcaaattgggggattgctcgactcggtccgcactagcctga

SEQ ID NO: 9442 - DNA, 201 bp, synthetic construct
  source 1..201: mol_type = other DNA
  misc_feature 1..201: note = Synthetic
atgcttctccagcgtccggagttctgcctgaagcgtcagcagggcagcatgagcactgtcttcctgacgatcgcccgcagacaccttcacgctggactgtttcggctttttcagcgtcgcttcataatcctttttcgccgccgccatcagcgtgttgtaatccgcctgcaggattttcccgtccgactcggtccgcactag

SEQ ID NO: 9443 - DNA, 153 bp, synthetic construct
  source 1..153: mol_type = other DNA
  misc_feature 1..153: note = Synthetic
atgagcactgtcttcctgacgatcgcccgcagacaccttcacgctggactgtttcggctttttcagcgtcgcttcataatcctttttcgccgccgccatcagcgtgttgtaatccgcctgcagggccttcccgtccgactcggtccgcactag

SEQ ID NO: 9444 - DNA, 150 bp, synthetic construct
  source 1..150: mol_type = other DNA
  misc_feature 1..150: note = Synthetic
gtgcttcaagtttcttctaatgttctggactgtgctaacgataactggtggtgctctttactagatttagacacttctgactgggaaccactaactcatactaacagactaatggcaatatacgactcggtccgcactagcctgaggtaa

SEQ ID NO: 9445 - DNA, 51 bp, synthetic construct
  misc_feature 1..51: note = Synthetic
  source 1..51: mol_type = other DNA
atgtctcaggcatctaccatgtcaccaatgactgcccgaattcaagcatag

SEQ ID NO: 9446 - DNA, 33 bp, synthetic construct
  source 1..33: mol_type = other DNA
  misc_feature 1..33: note = Synthetic
atgtcaccaatgactgcccgaattcaagcatag

SEQ ID NO: 9447 - DNA, 201 bp, synthetic construct
  misc_feature 1..201: note = Synthetic
  source 1..201: mol_type = other DNA
atgcttctccagcgtccggagttctgcctgaagcgtcagcagggcagcatgagcactgtcttcctgacgatcgcccgcagacaccttcacggccgactgtttcggctttttcagcgtcgcttcataatcctttttcgccgccgccatcagcgtgttgtaatccgcctgcaggattttcccgtccgactcggtccgcactag

SEQ ID NO: 9448 - DNA, 153 bp, synthetic construct
  source 1..153: mol_type = other DNA
  misc_feature 1..153: note = Synthetic
atgagcactgtcttcctgacgatcgcccgcagacaccttcacgctggactgtttcggctttttcagcgtcgcttcataatcctttttcgccgccgccatcagcgtgttgtaatccgcctgcaggattttcccgtccgactcggtccgcactag

SEQ ID NO: 9449 - DNA, 213 bp, synthetic construct
  misc_feature 1..213: note = Synthetic
  source 1..213: mol_type = other DNA
atgtccatgggcgcgctcaccgacctcggccagaacatgctctatgctaactccgcccacgcgctagacatgaatttcgaagtcgaccccatggatgagtccacccttctctatgttgtcttcgaagtcttcgacgtcgtccgagtgcaccagccccaccgcggcgtcattgaggccgtctacctcgactcggtccgcactagcctgaggtaa

SEQ ID NO: 9450 - DNA, 114 bp, synthetic construct
  misc_feature 1..114: note = Synthetic
  source 1..114: mol_type = other DNA
atgagtccacccttctctatgttgtcttcgaagtcttcgacgtcgtccgagtgcaccagccccaccgcggcgtcattgaggccgtctacctcgactcggtccgcactagcctga

SEQ ID NO: 9451 - DNA, 168 bp, synthetic construct
  source 1..168: mol_type = other DNA
  misc_feature 1..168: note = Synthetic
atgttcgtggccagttggttcccccgcgagcggggccctgcgggacgcgtctcaacgtgggagtcacagccctggtcgcaggcgaggacccccatcttgacacacgtcccccgacgcagacacttgcgcgtgacgagacccgactcggtccgcactagcctgaggtaa

SEQ ID NO: 9452 - DNA, 102 bp, synthetic construct
  source 1..102: mol_type = other DNA
  misc_feature 1..102: note = Synthetic
gtgggagtcacagccctggtcgcaggcgaggacccccatcttgacacacgtcccccgacgcagacacttgcgcgtgacgagacccgactcggtccgcactag

SEQ ID NO: 9453 - DNA, 174 bp, synthetic construct
  source 1..174: mol_type = other DNA
  misc_feature 1..174: note = Synthetic
ttgccggccttcgtggccagttggttcccccgcgagcggggccctgcgggacgcgtctcaacgtgggagtcacagccctggtcgcaggcgaggacccccatcttgacacacgtcccccgacgcagacacttgcgcgtgacgagacccgactcggtccgcactagcctgaggtaa

SEQ ID NO: 9454 - DNA, 195 bp, synthetic construct
  source 1..195: mol_type = other DNA
  misc_feature 1..195: note = Synthetic
acgcctcgcgctcacgccgccgccgcgatggagaactggtcggcgctcgagctcctgcctaaagtaggcattcccactgactttctgacgcacgtcaagaccagcgccggcgaggagatgttcgaggccttacgcatctactacggcgatgaccccgagcgttacaacgactcggtccgcactagcctgaggtaa

SEQ ID NO: 9455 - DNA, 195 bp, synthetic construct
  source 1..195: mol_type = other DNA
  misc_feature 1..195: note = Synthetic
acgcctcgcgctcacgccgccgccgcggccgagaactggtcggcgctcgagctcctgcctaaagtaggcattcccactgactttctgacgcacgtcaagaccagcgccggcgaggagatgttcgaggccttacgcatctactacggcgatgaccccgagcgttacaacgactcggtccgcactagcctgaggtaa

SEQ ID NO: 9456 - DNA, 168 bp, synthetic construct
  misc_feature 1..168: note = Synthetic
  source 1..168: mol_type = other DNA
atgaacctgcacgcggcgtacatcgactacgcgctgcggcgctcgcagcacatgcaggccgagatgagcggcgccgacaacgtgctgctcaaggactaccagctcttcgtggccaaagtcttcctggggctggacagcatcgactcggtccgcactagcctgaggtaa

SEQ ID NO: 9457 - DNA, 24 bp, synthetic construct
  source 1..24: mol_type = other DNA
  misc_feature 1..24: note = Synthetic
attattgttaaaggacagcattag

SEQ ID NO: 9458 - DNA, 36 bp, synthetic construct
  source 1..36: mol_type = other DNA
  misc_feature 1..36: note = Synthetic
atcaaagtacacctagagacagcccttaaaatatag

SEQ ID NO: 9459 - DNA, 87 bp, synthetic construct
  misc_feature 1..87: note = Synthetic
  source 1..87: mol_type = other DNA
ttgcagcttttagatgtacttacaccaaagaagattaccgtccttacgagaaaacagatcgactcggtccgcactagcctgaggtaa

SEQ ID NO: 9460 - DNA, 168 bp, synthetic construct
  source 1..168: mol_type = other DNA
  misc_feature 1..168: note = Synthetic
atggcggccgaggatttcctaaccatcttcttagatgatgatgaatcctggaatgaaactctaaatatgagcggatatgactactctggaaacttcagcctagaagtgagcgtgtgtgagatgaccaccgtggtgccttacgactcggtccgcactagcctgaggtaa

SEQ ID NO: 9461 - DNA, 27 bp, synthetic construct
  misc_feature 1..27: note = Synthetic
  source 1..27: mol_type = other DNA
atgatgaatcctggaatgaaactctaa

SEQ ID NO: 9462 - DNA, 36 bp, synthetic construct
  source 1..36: mol_type = other DNA
  misc_feature 1..36: note = Synthetic
gtggctaaacaacacctatactacttgttattgtag

SEQ ID NO: 9463 - DNA, 36 bp, synthetic construct
  misc_feature 1..36: note = Synthetic
  source 1..36: mol_type = other DNA
atgcgtgtccttcctcccggccagtcatccccatga

SEQ ID NO: 9464 - DNA, 15 bp, synthetic construct
  source 1..15: mol_type = other DNA
  misc_feature 1..15: note = Synthetic
atggttaacgcataa

SEQ ID NO: 9465 - DNA, 108 bp, synthetic construct
  source 1..108: mol_type = other DNA
  misc_feature 1..108: note = Synthetic
ttgaagtccaagtgcctattcgcacgcggcgactactcgtcccttggatccgggagagcaaaatgtgggtactaccacccccgttgcctccacgacctccccacttaa

SEQ ID NO: 9466 - DNA, 90 bp, synthetic construct
  misc_feature 1..90: note = Synthetic
  source 1..90: mol_type = other DNA
atgtgggtactaccacccccgttgcctccacgacctccccacttaatagaattcccgccgtctcctccgccacgactcggtccgcactag

SEQ ID NO: 9467 - DNA, 114 bp, synthetic construct
  misc_feature 1..114: note = Synthetic
  source 1..114: mol_type = other DNA
atgacattgaagtccaagtgcctattcgcacgcggcgactactcgtcccttggatccgggagagcaaaatgtgggtactaccacccccgttgcctccacgacctccccacttaa

SEQ ID NO: 9468 - DNA, 24 bp, synthetic construct
  misc_feature 1..24: note = Synthetic
  source 1..24: mol_type = other DNA
ttggcgatcacaaaagagatataa

SEQ ID NO: 9469 - DNA, 168 bp, synthetic construct
  source 1..168: mol_type = other DNA
  misc_feature 1..168: note = Synthetic
ttgtccactaggtattttgatactaagtctttgacacaggctatgtcttcctccatgtttagctgcaggtatgatgttcagaaccctcagaacatgtggtctgctagagcaacagttcgctatgggatagggtcccgtaggggcacagaagacacaagaggcaattaa

SEQ ID NO: 9470 - DNA, 201 bp, synthetic construct
  source 1..201: mol_type = other DNA
  misc_feature 1..201: note = Synthetic
aagcgcggcaagcgcccgacagccttccagttcctgcaagaaatcaagccggaagccgtagcgtacatcaccattaagaccactctggcttgcctaaccagtgctgacaatacaaccgttcaggctgtagcaagcgcaatcggtcgggccattgaggacgaggctcgcttcggtcgtatccgtcgactcggtccgcactag

SEQ ID NO: 9471 - DNA, 210 bp, synthetic construct
  misc_feature 1..210: note = Synthetic
  source 1..210: mol_type = other DNA
gtgaaagctaagcgcggcaagcgcccgacagccttccagttcctgcaagaaatcaagccggaagccgtagcgtacatcaccattaagaccactctggcttgcctaaccagtgctgacaatacaaccgttcaggctgtagcaagcgcaatcggtcgggccattgaggacgaggctcgcttcggtcgtatccgtcgactcggtccgcactag

SEQ ID NO: 9472 - DNA, 210 bp, synthetic construct
  source 1..210: mol_type = other DNA
  misc_feature 1..210: note = Synthetic
gtgaaagctaagcgcggcaagcgcccgacagccttccagttcctgcaagaaatcaagccggaagccgtagcgtacatcaccattaagaccactctggcttgcctaaccagtggccacaatacaaccgttcaggctgtagcaagcgcaatcggtcgggccattgaggacgaggctcgcttcggtcgtatccgtcgactcggtccgcactag

SEQ ID NO: 9473 - DNA, 135 bp, synthetic construct
  misc_feature 1..135: note = Synthetic
  source 1..135: mol_type = other DNA
atctccagtgagaccgggatcgaaatactggagtttgtggtaaataccctaatgggagacgacccggaaccgccagtgcagcctttcgatccacctacgctgcacgacgactcggtccgcactagcctgaggtaa

SEQ ID NO: 9474 - DNA, 117 bp, synthetic construct
  source 1..117: mol_type = other DNA
  misc_feature 1..117: note = Synthetic
ttgcagatcgatttgatttcgacggttagctcaagttggcttgactgggttgttaagcggaacgaggcaagcaacgcaggctcaggtccgagcgagattcctctcatgtggtactag

SEQ ID NO: 9475 - DNA, 138 bp, synthetic construct
  misc_feature 1..138: note = Synthetic
  source 1..138: mol_type = other DNA
atgttattactaatcaaagaagtattgcgacaacggttaatttgcgtgatggacagactcttttactcggtggcctcactgattataaaaacacttctcaggattctggcgtaccgttcctgtctaaaatccctttaa

SEQ ID NO: 9476 - DNA, 75 bp, synthetic construct
  misc_feature 1..75: note = Synthetic
  source 1..75: mol_type = other DNA
atccctttaatcggcctcctgtttagctcccgctctgattctaacgacgactcggtccgcactagcctgaggtaa

SEQ ID NO: 9477 - DNA, 75 bp, synthetic construct
  source 1..75: mol_type = other DNA
  misc_feature 1..75: note = Synthetic
atccctttaatcggcctcctgtttagctcccgctgccattctaacgacgactcggtccgcactagcctgaggtaa

SEQ ID NO: 9478 - DNA, 138 bp, synthetic construct
  source 1..138: mol_type = other DNA
  misc_feature 1..138: note = Synthetic
atgttattactaatcaaagaagtattgcgacaacggttaatttgcgtgatggacagactcttttactcggtggcctcactgattataaaaacacttctcgccattctggcgtaccgttcctgtctaaaatccctttaa

SEQ ID NO: 9479 - DNA, 174 bp, synthetic construct
  source 1..174: mol_type = other DNA
  misc_feature 1..174: note = Synthetic
aggaacggggacaaaattcgtctacgtttgaccctaaacaagcgtaccagcgctttatcgatgagcacagagacgagctcacacttgagaatattagggtcttcttcctgcgcgcgaatgaggctaagcagaagctccgtaagagttcggcaaagccgactcggtccgcactag

SEQ ID NO: 9480 - DNA, 114 bp, synthetic construct
  misc_feature 1..114: note = Synthetic
  source 1..114: mol_type = other DNA
atgagcacagagacgagctcacacttgagaatattagggtcttcttcctgcgcgcgaatgaggctaagcagaagctccgtaagagttcggcaaagccgactcggtccgcactag

SEQ ID NO: 9481 - DNA, 48 bp, synthetic construct
  source 1..48: mol_type = other DNA
  misc_feature 1..48: note = Synthetic
atagtcgcttatattattatcttcatcttcatcgtcatcctcctctga

SEQ ID NO: 9482 - DNA, 39 bp, synthetic construct
  misc_feature 1..39: note = Synthetic
  source 1..39: mol_type = other DNA
atggaagccatcaaaaccatattgataaacgtatgctaa

SEQ ID NO: 9483 - DNA, 168 bp, synthetic construct
  misc_feature 1..168: note = Synthetic
  source 1..168: mol_type = other DNA
atgcgagagacaaaatgtgatattggtgtagcgatgttaaacggattaatatatgtcataggcggagttgttaaaggtgacacatgtaccgacacacttgagagtttatcagaagatggatggatgatgcatcaacgtctcgactcggtccgcactagcctgaggtaa

SEQ ID NO: 9484 - DNA, 147 bp, synthetic construct
  source 1..147: mol_type = other DNA
  misc_feature 1..147: note = Synthetic
attggtgtagcgatgttaaacggattaatatatgtcataggcggagttgttaaaggtgacacatgtaccgacacacttgagagtttatcagaagatggatggatgatgcatcaacgtctcgactcggtccgcactagcctgaggtaa

SEQ ID NO: 9485 - DNA, 192 bp, synthetic construct
  source 1..192: mol_type = other DNA
  misc_feature 1..192: note = Synthetic
atggtcgccccgctgtttttgatgaggcggattttccggcagttgccgtttatctcaccggcgctgaatacacgggcgaagagctggacagcgatacctggcaggcggagctgcatatcgaagttttcctgcctgctcaggtgccggattcagagctggatgcgtggatggagtcccggatttatccggtga

SEQ ID NO: 9486 - DNA, 192 bp, synthetic construct
  source 1..192: mol_type = other DNA
  misc_feature 1..192: note = Synthetic
atggtcgccccgctgtttttgatgaggcggattttccggcagttgccgtttatctcaccggcgctgaatacacgggcgaagagctggacagcgatacctggcaggcggagctgcatatcgaagttttcctgcctgctcaggtgccggattcagaggccgatgcgtggatggagtcccggatttatccggtga

SEQ ID NO: 9487 - DNA, 12 bp, synthetic construct
  misc_feature 1..12: note = Synthetic
  source 1..12: mol_type = other DNA
atgtgcgaataa

SEQ ID NO: 9488 - DNA, 39 bp, synthetic construct
  source 1..39: mol_type = other DNA
  misc_feature 1..39: note = Synthetic
ttgcatcttctattagcgactcggtccgcactagcctga

SEQ ID NO: 9489 - DNA, 192 bp, synthetic construct
  misc_feature 1..192: note = Synthetic
  source 1..192: mol_type = other DNA
aaggataaatcgattccaatcacgatgaggagaatcatcctacccacggcaccacctgaatacatggaggctgtttacccaatgagaacaatgaattctggtgcagacaacactgccagtggccctaattacacaacaactggtgtgatgacaaatgatactcccgactcggtccgcactagcctgaggtaa

SEQ ID NO: 9490 - DNA, 192 bp, synthetic construct
  misc_feature 1..192: note = Synthetic
  source 1..192: mol_type = other DNA
aaggataaatcgattccaatcacggccaggagaatcatcctacccacggcaccacctgaatacatggaggctgtttacccaatgagaacaatgaattctggtgcagacaacactgccagtggccctaattacacaacaactggtgtgatgacaaatgatactcccgactcggtccgcactagcctgaggtaa

SEQ ID NO: 9491 - DNA, 12 bp, synthetic construct
  source 1..12: mol_type = other DNA
  misc_feature 1..12: note = Synthetic
atgtgtgcttga

SEQ ID NO: 9492 - DNA, 216 bp, synthetic construct
  source 1..216: mol_type = other DNA
  misc_feature 1..216: note = Synthetic
acgcggccctcgggctttggtgtttttggcaccttgccgcccggcgtcatgcacgccatcgctcccaggttgcttcttctttttgttctttctggtcttccggggacacgcggcgggtcgggtgtccccggaccaattaatccccccaacagcgatgttgttttcccgggaggttcccccgtggctcacgactcggtccgcactagcctgaggtaa

SEQ ID NO: 9493 - DNA, 90 bp, synthetic construct
  source 1..90: mol_type = other DNA
  misc_feature 1..90: note = Synthetic
gtgtccccggaccaattaatccccccaacagcgatgttgttttcccgggaggttcccccgtggctcacgactcggtccgcactagcctga

SEQ ID NO: 9494 - DNA, 159 bp, synthetic construct
  misc_feature 1..159: note = Synthetic
  source 1..159: mol_type = other DNA
atcgctcccaggttgcttcttctttttgttctttctggtcttccggggacacgcggcgggtcgggtgtccccggaccaattaatccccccaacagcgatgttgttttcccgggaggttcccccgtggctcacgactcggtccgcactagcctgaggtaa

SEQ ID NO: 9495 - DNA, 39 bp, synthetic construct
  source 1..39: mol_type = other DNA
  misc_feature 1..39: note = Synthetic
ataatattctttgtggttttttggttgccgccttactaa

SEQ ID NO: 9496 - DNA, 168 bp, synthetic construct
  source 1..168: mol_type = other DNA
  misc_feature 1..168: note = Synthetic
atgtcatctttaaggaatttgctttgtcggctgatttctccgctgtgtaaacatggttcgtacagtcatttgcagttatttcttattggagatgtcagcaaatctgaaaattgcgtattatcgatgttcgtaacgaataacgactcggtccgcactagcctgaggtaa

SEQ ID NO: 9497 - DNA, 81 bp, synthetic construct
  source 1..81: mol_type = other DNA
  misc_feature 1..81: note = Synthetic
atggttcgtacagtcatttgcagttatttcttattggagatgtcagcaaatctgaaaattgcgtattatcgatgttcgtaa

SEQ ID NO: 9498 - DNA, 27 bp, synthetic construct
  source 1..27: mol_type = other DNA
  misc_feature 1..27: note = Synthetic
gtggttttttggttgccgccttactaa

SEQ ID NO: 9499 - DNA, 18 bp, synthetic construct
  source 1..18: mol_type = other DNA
  misc_feature 1..18: note = Synthetic
atgctgcctcatctttaa

SEQ ID NO: 9500 - DNA, 135 bp, synthetic construct
  misc_feature 1..135: note = Synthetic
  source 1..135: mol_type = other DNA
atttctccgctgtgtaaacatggttcgtacagtcatttgcagttatttcttattggagatgtcagcaaatctgaaaattgcgtattatcgatgttcgtaacgaataacgactcggtccgcactagcctgaggtaa

SEQ ID NO: 9501 - DNA, 93 bp, synthetic construct
  misc_feature 1..93: note = Synthetic
  source 1..93: mol_type = other DNA
atgaaaaaaactaacagagatcatggaagactctcaactatatcaagctctcaagaattacccaaagcttcaggacactctcgactcaattga

SEQ ID NO: 9502 - DNA, 36 bp, synthetic construct
  source 1..36: mol_type = other DNA
  misc_feature 1..36: note = Synthetic
aagaaaacgactttgacgattatgaagaatatgtaa

SEQ ID NO: 9503 - DNA, 228 bp, synthetic construct
  source 1..228: mol_type = other DNA
  misc_feature 1..228: note = Synthetic
ttgacgtacctactggtcacctccgggtcaccctcggacacgagcgagctcaaagcaaacatgctgctcagccgtcacagggagcgccttgccgccaacctgcaggagaccgccaaagacgccggagagaggtgggaactgagtgccccgacattcacgcgacactgtcccaaaacggcacggatggcgcacccttttatcgactcggtccgcactagcctgaggtaa

SEQ ID NO: 9504 - DNA, 228 bp, synthetic construct
  misc_feature 1..228: note = Synthetic
  source 1..228: mol_type = other DNA
ttgacgtacctactggtcacctccgggtcaccctcggacacgagcgagctcaaagcaaacgccctgctcagccgtcacagggagcgccttgccgccaacctgcaggagaccgccaaagacgccggagagaggtgggaactgagtgccccgacattcacgcgacactgtcccaaaacggcacggatggcgcacccttttatcgactcggtccgcactagcctgaggtaa

SEQ ID NO: 9505 - DNA, 168 bp, synthetic construct
  misc_feature 1..168: note = Synthetic
  source 1..168: mol_type = other DNA
atgaggagggcaattctacctactgcaccgccagaatacatagaggctgtctacccaatgagaacggttagtactagtatcaacagtactgccagtggtccgaactttccagcaccggatgtaatgatgagtgatacacccgactcggtccgcactagcctgaggtaa

SEQ ID NO: 9506 - DNA, 183 bp, synthetic construct
  source 1..183: mol_type = other DNA
  misc_feature 1..183: note = Synthetic
ttgatcactaccaccgccaggagggcaattctacctactgcaccgccagaatacatagaggctgtctacccaatgagaacggttagtactagtatcaacagtactgccagtggtccgaactttccagcaccggatgtaatgatgagtgatacacccgactcggtccgcactagcctgaggtaa

SEQ ID NO: 9507 - DNA, 213 bp, synthetic construct
  source 1..213: mol_type = other DNA
  misc_feature 1..213: note = Synthetic
ataacgcccaattcaccaagagccgaagccaccctggggggttttggaagcctaggacttgattgtgaaccgaggacaggccttgacttttcagatttgtattacttgactatgaataacaagcactggttggttcacaaggagtggttccacgacattccattaccttggcacgctggggcagacaccggaactcgactcggtccgcactag

SEQ ID NO: 9508 - DNA, 51 bp, synthetic construct
  misc_feature 1..51: note = Synthetic
  source 1..51: mol_type = other DNA
ttgattgtgaaccgaggacaggccttgacttttcagatttgtattacttga

SEQ ID NO: 9509 - DNA, 213 bp, synthetic construct
  misc_feature 1..213: note = Synthetic
  source 1..213: mol_type = other DNA
ataacgcccaattcaccaagagccgaagccaccctggggggttttggaagcctaggacttgattgtgaaccgaggacaggccttgacttttcagatttgtattacttgactatgaataacaagcactggttggttcacaaggagtggttccacgacattccattaccttggcacggccgggcagacaccggaactcgactcggtccgcactag

SEQ ID NO: 9510 - DNA, 63 bp, synthetic construct
  misc_feature 1..63: note = Synthetic
  source 1..63: mol_type = other DNA
atgaatgtcatactatcacaaaggcgtttggatatctgcacgaggacaaggctatcgcattaa

SEQ ID NO: 9511 - DNA, 168 bp, synthetic construct
  source 1..168: mol_type = other DNA
  misc_feature 1..168: note = Synthetic
atgagtcaattgttctcaaccttcatcttttgcttgttcataggaagttccataggagacttccctctatatacaattcccgaacggcttaatccctggactccaattgacttaatccacctgagctgtcctaacaacttcgactcggtccgcactagcctgaggtaa

SEQ ID NO: 9512 - DNA, 159 bp, synthetic construct
  misc_feature 1..159: note = Synthetic
  source 1..159: mol_type = other DNA
ttgttctcaaccttcatcttttgcttgttcataggaagttccataggagacttccctctatatacaattcccgaacggcttaatccctggactccaattgacttaatccacctgagctgtcctaacaacttcgactcggtccgcactagcctgaggtaa

SEQ ID NO: 9513 - DNA, 93 bp, synthetic construct
  source 1..93: mol_type = other DNA
  misc_feature 1..93: note = Synthetic
atgaaaaaaactaacagagatcgccgaagactctcaactatatcaagctctcaagaattacccaaagcttcaggacactctcgactcaattga

SEQ ID NO: 9514 - DNA, 87 bp, synthetic construct
  misc_feature 1..87: note = Synthetic
  source 1..87: mol_type = other DNA
acgtctttccaagtgtcaaattctaattttttttcattgatagtaccaaattcttctatctctttaactacttgcatagataggtaa

SEQ ID NO: 9515 - DNA, 45 bp, synthetic construct
  source 1..45: mol_type = other DNA
  misc_feature 1..45: note = Synthetic
gtgatgcctacatgccgttttttgaaactgaatagatgcatctag

SEQ ID NO: 9516 - DNA, 15 bp, synthetic construct
  source 1..15: mol_type = other DNA
  misc_feature 1..15: note = Synthetic
gtggctttaccttaa

SEQ ID NO: 9517 - DNA, 150 bp, synthetic construct
  misc_feature 1..150: note = Synthetic
  source 1..150: mol_type = other DNA
atttgttgtgtagcatcacctgagctgcttcctgatagcgaactgacagagcttatatgcaatgatttggatgactttgtacaactaatgctacgcatggagattcgggatcggggttttgacgactcggtccgcactagcctgaggtaa

SEQ ID NO: 9518 - DNA, 153 bp, synthetic construct
  misc_feature 1..153: note = Synthetic
  source 1..153: mol_type = other DNA
ctgaggaagaggaggaaaaagaaaaattgtcaacgcataatgacattgaagtccaagtgcctattcgcacgcggcgactactcgtcccttggatccgggagagcaaaatgtgggtactaccacccccgttgcctccacgacctccccacttaa

SEQ ID NO: 9519 - DNA, 45 bp, synthetic construct
  misc_feature 1..45: note = Synthetic
  source 1..45: mol_type = other DNA
attcccgccgtctcctccgccacgactcggtccgcactagcctga

SEQ ID NO: 9520 - DNA, 54 bp, synthetic construct
  source 1..54: mol_type = other DNA
  misc_feature 1..54: note = Synthetic
ttgaactcttgccagaattcactgaggaagaggaggaaaaagaaaaattgttaa

SEQ ID NO: 9521 - DNA, 105 bp, synthetic construct
  misc_feature 1..105: note = Synthetic
  source 1..105: mol_type = other DNA
aagtccaagtgcctattcgcacgcggcgactactcgtcccttggatccgggagagcaaaatgtgggtactaccacccccgttgcctccacgacctccccacttaa

SEQ ID NO: 9522 - DNA, 99 bp, synthetic construct
  misc_feature 1..99: note = Synthetic
  source 1..99: mol_type = other DNA
aagtgcctattcgcacgcggcgactactcgtcccttggatccgggagagcaaaatgtgggtactaccacccccgttgcctccacgacctccccacttaa

SEQ ID NO: 9523 - DNA, 96 bp, synthetic construct
  source 1..96: mol_type = other DNA
  misc_feature 1..96: note = Synthetic
atgtactcaaaaaggatattgataacgtacgtcgaggtttcgcggacgcgttcaacccgaggctggcaaaactcgactcggtccgcactagcctga

SEQ ID NO: 9524 - DNA, 66 bp, synthetic construct
  source 1..66: mol_type = other DNA
  misc_feature 1..66: note = Synthetic
atgtttattgtagacaaacgcgtcttaggttatcttctgggacggaacttcaaatgcctccgctag

SEQ ID NO: 9525 - DNA, 165 bp, synthetic construct
  misc_feature 1..165: note = Synthetic
  source 1..165: mol_type = other DNA
atgcctccgctagtcgaattcgggccaagtgttttcgtttgggacaacgttgccacactcgtttttacgatgtactcaaaaaggatattgataacgtacgtcgaggtttcgcggacgcgttcaacccgaggctggcaaaactcgactcggtccgcactagcctga

SEQ ID NO: 9526 - DNA, 81 bp, synthetic construct
  misc_feature 1..81: note = Synthetic
  source 1..81: mol_type = other DNA
ttgaccaacgagaaaacgtattttgttgtctgtgacgtttccgcagataacagaatggctacatgtatttataaaaattaa

SEQ ID NO: 9527 - DNA, 117 bp, synthetic construct
  misc_feature 1..117: note = Synthetic
  source 1..117: mol_type = other DNA
atgtggcgaatagctctacaagctccttgtactacttctataaccctatctgtcccctcagctactgctatggctgtggcattgagcaagctaacagcactattctttagttcctga

SEQ ID NO: 9528 - DNA, 153 bp, synthetic construct
  misc_feature 1..153: note = Synthetic
  source 1..153: mol_type = other DNA
ctgaggaagaggaggaaaaagaaaaattgttaccgcataatgacattgaagtccaagtgcctattcgcacgcggcgactactcgtcccttggatccgggagagcaaaatgtgggtactaccacccccgttgcctccacgacctccccacttaa

SEQ ID NO: 9529 - DNA, 24 bp, synthetic construct
  misc_feature 1..24: note = Synthetic
  source 1..24: mol_type = other DNA
atggaactaagagactgcgcttga

SEQ ID NO: 9530 - DNA, 168 bp, synthetic construct
  source 1..168: mol_type = other DNA
  misc_feature 1..168: note = Synthetic
atggcagaaggcggttttggagcggactcggtggggcgcggcggagaaaaggcctctgtgactaggggaggcaggtgggacttggggagctcggacgacgaatcaagcacctccacaaccagcacggatatggacgacctcgactcggtccgcactagcctgaggtaa

SEQ ID NO: 9531 - DNA, 96 bp, synthetic construct
  source 1..96: mol_type = other DNA
  misc_feature 1..96: note = Synthetic
aggtgggacttggggagctcggacgacgaatcaagcacctccacaaccagcacggatatggacgacctcgactcggtccgcactagcctgaggtaa

SEQ ID NO: 9532 - DNA, 168 bp, synthetic construct
  misc_feature 1..168: note = Synthetic
  source 1..168: mol_type = other DNA
atggggcccatactagtcttgcttgttttactttcgcttttggaaccgggttctgccaattacgatccatgtctagacttcgacccagaaaactgcacacttacttttgcacccgacacaagccgcatctgtggagttctcgactcggtccgcactagcctgaggtaa

SEQ ID NO: 9533 - DNA, 159 bp, synthetic construct
  source 1..159: mol_type = other DNA
  misc_feature 1..159: note = Synthetic
atactagtcttgcttgttttactttcgcttttggaaccgggttctgccaattacgatccatgtctagacttcgacccagaaaactgcacacttacttttgcacccgacacaagccgcatctgtggagttctcgactcggtccgcactagcctgaggtaa

SEQ ID NO: 9534 - DNA, 90 bp, synthetic construct
  misc_feature 1..90: note = Synthetic
  source 1..90: mol_type = other DNA
atgtctagacttcgacccagaaaactgcacacttacttttgcacccgacacaagccgcatctgtggagttctcgactcggtccgcactag

SEQ ID NO: 9535 - DNA, 57 bp, synthetic construct
  source 1..57: mol_type = other DNA
  misc_feature 1..57: note = Synthetic
ttgctacctatacctcccttgcttttcctacttagtggtgctttgttgctggtttaa

SEQ ID NO: 9536 - DNA, 168 bp, synthetic construct
  misc_feature 1..168: note = Synthetic
  source 1..168: mol_type = other DNA
atggggaagatcaccctagtgtgcggtgtgctggtggcggtactttcgattttgggtctgggcagcgcggctgtagtgacggagaaggccgatccctgcttgacttttaaccccgacaaatgccagctgagttttcagcccgactcggtccgcactagcctgaggtaa

SEQ ID NO: 9537 - DNA, 159 bp, synthetic construct
  source 1..159: mol_type = other DNA
  misc_feature 1..159: note = Synthetic
atcaccctagtgtgcggtgtgctggtggcggtactttcgattttgggtctgggcagcgcggctgtagtgacggagaaggccgatccctgcttgacttttaaccccgacaaatgccagctgagttttcagcccgactcggtccgcactagcctgaggtaa

SEQ ID NO: 9538 - DNA, 168 bp, synthetic construct
  source 1..168: mol_type = other DNA
  misc_feature 1..168: note = Synthetic
atggctagccggaggcgcaaacttcggaatttcctaaacaaggaatgcatatggactgttaacccaatgtcaggggaccatatcaaggtctttaacgcctgcacctctatctcgccggtgtatgaccctgagctggtaaccgactcggtccgcactagcctgaggtaa

SEQ ID NO: 9539 - DNA, 87 bp, synthetic construct
  source 1..87: mol_type = other DNA
  misc_feature 1..87: note = Synthetic
atctctcttggtaatatggatactaattgtagctatttaagccggtgccgcagcaagcatacagacgactgtgaatacactcagtga

SEQ ID NO: 9540 - DNA, 87 bp, synthetic construct
  source 1..87: mol_type = other DNA
  misc_feature 1..87: note = Synthetic
atggatactaattgtagctatttaagccggtgccgcggcaagcatacagacgacggtgaatacactcagcgaacgtatctcgtctaa

SEQ ID NO: 9541 - DNA, 207 bp, synthetic construct
  source 1..207: mol_type = other DNA
  misc_feature 1..207: note = Synthetic
atgcaacaagcttacataggggctacgctggttagcatagctccgagtatgcgtgtcataatcagtgtgggttcttttgtcatggttcctggcggggaagtggccgcgctggtccgtgcagacctgcacgattatgttcagctggccctgcgaagggacctacgggatcgcggtattttcgactcggtccgcactagcctgaggtaa

SEQ ID NO: 9542 - DNA, 192 bp, synthetic construct
  source 1..192: mol_type = other DNA
  misc_feature 1..192: note = Synthetic
attcaagattgcagcttaatgtttgaagattttgaggaaaatgcttttgctatgtttgtgtttcttgaagtgcgtgtgccagccttagtggaagccgtgattggtaatttggaaaatcgcatcttttttgacttggctgtaatttttcaccaacgcagcggtggcgactcggtccgcactagcctgaggtaa

SEQ ID NO: 9543 - DNA, 192 bp, synthetic construct
  misc_feature 1..192: note = Synthetic
  source 1..192: mol_type = other DNA
ttggcggccgaatctccgcgcaacatgatggcggcggcggtggtgcgagcggaggttaggcggcagcggcgagaggagaggaaaaagatggcgtccgcgaggacgacggaggatccacctgaaaaccacgttgtcgcggacgtggcttgtgggacgggcgccgtcgactcggtccgcactagcctgaggtaa

SEQ ID NO: 9544 - DNA, 165 bp, synthetic construct
  source 1..165: mol_type = other DNA
  misc_feature 1..165: note = Synthetic
acgccatggcggcggcggtggtgcgagcggaggttaggcggcagcggcgagaggagaggaaaaagatggcgtccgcgaggacgacggaggatccacctgaaaaccacgttgtcgcggacgtggcttgtgggacgggcgccgtcgactcggtccgcactagcctga

SEQ ID NO: 9545 - DNA, 114 bp, synthetic construct
  source 1..114: mol_type = other DNA
  misc_feature 1..114: note = Synthetic
atgacactgaagtccaagtgcctattcgcacgcggcgactactcgtcccttggatccgggagagcaaaatgtgggtactaccacccccgttgcctccacgacctccccacttaa

SEQ ID NO: 9546 - DNA, 114 bp, synthetic construct
  misc_feature 1..114: note = Synthetic
  source 1..114: mol_type = other DNA
atgacatcgaagtccaagtgcctattcgcacgcggcgactactcgtcccttggatccgggagagcaaaatgtgggtactaccacccccgttgcctccacgacctccccacttaa

SEQ ID NO: 9547 - DNA, 114 bp, synthetic construct
  misc_feature 1..114: note = Synthetic
  source 1..114: mol_type = other DNA
atgacattaaagtccaagtgcctattcgcacgcggcgactactcgtcccttggatccgggagagcaaaatgtgggtactaccacccccgttgcctccacgacctccccacttaa

SEQ ID NO: 9548 - DNA, 114 bp, synthetic construct
  misc_feature 1..114: note = Synthetic
  source 1..114: mol_type = other DNA
atgacattgaaatccaagtgcctattcgcacgcggcgactactcgtcccttggatccgggagagcaaaatgtgggtactaccacccccgttgcctccacgacctccccacttaa

SEQ ID NO: 9549 - DNA, 87 bp, synthetic construct
  source 1..87: mol_type = other DNA
  misc_feature 1..87: note = Synthetic
atggatactaattgtagctatttaagccggcgccgcggcaagcatacaaacgacggtgaatacactcagcgaacgtatctcgtctaa

SEQ ID NO: 9550 - DNA, 27 bp, synthetic construct
  misc_feature 1..27: note = Synthetic
  source 1..27: mol_type = other DNA
atgttccaacggaggcactttagctag

SEQ ID NO: 9551 - DNA, 33 bp, synthetic construct
  source 1..33: mol_type = other DNA
  misc_feature 1..33: note = Synthetic
gtgaacttctacgccaagaggacgagctgctaa

SEQ ID NO: 9552 - DNA, 195 bp, synthetic construct
  source 1..195: mol_type = other DNA
  misc_feature 1..195: note = Synthetic
acgccaagaggacgagctgctaacaacatgaggggcggagacgtcttcgcgagcgttgtcttgatgctgttacttgcactaccgcgaccgggagtgtcactcgcgagacggaaatgttgtttgaatcccacaaatcgtccgatcccgaatcctttactgcaagatctcgactcggtccgcactagcctgaggtaa

SEQ ID NO: 9553 - DNA, 78 bp, synthetic construct
  misc_feature 1..78: note = Synthetic
  source 1..78: mol_type = other DNA
acggaaatgttgtttgaatcccacaaatcgtccgatcccgaatcctttactgcaagatctcgactcggtccgcactag

SEQ ID NO: 9554 - DNA, 195 bp, synthetic construct
  misc_feature 1..195: note = Synthetic
  source 1..195: mol_type = other DNA
acgccaagaggacgagctgctaacaacgccaggggcggagacgtcttcgcgagcgttgtcttgatgctgttacttgcactaccgcgaccgggagtgtcactcgcgagacggaaatgttgtttgaatcccacaaatcgtccgatcccgaatcctttactgcaagatctcgactcggtccgcactagcctgaggtaa

SEQ ID NO: 9555 - DNA, 33 bp, synthetic construct
  source 1..33: mol_type = other DNA
  misc_feature 1..33: note = Synthetic
atgaacaaaatgggcattctagacaaaaaatga

SEQ ID NO: 9556 - DNA, 168 bp, synthetic construct
  misc_feature 1..168: note = Synthetic
  source 1..168: mol_type = other DNA
atgaggagtattgcggggctagataaattaaaaatggaaatttttaatgtagaagaattgataaatatgaaaccttttaagaatatgaataaaataacaattaatcaaaaggataattgtatattagcaaatcgatgcttcgactcggtccgcactagcctgaggtaa

SEQ ID NO: 9557 - DNA, 135 bp, synthetic construct
  source 1..135: mol_type = other DNA
  misc_feature 1..135: note = Synthetic
atggaaatttttaatgtagaagaattgataaatatgaaaccttttaagaatatgaataaaataacaattaatcaaaaggataattgtatattagcaaatcgatgcttcgactcggtccgcactagcctgaggtaa

SEQ ID NO: 9558 - DNA, 135 bp, synthetic construct
  source 1..135: mol_type = other DNA
  misc_feature 1..135: note = Synthetic
atggaaattgttaatgtagaagaattgataaatatgaaaccttttaagaatatgaataaaataacaattaatcaaaaggataattgtatattagcaaatcgatgcttcgactcggtccgcactagcctgaggtaa

SEQ ID NO: 9559 - DNA, 210 bp, synthetic construct
  source 1..210: mol_type = other DNA
  misc_feature 1..210: note = Synthetic
atagggcgtcgaaggaggatctggtgttcattcgaggccgctgccgctagccggaggcgcaaacttcggaatttcctaaacaaggaatgcatatggactgttaacccaatgtcaggggaccatatcaaggtctttaacgcctgcacctctatctcgccggtgtatgaccctgagctggtaaccgactcggtccgcactagcctgaggtaa

SEQ ID NO: 9560 - DNA, 213 bp, synthetic construct
  source 1..213: mol_type = other DNA
  misc_feature 1..213: note = Synthetic
atgaactcaaggctgatacggcgagacttgcgagccttgtccttgcggtacacagcagcggcagcacgtttccacgcggtgagagcctcaggattcatgtcgatgtcttccggtttcatcgggagttcttcacgctcaatcgcagggatgtcctcgaccggacaatgcttccacttggtgattacgttggcgactcggtccgcactagcctga

SEQ ID NO: 9561 - DNA, 213 bp, synthetic construct
  misc_feature 1..213: note = Synthetic
  source 1..213: mol_type = other DNA
atgaactcaaggctgatacggcgagacttgcgagccttgtccttgcggtacacagcagcggcagcacgtttccacgcggtgagagcctcaggattcatgtcgatgtcttccggtttcatcgggagttcttcacgctcaatcgcagggatgtcctcgaccggacagcccttccacttggtgattacgttggcgactcggtccgcactagcctga

SEQ ID NO: 9562 - DNA, 204 bp, synthetic construct
  misc_feature 1..204: note = Synthetic
  source 1..204: mol_type = other DNA
aggctgatacggcgagacttgcgagccttgtccttgcggtacacagcagcggcagcacgtttccacgcggtgagagcctcaggattcatgtcgatgtcttccggtttcatcgggagttcttcacgctcaatcgcagggatgtcctcgaccggacaatgcttccacttggtgattacgttggcgactcggtccgcactagcctga

SEQ ID NO: 9563 - DNA, 108 bp, synthetic construct
  misc_feature 1..108: note = Synthetic
  source 1..108: mol_type = other DNA
ttgacgtccaagtgcctattcgcacgcggcgactactcgtcccttggatccgggagagcaaaatgtgggtactaccacccccgttgcctccacgacctccccacttaa

SEQ ID NO: 9564 - DNA, 114 bp, synthetic construct
  source 1..114: mol_type = other DNA
  misc_feature 1..114: note = Synthetic
atgacattggagtccaagtgcctattcgcacgcggcgactactcgtcccttggatccgggagagcaaaatgtgggtactaccacccccgttgcctccacgacctccccacttaa

SEQ ID NO: 9565 - DNA, 114 bp, synthetic construct
  misc_feature 1..114: note = Synthetic
  source 1..114: mol_type = other DNA
atgactttgaagtccaagtgcctattcgcacgcggcgactactcgtcccttggatccgggagagcaaaatgtgggtactaccacccccgttgcctccacgacctccccacttaa

SEQ ID NO: 9566 - DNA, 114 bp, synthetic construct
  misc_feature 1..114: note = Synthetic
  source 1..114: mol_type = other DNA
atgatattgaagtccaagtgcctattcgcacgcggcgactactcgtcccttggatccgggagagcaaaatgtgggtactaccacccccgttgcctccacgacctccccacttaa

SEQ ID NO: 9567 - DNA, 24 bp, synthetic construct
  source 1..24: mol_type = other DNA
  misc_feature 1..24: note = Synthetic
ctgtttgtcaatctgtattcgtaa

SEQ ID NO: 9568 - DNA, 12 bp, synthetic construct
  misc_feature 1..12: note = Synthetic
  source 1..12: mol_type = other DNA
atgcctgcctaa

SEQ ID NO: 9569 - DNA, 159 bp, synthetic construct
  source 1..159: mol_type = other DNA
  misc_feature 1..159: note = Synthetic
ctgtgtctacaaaagatgttccgcgggtgctaccgaagagttcgtggcggtgaggacgcaataggatgctcaggtgactatcgcgcccgcctgtaccacaatactctaagcgggcagacaacgttctccctaccaagcctccgactcggtccgcactag

SEQ ID NO: 9570 - DNA, 168 bp, synthetic construct
  misc_feature 1..168: note = Synthetic
  source 1..168: mol_type = other DNA
atggcgtatatgaacagatcagatctcgataaactaaaacacgaaaatatcttttctgggaatattatagaggacgccaaagagttcgtctttggatctagaaaaatatatactgattctgttgatgatctaatagaattcgactcggtccgcactagcctgaggtaa

SEQ ID NO: 9571 - DNA, 45 bp, synthetic construct
  misc_feature 1..45: note = Synthetic
  source 1..45: mol_type = other DNA
ttgttctcgcaactgtctttgataatacgactcttgagactttag

SEQ ID NO: 9572 - DNA, 33 bp, synthetic construct
  source 1..33: mol_type = other DNA
  misc_feature 1..33: note = Synthetic
attgttgtgatacagcggcagttgataggttag

SEQ ID NO: 9573 - DNA, 81 bp, synthetic construct
  source 1..81: mol_type = other DNA
  misc_feature 1..81: note = Synthetic
acgtggcctttacagcacatacaaaaagaaccagtatcagagaaaataatcaacgactcggtccgcactagcctgaggtaa

SEQ ID NO: 9574 - DNA, 228 bp, synthetic construct
  misc_feature 1..228: note = Synthetic
  source 1..228: mol_type = other DNA
ttggattacgccgcttttgaaaaatctagaagttgtttggaaaagagatatctggttcgtatgaataggatgctcttgaagaaagggccttcgggccaaacatctggtcggccatcgaccagaccgccggacccagcggaaaagagggtaaaaagggccgcaggaaacaagaccagcaaaaaccagcggccatcaacacgcgactcggtccgcactagcctgaggtaa

SEQ ID NO: 9575 - DNA, 228 bp, synthetic construct
  misc_feature 1..228: note = Synthetic
  source 1..228: mol_type = other DNA
ttggattacgccgcttttgaaaaatctagaagttgtttggaaaagagatatctggttcgtgccaataggatgctcttgaagaaagggccttcgggccaaacatctggtcggccatcgaccagaccgccggacccagcggaaaagagggtaaaaagggccgcaggaaacaagaccagcaaaaaccagcggccatcaacacgcgactcggtccgcactagcctgaggtaa

SEQ ID NO: 9576 - DNA, 168 bp, synthetic construct
  misc_feature 1..168: note = Synthetic
  source 1..168: mol_type = other DNA
atggatctgctaggagacctaagagaatttggcgtggttcggcgcttgctggagttggcctctgacagaacttccaagttttggaggttttgttttggctcaacgcttagcaacgtgctatatagggtcaagaaggagcacgactcggtccgcactagcctgaggtaa

SEQ ID NO: 9577 - DNA, 135 bp, synthetic construct
  misc_feature 1..135: note = Synthetic
  source 1..135: mol_type = other DNA
gtggttcggcgcttgctggagttggcctctgacagaacttccaagttttggaggttttgttttggctcaacgcttagcaacgtgctatatagggtcaagaaggagcacgactcggtccgcactagcctgaggtaa

SEQ ID NO: 9578 - DNA, 78 bp, synthetic construct
  source 1..78: mol_type = other DNA
  misc_feature 1..78: note = Synthetic
atggtagtaataaaggatctaaaacttatacatctggtggcggtggaatgtggggaggaggatcgtccagtggtgtaa

SEQ ID NO: 9579 - DNA, 15 bp, synthetic construct
  misc_feature 1..15: note = Synthetic
  source 1..15: mol_type = other DNA
atgccgaaactttaa

SEQ ID NO: 9580 - DNA, 168 bp, synthetic construct
  misc_feature 1..168: note = Synthetic
  source 1..168: mol_type = other DNA
atgggccccggtctgtgggtggtgatgggggtcctggtgggcgttgccgggggccatgacacgtactggacggagcaaatcgacccgtggtttttgcacggtctggggttggcccgcacgtactggcgcgacacaaacaccgactcggtccgcactagcctgaggtaa

SEQ ID NO: 9581 - DNA, 156 bp, synthetic construct
  source 1..156: mol_type = other DNA
  misc_feature 1..156: note = Synthetic
ctgtgggtggtgatgggggtcctggtgggcgttgccgggggccatgacacgtactggacggagcaaatcgacccgtggtttttgcacggtctggggttggcccgcacgtactggcgcgacacaaacaccgactcggtccgcactagcctgaggtaa

SEQ ID NO: 9582 - DNA, 15 bp, synthetic construct
  source 1..15: mol_type = other DNA
  misc_feature 1..15: note = Synthetic
atggcaagtgtttga

SEQ ID NO: 9583 - DNA, 75 bp, synthetic construct
  misc_feature 1..75: note = Synthetic
  source 1..75: mol_type = other DNA
acggctgtgttggttattcagaaaatgtatttgctgttgagagtggtggttacgactcggtccgcactagcctga

SEQ ID NO: 9584 - DNA, 213 bp, synthetic construct
  misc_feature 1..213: note = Synthetic
  source 1..213: mol_type = other DNA
atggactctgacgctcctggtcctgtgatgtgtttttgtagacagatggaagacatcaatttttcgtccctggctccgcgacacggcacgcggccgtttatgggcacctggagcgacatcggcaccagccaactgaacgggggcgccttcaattggagcagtctctggagcgggcttaagaatttcgactcggtccgcactagcctgaggtaa

SEQ ID NO: 9585 - DNA, 213 bp, synthetic construct
  source 1..213: mol_type = other DNA
  misc_feature 1..213: note = Synthetic
atggactctgacgctcctggtcctgtgatgtgtttttgtagacaggccgaagacatcaatttttcgtccctggctccgcgacacggcacgcggccgtttatgggcacctggagcgacatcggcaccagccaactgaacgggggcgccttcaattggagcagtctctggagcgggcttaagaatttcgactcggtccgcactagcctgaggtaa

SEQ ID NO: 9586 - DNA, 168 bp, synthetic construct
  misc_feature 1..168: note = Synthetic
  source 1..168: mol_type = other DNA
atgatgaagatgacgatgaaaatgatggtacatatatattttgtatcattattgttattgctattccacagttacgccatagacattgaaaatgaaatcacagatttcttcaataaaatgaaagatactctaccagctaacgactcggtccgcactagcctgaggtaa

SEQ ID NO: 9587 - DNA, 36 bp, synthetic construct
  source 1..36: mol_type = other DNA
  misc_feature 1..36: note = Synthetic
ttgaaaatgaaatcacagatttcttcaataaaatga

SEQ ID NO: 9588 - DNA, 111 bp, synthetic construct
  source 1..111: mol_type = other DNA
  misc_feature 1..111: note = Synthetic
ttgctattccacagttacgccatagacattgaaaatgaaatcacagatttcttcaataaaatgaaagatactctaccagctaacgactcggtccgcactagcctgaggtaa

SEQ ID NO: 9589 - DNA, 168 bp, synthetic construct
  source 1..168: mol_type = other DNA
  misc_feature 1..168: note = Synthetic
atgagtgaaaaaggatttccaacgtttgtaaacgccgccgccatgctctcgcgggagtccgtcgtggctccgcacgcggacctgctcttccgctacctggagtccgggcaggtggatctcgccacggtccgcgcgctcgtcgactcggtccgcactagcctgaggtaa

SEQ ID NO: 9590 - DNA, 183 bp, synthetic construct
  source 1..183: mol_type = other DNA
  misc_feature 1..183: note = Synthetic
ataacactgttaatcgccttttcttttgtaattaatatgatttataacttgttttactatattacaagttctgtatctaagctgtttatttttattgttagtaaattaatattgtttatgttacaaatggtaaatccatactcttcttatagtatcgactcggtccgcactagcctgaggtaa

SEQ ID NO: 9591 - DNA, 39 bp, synthetic construct
  source 1..39: mol_type = other DNA
  misc_feature 1..39: note = Synthetic
attaacactatcaacataagtcggggtatacaagtataa

SEQ ID NO: 9592 - DNA, 57 bp, synthetic construct
  source 1..57: mol_type = other DNA
  misc_feature 1..57: note = Synthetic
atcaccgtcacatattatgcaaacatgtgggtttatacaacagatgtttccagttga

SEQ ID NO: 9593 - DNA, 39 bp, synthetic construct
  source 1..39: mol_type = other DNA
  misc_feature 1..39: note = Synthetic
attaacactatcaacataagtcggggtatacaagtatag

SEQ ID NO: 9594 - DNA, 171 bp, synthetic construct
  source 1..171: mol_type = other DNA
  misc_feature 1..171: note = Synthetic
aaggccagtgaaaaaggatttccaacgtttgtaaacgccgccgccatgctctcgcgggagtccgtcgtggctccgcacgcggacctgctcttccgctacctggagtccgggcaggtggatctcgccacggtccgcgcgctcgtcgactcggtccgcactagcctgaggtaa

SEQ ID NO: 9595 - DNA, 18 bp, synthetic construct
  misc_feature 1..18: note = Synthetic
  source 1..18: mol_type = other DNA
atgcatctccacaactag

SEQ ID NO: 9596 - DNA, 78 bp, synthetic construct
  source 1..78: mol_type = other DNA
  misc_feature 1..78: note = Synthetic
atccctgggttttgcttaatgcttcttggttcaactccttccttacacatgcattcgactcggtccgcactagcctga

SEQ ID NO: 9597 - DNA, 180 bp, synthetic construct
  source 1..180: mol_type = other DNA
  misc_feature 1..180: note = Synthetic
atgatagtttctggtggagctttagcatttaaatctttagcacctcacagagtaatatctatgcgatcagtaacttttaataaggttattacaattttagaatacatagctattttaatttttgttcctggaactattgcactatattccgcatatattaaaacacttatagtaggttaa

SEQ ID NO: 9598 - DNA, 111 bp, synthetic construct
  source 1..111: mol_type = other DNA
  misc_feature 1..111: note = Synthetic
gtgtggctaatctcaaattaccacctcatgatgttactgtcttgcgtgacaatcttaaacctgttactacacttagtactattactgccgactcggtccgcactagcctga

SEQ ID NO: 9599 - DNA, 162 bp, synthetic construct
  source 1..162: mol_type = other DNA
  misc_feature 1..162: note = Synthetic
atgtttgttcgcgcgccgagtgcgacgcgcgtcaccaccgcttcgtgtctgtgtttctcgcgaatcacaaacacgcaaacgctgttttcacgcaaggaagcaacaacagcgttcgagagccgcggcggggatgcttcccccttgcgtctccgcgagtcctga

SEQ ID NO: 9600 - DNA, 114 bp, synthetic construct
  source 1..114: mol_type = other DNA
  misc_feature 1..114: note = Synthetic
atgccattgaagtccaagtgcctattcgcacgcggcgactactcgtcccttggatccgggagagcaaaatgtgggtactaccacccccgttgcctccacgacctccccacttaa

SEQ ID NO: 9601 - DNA, 114 bp, synthetic construct
  misc_feature 1..114: note = Synthetic
  source 1..114: mol_type = other DNA
ctgacattgaagtccaagtgcctattcgcacgcggcgactactcgtcccttggatccgggagagcaaaatgtgggtactaccacccccgttgcctccacgacctccccacttaa

SEQ ID NO: 9602 - DNA, 186 bp, synthetic construct
  source 1..186: mol_type = other DNA
  misc_feature 1..186: note = Synthetic
atacctgagaacatgatggctgtctacaatgtcaccactaatggggctgactttcaagttggcatccgtcgtgatggctacatggtcacatctggaacaattggtactcagcaggagcttgaccctgacaccactttcacttatgttggacttttccccgactcggtccgcactagcctgaggtaa

SEQ ID NO: 9603 - DNA, 63 bp, synthetic construct
  source 1..63: mol_type = other DNA
  misc_feature 1..63: note = Synthetic
ttgaccctgacaccactttcacttatgttggacttttccccgactcggtccgcactagcctga

SEQ ID NO: 9604 - DNA, 48 bp, synthetic construct
  misc_feature 1..48: note = Synthetic
  source 1..48: mol_type = other DNA
attatgcctgccaggttttgcccaacgactcggtccgcactagcctga

SEQ ID NO: 9605 - DNA, 168 bp, synthetic construct
  misc_feature 1..168: note = Synthetic
  source 1..168: mol_type = other DNA
atggccgaagcttaccccggaggagcccatgcagcactagcgtcccggcgctcgtcgttcaggaacagcctccgccgcctgcggcccactgaaaaaccagacacgtcgttcatgagaggcgtgtggaagtacgagatcttcgactcggtccgcactagcctgaggtaa

SEQ ID NO: 9606 - DNA, 228 bp, synthetic construct
  misc_feature 1..228: note = Synthetic
  source 1..228: mol_type = other DNA
ttgctggaacagagctctaacagtacctcttggttttggaggtttctgtggggctcctcccaggcaaagttagtctgcagaattaaggaggattacaagtgggaatttgaagagcttttgaaatcctgtggtgagctgtttgattctttgaatctgggtcaccaggcgcttttccaagagaaggtcatcaagactttggacgactcggtccgcactagcctgaggtaa

SEQ ID NO: 9607 - DNA, 99 bp, synthetic construct
  misc_feature 1..99: note = Synthetic
  source 1..99: mol_type = other DNA
ttgttctcgatgagtgcggtacttggtttaatacccgttcttggaatgataaggaaagacagccgattattgactggtttctacatgctcgtaaattag

SEQ ID NO: 9608 - DNA, 48 bp, synthetic construct
  source 1..48: mol_type = other DNA
  misc_feature 1..48: note = Synthetic
atgcttgtttttatttctacacaacgctttatttcccttcggagataa

SEQ ID NO: 9609 - DNA, 36 bp, synthetic construct
  source 1..36: mol_type = other DNA
  misc_feature 1..36: note = Synthetic
ctgtcgcgtatgctgtggcgccactgcaacttatga

SEQ ID NO: 9610 - DNA, 36 bp, synthetic construct
  misc_feature 1..36: note = Synthetic
  source 1..36: mol_type = other DNA
atgaatttaaccaattttatgagcagacagtgttag

SEQ ID NO: 9611 - DNA, 141 bp, synthetic construct
  misc_feature 1..141: note = Synthetic
  source 1..141: mol_type = other DNA
atggcgtcctcccctgcaaggttacgccaatacgacaggggctccccaatgagtaagatccggtttggtgttattgcaaagtggtgtaaaaattcttcggcggcggttgtttttccaattccatacgccccgtccaaataa

SEQ ID NO: 9612 - DNA, 27 bp, synthetic construct
  source 1..27: mol_type = other DNA
  misc_feature 1..27: note = Synthetic
atgccggacaatagcacaattgtttag

SEQ ID NO: 9613 - DNA, 27 bp, synthetic construct
  misc_feature 1..27: note = Synthetic
  source 1..27: mol_type = other DNA
atgtggtttgaaaatcgctatcgctag

SEQ ID NO: 9614 - DNA, 39 bp, synthetic construct
  misc_feature 1..39: note = Synthetic
  source 1..39: mol_type = other DNA
acgcacgcagtaacgcatattgacggatttctcggctag

SEQ ID NO: 9615 - DNA, 87 bp, synthetic construct
  source 1..87: mol_type = other DNA
  misc_feature 1..87: note = Synthetic
acggatttctcggctaggatgatggagcctgatgacggtgcggactcttccttcattattaacgtaggggtctcccagaatcgctga

SEQ ID NO: 9616 - DNA, 213 bp, synthetic construct
  misc_feature 1..213: note = Synthetic
  source 1..213: mol_type = other DNA
atgtgttgcaggaagttgaagcgctgcgacatgatatacaattggatgatgatgctcgtgtctttgtgcaggctaatatggactgtctgcccacagactggcgtctcgttaacaaatttgatagtgttgatggtgttagaaccattaagtattttgaatgcccgggcgggatttttgtatccagccgactcggtccgcactagcctgaggtaa

SEQ ID NO: 9617 - DNA, 213 bp, synthetic construct
  source 1..213: mol_type = other DNA
  misc_feature 1..213: note = Synthetic
atgtgttgcgccaagttgaagcgctgcgacatgatatacaattggatgatgatgctcgtgtctttgtgcaggctaatatggactgtctgcccacagactggcgtctcgttaacaaatttgatagtgttgatggtgttagaaccattaagtattttgaatgcccgggcgggatttttgtatccagccgactcggtccgcactagcctgaggtaa

SEQ ID NO: 9618 - DNA, 168 bp, synthetic construct
  source 1..168: mol_type = other DNA
  misc_feature 1..168: note = Synthetic
atggcggacatggacacgatatacatcaacttgatggcagatgatccaacccatcaaaaagaattgctgtcattccctctgattccagtgactggacctgatgggaagaaagtgctccaacaccagatccggacccaatccgactcggtccgcactagcctgaggtaa

SEQ ID NO: 9619 - DNA, 159 bp, synthetic construct
  misc_feature 1..159: note = Synthetic
  source 1..159: mol_type = other DNA
atggacacgatatacatcaacttgatggcagatgatccaacccatcaaaaagaattgctgtcattccctctgattccagtgactggacctgatgggaagaaagtgctccaacaccagatccggacccaatccgactcggtccgcactagcctgaggtaa

SEQ ID NO: 9620 - DNA, 114 bp, synthetic construct
  source 1..114: mol_type = other DNA
  misc_feature 1..114: note = Synthetic
atgaacattacactgttctgttttctgaccttgccaattctcatcagcgatctgactccagtctggttgatgaatttgttgttagcacgagggatgtctgcaagaacttcttaa

SEQ ID NO: 9621 - DNA, 114 bp, synthetic construct
  source 1..114: mol_type = other DNA
  misc_feature 1..114: note = Synthetic
atgaacattacactgttctgttttctgaccttgccaattctcgccagcgatctgactccagtctggttgatgaatttgttgttagcacgagggatgtctgcaagaacttcttaa

SEQ ID NO: 9622 - DNA, 87 bp, synthetic construct
  source 1..87: mol_type = other DNA
  misc_feature 1..87: note = Synthetic
ttgttagaggcagtaataaacggaatagagagcgttccacaggaaattcccgagttatggggggacctggtagggaaagagcgataa

SEQ ID NO: 9623 - DNA, 36 bp, synthetic construct
  misc_feature 1..36: note = Synthetic
  source 1..36: mol_type = other DNA
atggggggacctggtagggaaagagcgataatgtaa

SEQ ID NO: 9624 - DNA, 84 bp, synthetic construct
  source 1..84: mol_type = other DNA
  misc_feature 1..84: note = Synthetic
acgccccagatgaaagtctatacggccacaaccgccgtgtcagctgtgtacgtgcccgactcggtccgcactagcctgaggtaa

SEQ ID NO: 9625 - DNA, 45 bp, synthetic construct
  source 1..45: mol_type = other DNA
  misc_feature 1..45: note = Synthetic
ttgttcatggtttcgcgcagtagcagcgtttcgagaccgcggtga

SEQ ID NO: 9626 - DNA, 96 bp, synthetic construct
  misc_feature 1..96: note = Synthetic
  source 1..96: mol_type = other DNA
acgcagatgaggcgtacgatcttgagttcttccaaacgcagcgagctcagcggctgtccgcgcgacatcttctcgctaatctgtaatattagatga

SEQ ID NO: 9627 - DNA, 30 bp, synthetic construct
  misc_feature 1..30: note = Synthetic
  source 1..30: mol_type = other DNA
ttgacgatgccaataaagaacagtaaataa

SEQ ID NO: 9628 - DNA, 117 bp, synthetic construct
  source 1..117: mol_type = other DNA
  misc_feature 1..117: note = Synthetic
aaggtcttcgcgagtttttgggccttgaagcgggcccaccgaaaccaaaacccaatcagcagcatcaagatcaagcccgtggtcttgtgctgcccgactcggtccgcactagcctga

SEQ ID NO: 9629 - DNA, 177 bp, synthetic construct
  source 1..177: mol_type = other DNA
  misc_feature 1..177: note = Synthetic
atgtcaaaaatgcagttggagtcctcatcggaggacttgaatggaatgataacacagttcgagtctctgaaactctacagagattcgcttggagaagcagtaatgagaatgggagacctccactcactccaaaacagaaacgagaaatgcgactcggtccgcactagcctgaggtaa

SEQ ID NO: 9630 - DNA, 117 bp, synthetic construct
  misc_feature 1..117: note = Synthetic
  source 1..117: mol_type = other DNA
acggcgggtccaggggagcatcgaagggggaacccagcgccgccgccactggcgccgcgctcaccacgctctcgtaggagggaggaggaccttccgactcggtccgcactagcctga

SEQ ID NO: 9631 - DNA, 36 bp, synthetic construct
  source 1..36: mol_type = other DNA
  misc_feature 1..36: note = Synthetic
attctcgttatgaatcaactccaactcatattttga

SEQ ID NO: 9632 - DNA, 123 bp, synthetic construct
  source 1..123: mol_type = other DNA
  misc_feature 1..123: note = Synthetic
atagaaagcatagatcttggaaatttggattttgcaccagcaataaccatttgtaaatcatcatactcagatatacttcctgcaaaaaatatggtcgactcggtccgcactagcctgaggtaa

SEQ ID NO: 9633 - DNA, 123 bp, synthetic construct
  source 1..123: mol_type = other DNA
  misc_feature 1..123: note = Synthetic
atagaaagcatagatcttggaaatttggattttgcaccggcaataaccatttgtaaatcatcatactcagatatacttcctgcaaaaaatatggtcgactcggtccgcactagcctgaggtaa

SEQ ID NO: 9634 - DNA, 207 bp, synthetic construct
  misc_feature 1..207: note = Synthetic
  source 1..207: mol_type = other DNA
atgggtgacaatcagtgcattactgttttatcagtcttccccttagagactgacgcagacgagcaggaacagagcgccgaagacaatgcagcgagggtggccgccagcctagcaaaagttacaagtgcctgtggaatctttttaaaacctgatgaaacatttgtacattcaggttttatcgactcggtccgcactagcctgaggtaa

SEQ ID NO: 9635 - DNA, 63 bp, synthetic construct
  misc_feature 1..63: note = Synthetic
  source 1..63: mol_type = other DNA
ctgacgcagacgagcaggaacagagcgccgaagacaatgcagcgagggtggccgccagcctag

SEQ ID NO: 9636 - DNA, 207 bp, synthetic construct
  source 1..207: mol_type = other DNA
  misc_feature 1..207: note = Synthetic
atgggtgacaatcagtgcattactgttttatcagtcttccccttagagactgacgcagacgagcaggaacagagcgccgaagacaatgcagcgagggtggccgccagcctagcaaaagttacaagtgcctgtggaatctttttaaaacctggccaaacatttgtacattcaggttttatcgactcggtccgcactagcctgaggtaa

SEQ ID NO: 9637 - DNA, 24 bp, synthetic construct
  source 1..24: mol_type = other DNA
  misc_feature 1..24: note = Synthetic
atgccaataaagaacagtaaataa

SEQ ID NO: 9638 - DNA, 153 bp, synthetic construct
  misc_feature 1..153: note = Synthetic
  source 1..153: mol_type = other DNA
ttgatcaccctccagattggttggaagaagttggtgaaggtcttcgcgagtttttgggccttgaagcgggcccaccgaaaccaaaacccaatcagcagcatcaagatcaagcccgtggtcttgtgctgcccgactcggtccgcactagcctga

SEQ ID NO: 9639 - DNA, 192 bp, synthetic construct
  source 1..192: mol_type = other DNA
  misc_feature 1..192: note = Synthetic
atggtgatgtacgctacggcttccggcttgatttcttgcaggaactggaaggctgtcgggcgcttgccgcgcttagctttcacttcctcaaaccagtcgttgatgcgtgcaatcatcttagggagtagggtagtgatgagaggcttggcggcagcgttatccgccgactcggtccgcactagcctgaggtaa

SEQ ID NO: 9640 - DNA, 219 bp, synthetic construct
  misc_feature 1..219: note = Synthetic
  source 1..219: mol_type = other DNA
ctggttaggcaagccagagtggtcttaatggtgatgtacgctacggcttccggcttgatttcttgcaggaactggaaggctgtcgggcgcttgccgcgcttagctttcacttcctcaaaccagtcgttgatgcgtgcaatcatcttagggagtagggtagtgatgagaggcttggcggcagcgttatccgccgactcggtccgcactagcctgaggtaa

SEQ ID NO: 9641 - DNA, 36 bp, synthetic construct
  source 1..36: mol_type = other DNA
  misc_feature 1..36: note = Synthetic
atgtcaaacgactcggtccgcactagcctgaggtaa

SEQ ID NO: 9642 - DNA, 123 bp, synthetic construct
  source 1..123: mol_type = other DNA
  misc_feature 1..123: note = Synthetic
atagaaagcatagatcttggaaatttggattttgcgccggcaataaccatttgtaaatcatcatactcagatatacttcctgcaaaaaatatggtcgactcggtccgcactagcctgaggtaa

SEQ ID NO: 9643 - DNA, 168 bp, synthetic construct
  misc_feature 1..168: note = Synthetic
  source 1..168: mol_type = other DNA
atgggaaaagagatgatgttttttgtctttttgatttgcttatctctcacactcatgtcaaatttgaaatgtcaccagaatataatatttctagataataaattagaagctgtttgtgtcaccacgtgttatgttaatgacgactcggtccgcactagcctgaggtaa

SEQ ID NO: 9644 - DNA, 156 bp, synthetic construct
  misc_feature 1..156: note = Synthetic
  source 1..156: mol_type = other DNA
atgatgttttttgtctttttgatttgcttatctctcacactcatgtcaaatttgaaatgtcaccagaatataatatttctagataataaattagaagctgtttgtgtcaccacgtgttatgttaatgacgactcggtccgcactagcctgaggtaa

SEQ ID NO: 9645 - DNA, 189 bp, synthetic construct
  source 1..189: mol_type = other DNA
  misc_feature 1..189: note = Synthetic
atatttgatttaagttttaaaatgcaacaacctcgcggaagaagtcgaacccgcaaccaccaagtcacaccgactatatatcatgaaactcaattgccctccaaacctcattataccaattatcatccacgtgcaagatcgatgagctcaacccgtagtagcgactcggtccgcactagcctgaggtaa

SEQ ID NO: 9646 - DNA, 63 bp, synthetic construct
  source 1..63: mol_type = other DNA
  misc_feature 1..63: note = Synthetic
atgaaactcaattgccctccaaacctcattataccaattatcatccacgtgcaagatcgatga

SEQ ID NO: 9647 - DNA, 168 bp, synthetic construct
  misc_feature 1..168: note = Synthetic
  source 1..168: mol_type = other DNA
atgtcagctccacgcaaagtcagattgccttctgttaaggctgttgacatgagcatggaagacatggccgcccgcctggctcgcctggagtctgagaataaggctctgaagcaacaggtcctcagggggggtgcctgtgccgactcggtccgcactagcctgaggtaa

SEQ ID NO: 9648 - DNA, 144 bp, synthetic construct
  source 1..144: mol_type = other DNA
  misc_feature 1..144: note = Synthetic
ttgccttctgttaaggctgttgacatgagcatggaagacatggccgcccgcctggctcgcctggagtctgagaataaggctctgaagcaacaggtcctcagggggggtgcctgtgccgactcggtccgcactagcctgaggtaa

SEQ ID NO: 9649 - DNA, 168 bp, synthetic construct
  misc_feature 1..168: note = Synthetic
  source 1..168: mol_type = other DNA
atgcagttggagtcctcatcggaggacttgaatggaatgataacacagttcgagtctctgaaactctacagagattcgcttggagaagcagtaatgagaatgggagacctccactcactccaaaacagaaacgagaaatgcgactcggtccgcactagcctgaggtaa

SEQ ID NO: 9650 - DNA, 225 bp, synthetic construct
  misc_feature 1..225: note = Synthetic
  source 1..225: mol_type = other DNA
ttggcgaaatttcaccattgccttctcttccaggacatactgctgaggatgtcaaaaatgcagttggagtcctcatcggaggacttgaatggaatgataacacagttcgagtctctgaaactctacagagattcgcttggagaagcagtaatgagaatgggagacctccactcactccaaaacagaaacgagaagcccgactcggtccgcactagcctgaggtaa

SEQ ID NO: 9651 - DNA, 225 bp, synthetic construct
  source 1..225: mol_type = other DNA
  misc_feature 1..225: note = Synthetic
ttggcgaaatttcaccattgccttctcttccaggacatactgctgaggatgtcaaaaatgcagttggagtcctcatcggaggacttgaatggaatgataacacagttcgagtctgccaaactctacagagattcgcttggagaagcagtaatgagaatgggagacctccactcactccaaaacagaaacgagaaatgcgactcggtccgcactagcctgaggtaa

SEQ ID NO: 9652 - DNA, 45 bp, synthetic construct
  misc_feature 1..45: note = Synthetic
  source 1..45: mol_type = other DNA
ttgcgaagaaccctgggaactgcactgccattgactttgtgctaa

SEQ ID NO: 9653 - DNA, 24 bp, synthetic construct
  misc_feature 1..24: note = Synthetic
  source 1..24: mol_type = other DNA
atgtccctgggtcgcaagacttaa

SEQ ID NO: 9654 - DNA, 210 bp, synthetic construct
  source 1..210: mol_type = other DNA
  misc_feature 1..210: note = Synthetic
acgaagaaaaagaaaacgagcctatttgtaatttttttgcagatgtcatcattgtggttgtcaacaacgggtaaggtctatttaccaccatcaacaccagttgccagggtgcaaagcacggactcctacatacaaagaacaaacatctattatcatgctaatactgaccgcctgttaacagtcgactcggtccgcactagcctgaggtaa

SEQ ID NO: 9655 - DNA, 24 bp, synthetic construct
  misc_feature 1..24: note = Synthetic
  source 1..24: mol_type = other DNA
atgctaatactgaccgcctgttaa

SEQ ID NO: 9656 - DNA, 36 bp, synthetic construct
  misc_feature 1..36: note = Synthetic
  source 1..36: mol_type = other DNA
ttgagacgaagaaaaagaaaacgagcctatttgtaa

SEQ ID NO: 9657 - DNA, 210 bp, synthetic construct
  misc_feature 1..210: note = Synthetic
  source 1..210: mol_type = other DNA
acgaagaaaaagaaaacgagcctatttgtaatttttttgcaggcctcatcattgtggttgtcaacaacgggtaaggtctatttaccaccatcaacaccagttgccagggtgcaaagcacggactcctacatacaaagaacaaacatctattatcatgctaatactgaccgcctgttaacagtcgactcggtccgcactagcctgaggtaa

SEQ ID NO: 9658 - DNA, 168 bp, synthetic construct
  misc_feature 1..168: note = Synthetic
  source 1..168: mol_type = other DNA
atgtcagctccacgcaaagtcagattgccttctgttaaggctgttgacatgagcatggaagacatggccgcccgcctggctcgcctggagtctgagaataaggctctgaagcaacaggtcctcagagggggtgcctgtgccgactcggtccgcactagcctgaggtaa

SEQ ID NO: 9659 - DNA, 144 bp, synthetic construct
  source 1..144: mol_type = other DNA
  misc_feature 1..144: note = Synthetic
ttgccttctgttaaggctgttgacatgagcatggaagacatggccgcccgcctggctcgcctggagtctgagaataaggctctgaagcaacaggtcctcagagggggtgcctgtgccgactcggtccgcactagcctgaggtaa

SEQ ID NO: 9660 - DNA, 54 bp, synthetic construct
  source 1..54: mol_type = other DNA
  misc_feature 1..54: note = Synthetic
atagatatagaaacggaatcggtagatcgtctaaaagaattgcttctaaaatga

SEQ ID NO: 9661 - DNA, 180 bp, synthetic construct
  source 1..180: mol_type = other DNA
  misc_feature 1..180: note = Synthetic
attgcttctaaaatgaaaaaaaacactgattcagaaatggatcaacgactagggtataagtttttggtgcctgatcctaaagccggagttttttatagaccgttacatttccaatatgtatcgtattctaattttatattgcatcgattgcacgactcggtccgcactagcctgaggtaa

SEQ ID NO: 9662 - DNA, 81 bp, synthetic construct
  misc_feature 1..81: note = Synthetic
  source 1..81: mol_type = other DNA
atagaccgttacatttccaatatgtatcgtattctaattttatattgcatcgattgcacgactcggtccgcactagcctga

SEQ ID NO: 9663 - DNA, 180 bp, synthetic construct
  misc_feature 1..180: note = Synthetic
  source 1..180: mol_type = other DNA
attgcttctaaaatgaaaaaaaacactgattcagaaatggatcaacgactcgggtataagtttttggtacctgatcctaaagccggagttttttatagaccgttacatttccaatatgtatcgtattctaattttatattgcatcgattgcacgactcggtccgcactagcctgaggtaa

SEQ ID NO: 9664 - DNA, 105 bp, synthetic construct
  source 1..105: mol_type = other DNA
  misc_feature 1..105: note = Synthetic
ctgatcctaaagccggagttttttatagaccgttacatttccaatatgtatcgtattctaattttatattgcatcgattgcacgactcggtccgcactagcctga

SEQ ID NO: 9665 - DNA, 180 bp, synthetic construct
  source 1..180: mol_type = other DNA
  misc_feature 1..180: note = Synthetic
attgcttctaaaatgaaaaaaaacactgtttcagaaatggatcaacgactcgggtataagtttttggtgcctgatcctaaagccggagttttttatagaccgttacatttccaatatgtatcgtattctaattttatattgcatcgattgcacgactcggtccgcactagcctgaggtaa

SEQ ID NO: 9666 - DNA, 144 bp, synthetic construct
  source 1..144: mol_type = other DNA
  misc_feature 1..144: note = Synthetic
atggatcaacgactagggtataagtttttggtgcctgatcctaaagccggagttttttatagaccgttacatttccaatatgtatcgtattctaattttatattgcatcgattgcacgactcggtccgcactagcctgaggtaa

SEQ ID NO: 9667 - DNA, 144 bp, synthetic construct
  source 1..144: mol_type = other DNA
  misc_feature 1..144: note = Synthetic
atggatcaacgactcgggtataagtttttggtacctgatcctaaagccggagttttttatagaccgttacatttccaatatgtatcgtattctaattttatattgcatcgattgcacgactcggtccgcactagcctgaggtaa

SEQ ID NO: 9668 - DNA, 144 bp, synthetic construct
  misc_feature 1..144: note = Synthetic
  source 1..144: mol_type = other DNA
atggatcaacgactcgggtataagtttttggtgcctgatcctaaagccggagttttttatagaccgttacatttccaatatgtatcgtattctaattttatattgcatcgattgcacgactcggtccgcactagcctgaggtaa

SEQ ID NO: 9669 - DNA, 168 bp, synthetic construct
  source 1..168: mol_type = other DNA
  misc_feature 1..168: note = Synthetic
atgaaaaaaaacactgattcagaaatggatcaacgactcgggtataagtttttggtacctgatcctaaagccggagttttttatagaccgttacatttccaatatgtatcgtattctaattttatattgcatcgattgcacgactcggtccgcactagcctgaggtaa

SEQ ID NO: 9670 - DNA, 156 bp, synthetic construct
  misc_feature 1..156: note = Synthetic
  source 1..156: mol_type = other DNA
attactttgatagttatttgggttgtgttgttagccctgataaccgcacggatgaggcgcttcctaattgtgatctccgtatgggtgctggcttatgcgttgattattcaaaatcacgcagggctcaccgatcagtttctactggctatcggttaa

SEQ ID NO: 9671 - DNA, 42 bp, synthetic construct
  source 1..42: mol_type = other DNA
  misc_feature 1..42: note = Synthetic
atgccacacccatttccggagttgcagtattttttcgtataa

SEQ ID NO: 9672 - DNA, 51 bp, synthetic construct
  misc_feature 1..51: note = Synthetic
  source 1..51: mol_type = other DNA
atggcaaccggcagctcctcttccgggtatggctgttgttgcagaatatga

SEQ ID NO: 9673 - DNA, 42 bp, synthetic construct
  source 1..42: mol_type = other DNA
  misc_feature 1..42: note = Synthetic
atgacggggcatcatttacaaaatcatacacgccgccattag

SEQ ID NO: 9674 - DNA, 66 bp, synthetic construct
  misc_feature 1..66: note = Synthetic
  source 1..66: mol_type = other DNA
atcacgcggaaccagactagcccccttacttgcaattttaacgcaattcgactcggtccgcactag

SEQ ID NO: 9675 - DNA, 123 bp, synthetic construct
  misc_feature 1..123: note = Synthetic
  source 1..123: mol_type = other DNA
acgccagaacaagtattgttggcgcaggttacaatgcaactcttcaatctgcttacatgccagattccgaccagataccccatattacgtggtacttacacgactcggtccgcactagcctga

SEQ ID NO: 9676 - DNA, 33 bp, synthetic construct
  source 1..33: mol_type = other DNA
  misc_feature 1..33: note = Synthetic
agggagacgttcttgcggatgcgagggccatag

SEQ ID NO: 9677 - DNA, 15 bp, synthetic construct
  misc_feature 1..15: note = Synthetic
  source 1..15: mol_type = other DNA
ctgttgttggtatag

SEQ ID NO: 9678 - DNA, 171 bp, synthetic construct
  source 1..171: mol_type = other DNA
  misc_feature 1..171: note = Synthetic
aagatgttccttcgattaattgatgacaatggtattgtcctcaattccattttatggctccttgttatgatatttttctttgtgttggcaatgacctttattaaactgattcaattgtgttttacttgtcattatttttttagcgactcggtccgcactagcctgaggtaa

SEQ ID NO: 9679 - DNA, 171 bp, synthetic construct
  misc_feature 1..171: note = Synthetic
  source 1..171: mol_type = other DNA
aaggccttccttcgattaattgatgacaatggtattgtcctcaattccattttatggctccttgttatgatatttttctttgtgttggcaatgacctttattaaactgattcaattgtgttttacttgtcattatttttttagcgactcggtccgcactagcctgaggtaa

SEQ ID NO: 9680 - DNA, 105 bp, synthetic construct
  misc_feature 1..105: note = Synthetic
  source 1..105: mol_type = other DNA
atgattgttcaactcttaaggaaattctccttacatatgctgagtgtgaagagtcctacttccaaaagaaggactggtatgattttgttgagaatcctgatataa

SEQ ID NO: 9681 - DNA, 87 bp, synthetic construct
  source 1..87: mol_type = other DNA
  misc_feature 1..87: note = Synthetic
atggcaatcctgaaaatacaatgttatacactatttggacacatatatattttgaagatgacgaaggcacgactcggtccgcactag

SEQ ID NO: 9682 - DNA, 168 bp, synthetic construct
  misc_feature 1..168: note = Synthetic
  source 1..168: mol_type = other DNA
atggggacagttaataaacctgtggtgggggtattgatggggttcggaattatcacgggaacgttgcgtataacgaatccggtcagagcatccgtcttgcgatacgatgattttcacaccgatgaagacaaactggataccgactcggtccgcactagcctgaggtaa

SEQ ID NO: 9683 - DNA, 66 bp, synthetic construct
  source 1..66: mol_type = other DNA
  misc_feature 1..66: note = Synthetic
gtgactatattccgagggtcgcctgtaatgccgggacagttaataaacctgtggtgggggtattga

SEQ ID NO: 9684 - DNA, 132 bp, synthetic construct
  source 1..132: mol_type = other DNA
  misc_feature 1..132: note = Synthetic
atggggttcggaattatcacgggaacgttgcgtataacgaatccggtcagagcatccgtcttgcgatacgatgattttcacaccgatgaagacaaactggataccgactcggtccgcactagcctgaggtaa

SEQ ID NO: 9685 - DNA, 156 bp, synthetic construct
  source 1..156: mol_type = other DNA
  misc_feature 1..156: note = Synthetic
attactttgatagttatttgggttgtgttgttaatgctgataaccgcacggatgaggcgcttcctaattgtgatctccgtatgggtgctggcttatgcgttgattattcaaaatcacgcagggctcaccgatcagtttctactggctatcggttaa

SEQ ID NO: 9686 - DNA, 48 bp, synthetic construct
  source 1..48: mol_type = other DNA
  misc_feature 1..48: note = Synthetic
atgcagaaaaatccaaaatcagacaatttcacacagcccctttcttag

SEQ ID NO: 9687 - DNA, 168 bp, synthetic construct
  misc_feature 1..168: note = Synthetic
  source 1..168: mol_type = other DNA
atgtctaaaaaaccaggaaagtccgctgcaaagcggactgtcaatatgctaaaacgcctggctagcgtgtccccctcaagggggcgaagaactattcggagaatgctagatgtgagaggagcaccaagattgatcctagccgactcggtccgcactagcctgaggtaa

SEQ ID NO: 9688 - DNA, 123 bp, synthetic construct
  misc_feature 1..123: note = Synthetic
  source 1..123: mol_type = other DNA
atgctaaaacgcctggctagcgtgtccccctcaagggggcgaagaactattcggagaatgctagatgtgagaggagcaccaagattgatcctagccgactcggtccgcactagcctgaggtaa

SEQ ID NO: 9689 - DNA, 84 bp, synthetic construct
  source 1..84: mol_type = other DNA
  misc_feature 1..84: note = Synthetic
atgagaattatggcaatattaaggaatttaatgctactcatgcagcattcgaatattcaaacgactcggtccgcactagcctga

SEQ ID NO: 9690 - DNA, 75 bp, synthetic construct
  misc_feature 1..75: note = Synthetic
  source 1..75: mol_type = other DNA
atggcaatattaaggaatttaatgctactcatgcagcattcgaatattcaaacgactcggtccgcactagcctga

SEQ ID NO: 9691 - DNA, 24 bp, synthetic construct
  misc_feature 1..24: note = Synthetic
  source 1..24: mol_type = other DNA
atttctttaaaaatggcaacctga

SEQ ID NO: 9692 - DNA, 174 bp, synthetic construct
  misc_feature 1..174: note = Synthetic
  source 1..174: mol_type = other DNA
atttcgttgttctatacatttgccattagttattgccgagcattcatttactcaattatggaaaccatagatccggtgtatatatctcagttcagttataaagaattatacgttagtagctcttataaagatattaatgaatccatgagtccgactcggtccgcactagcctga

SEQ ID NO: 9693 - DNA, 108 bp, synthetic construct
  misc_feature 1..108: note = Synthetic
  source 1..108: mol_type = other DNA
atgctgcactacttaggtatgtcaaccaggagacaaatagagtgttgtttgagtgtaaactttatagggatggctacatcacagttgcagcatcatcaggattattag

SEQ ID NO: 9694 - DNA, 165 bp, synthetic construct
  misc_feature 1..165: note = Synthetic
  source 1..165: mol_type = other DNA
aagccatttagaagtctaacgaaaagggaaatagaaactttacttgacatgtggcacgtatcaagaaccaatctgaaaacctacaaagagttacgtaaggctctgacagaagcttcaaaaaaaagacaaagaaaaaaaatttcgactcggtccgcactagcctga

SEQ ID NO: 9695 - DNA, 168 bp, synthetic construct
  source 1..168: mol_type = other DNA
  misc_feature 1..168: note = Synthetic
atgtacagcgcaatttcagaaaagatctccgaaacgattaccctacagagacaaacgagctcgagatacattgaatttttcgtctttcgaaatgtggacatcaatgaactttggactacagacatatctgaagacaaaaccgactcggtccgcactagcctgaggtaa

SEQ ID NO: 9696 - DNA, 72 bp, synthetic construct
  source 1..72: mol_type = other DNA
  misc_feature 1..72: note = Synthetic
atgtggacatcaatgaactttggactacagacatatctgaagacaaaaccgactcggtccgcactagcctga

SEQ ID NO: 9697 - DNA, 66 bp, synthetic construct
  source 1..66: mol_type = other DNA
  misc_feature 1..66: note = Synthetic
atgaaaaagctacatccgtccggaatgaaaagacataaatgtaacatcaataaaaacgcatgttaa

SEQ ID NO: 9698 - DNA, 66 bp, synthetic construct
  source 1..66: mol_type = other DNA
  misc_feature 1..66: note = Synthetic
atgttcccggagtgtatgcttcttctcgaatcatccatgccggccaccgggaaggtctgtcggtga

SEQ ID NO: 9699 - DNA, 45 bp, synthetic construct
  misc_feature 1..45: note = Synthetic
  source 1..45: mol_type = other DNA
atcataatgtcagcttctacaatggtcgcgccggagaccctgtag

SEQ ID NO: 9700 - DNA, 162 bp, synthetic construct
  source 1..162: mol_type = other DNA
  misc_feature 1..162: note = Synthetic
atggtagtggcaggcgttctaccacatttactgtaccccgcttctctactcccagatctgataccttttatgtacaagatttggaaggttatgctgtgtcatatcctgaacgaaggaattatccagaaattatttatcctcaacccgatttgccaactgtaa

SEQ ID NO: 9701 - DNA, 54 bp, synthetic construct
  source 1..54: mol_type = other DNA
  misc_feature 1..54: note = Synthetic
ctgcagatacctctggggacttctatcgactcggtccgcactagcctgaggtaa

SEQ ID NO: 9702 - DNA, 45 bp, synthetic construct
  source 1..45: mol_type = other DNA
  misc_feature 1..45: note = Synthetic
atgcgtgtaaaaaaattttgtcagcttctaatagattataaatga

SEQ ID NO: 9703 - DNA, 99 bp, synthetic construct
  source 1..99: mol_type = other DNA
  misc_feature 1..99: note = Synthetic
agggttactcaatatatgaaaattatggcaatattaaggaatttaatgcgacgcatgcagcattcgaatattcgaacgactcggtccgcactagcctga

SEQ ID NO: 9704 - DNA, 123 bp, synthetic construct
  misc_feature 1..123: note = Synthetic
  source 1..123: mol_type = other DNA
ctgcggtgtgtttactttttatccagggttactcaatatatgaaaattatggcaatattaaggaatttaatgctactcatgcagcattcgaatattcaaacgactcggtccgcactagcctga

SEQ ID NO: 9705 - DNA, 156 bp, synthetic construct
  source 1..156: mol_type = other DNA
  misc_feature 1..156: note = Synthetic
atttcagaaaagatctccgaaacgattaccctacagagacaaacgagctcgagatacattgaatttttcgtctttcgaaatgtggacatcaatgaactttggactacagacatatctgaagacaaaaccgactcggtccgcactagcctgaggtaa

SEQ ID NO: 9706 - DNA, 168 bp, synthetic construct
  source 1..168: mol_type = other DNA
  misc_feature 1..168: note = Synthetic
atgaacccatcggagatgcaaagaaaagcacctccgcggagacggagacaccgcaatcgagcaccgttgactcacaagatgaacaaaatggtgacgtcagaagaacagatgaagttgccatccaccaagaaggcagagcccgactcggtccgcactagcctgaggtaa

SEQ ID NO: 9707 - DNA, 153 bp, synthetic construct
  source 1..153: mol_type = other DNA
  misc_feature 1..153: note = Synthetic
atgcaaagaaaagcacctccgcggagacggagacaccgcaatcgagcaccgttgactcacaagatgaacaaaatggtgacgtcagaagaacagatgaagttgccatccaccaagaaggcagagcccgactcggtccgcactagcctgaggtaa

SEQ ID NO: 9708 - DNA, 24 bp, synthetic construct
  misc_feature 1..24: note = Synthetic
  source 1..24: mol_type = other DNA
atgaagtcgccaaaggtggattga

SEQ ID NO: 9709 - DNA, 45 bp, synthetic construct
  misc_feature 1..45: note = Synthetic
  source 1..45: mol_type = other DNA
atggaagccagcgcggtattttcttttcgactcggtccgcactag

SEQ ID NO: 9710 - DNA, 159 bp, synthetic construct
  source 1..159: mol_type = other DNA
  misc_feature 1..159: note = Synthetic
atgggcaaatacggtctcggcttcaaatgggccccagaatttccatggatgcttccgaacgcatcggagaagttgggtaaccctgagaggtcagaggaggatgggttttgcccctctgctgcgcaagaacccgactcggtccgcactagcctgaggtaa

SEQ ID NO: 9711 - DNA, 171 bp, synthetic construct
  source 1..171: mol_type = other DNA
  misc_feature 1..171: note = Synthetic
acgatgtgcgcgcgacgtgtgtccgagatcacggcgtgcgcgagacttgtgttgagccttctcgtcgagagcgcgttcacaaaggggtccgcgtctgtcgtggaggaaacacccgcgctcgacgcgtgcatggcacgcgagcacgactcggtccgcactagcctgaggtaa

SEQ ID NO: 9712 - DNA, 207 bp, synthetic construct
  source 1..207: mol_type = other DNA
  misc_feature 1..207: note = Synthetic
gtgaaaataaagaccgtgtctggtgtatccaggatcacggcctgcgcgcgacgtgtgtccgagatcacggcgtgcgcgagacttgtgttgagccttctcgtcgagagcgcgttcacaaaggggtccgcgtctgtcgtggaggaaacacccgcgctcgacgcgtgcatggcacgcgagcacgactcggtccgcactagcctgaggtaa

SEQ ID NO: 9713 - DNA, 123 bp, synthetic construct
  source 1..123: mol_type = other DNA
  misc_feature 1..123: note = Synthetic
atgccgaggaaaatgacggagaaaacctattggctcagcctgatgatgatacaggcaattcaaccaacggagtgtacgcggccggagctccaactaaagaaagtgtggaagagcgcctcgtaa

SEQ ID NO: 9714 - DNA, 69 bp, synthetic construct
  source 1..69: mol_type = other DNA
  misc_feature 1..69: note = Synthetic
atgagaccaaatcagatgtactggcagtgccaggggcagatgttcccgactcggtccgcactagcctga

SEQ ID NO: 9715 - DNA, 36 bp, synthetic construct
  source 1..36: mol_type = other DNA
  misc_feature 1..36: note = Synthetic
atatcaatagtagacatgccagtatctttagattag

SEQ ID NO: 9716 - DNA, 54 bp, synthetic construct
  source 1..54: mol_type = other DNA
  misc_feature 1..54: note = Synthetic
attataactatttcagatttagagaaggatccatattctgtatttcgggtgtaa

SEQ ID NO: 9717 - DNA, 189 bp, synthetic construct
  source 1..189: mol_type = other DNA
  misc_feature 1..189: note = Synthetic
attctgtatttcgggtgtaacatggcaatagattacgcacaaatttcttgtaatttggcttctattatagaagaggactcggtctttttatttctaatagacaaattaaacaatctggacatttcaagaaggaaaatttcatttaattttatccgtctgtgcgactcggtccgcactagcctgaggtaa

SEQ ID NO: 9718 - DNA, 162 bp, synthetic construct
  source 1..162: mol_type = other DNA
  misc_feature 1..162: note = Synthetic
atagattacgcacaaatttcttgtaatttggcttctattatagaagaggactcggtctttttatttctaatagacaaattaaacaatctggacatttcaagaaggaaaatttcatttaattttatccgtctgtgcgactcggtccgcactagcctgaggtaa

SEQ ID NO: 9719 - DNA, 168 bp, synthetic construct
  misc_feature 1..168: note = Synthetic
  source 1..168: mol_type = other DNA
atggaatatgccgcaaacaatctaagtatgagtgtgttcagtccaataatattaaaggactgtacatttatgcaaacaacagttaccataactcaaatcttgccaggttctaaggaagcaataattttcccagtttacgacgactcggtccgcactagcctgaggtaa

SEQ ID NO: 9720 - DNA, 63 bp, synthetic construct
  source 1..63: mol_type = other DNA
  misc_feature 1..63: note = Synthetic
acggtgcaattctgtatgaaacagccgtgccttctcccccgcgcccataggggagcggcatga

SEQ ID NO: 9721 - DNA, 39 bp, synthetic construct
  source 1..39: mol_type = other DNA
  misc_feature 1..39: note = Synthetic
ctgataagagacaccggcatactctgcgacatcgtataa

SEQ ID NO: 9722 - DNA, 156 bp, synthetic construct
  misc_feature 1..156: note = Synthetic
  source 1..156: mol_type = other DNA
attatctttttatccgctatcgtaacctgcctagtatatacaacctttggtaaaacgtgtcctgcggattactatcttgaacctgaagatggtttatgtacggcatgtgttacttgtttaagcaatatcgactcggtccgcactagcctgaggtaa

SEQ ID NO: 9723 - DNA, 162 bp, synthetic construct
  source 1..162: mol_type = other DNA
  misc_feature 1..162: note = Synthetic
atgaatattatctttttatccgctatcgtaacctgcctagtatatacaacctttggtaaaacgtgtcctgcggattactatcttgaacctgaagatggtttatgtacggcatgtgttacttgtttaagcaatatcgactcggtccgcactagcctgaggtaa

SEQ ID NO: 9724 - DNA, 210 bp, synthetic construct
  misc_feature 1..210: note = Synthetic
  source 1..210: mol_type = other DNA
atagtgattcagttaattttcagacatactcagaacccgatcgccgggcaactgatctccttctttggagagattccaaccattctgcaagaggctctcaacattgcactcattgcagtcagcatcattgcaaccatcaagggtgtcgtgaatgtctggaaaagtggtctcatccagctgctcgactcggtccgcactagcctgaggtaa

SEQ ID NO: 9725 - DNA, 183 bp, synthetic construct
  misc_feature 1..183: note = Synthetic
  source 1..183: mol_type = other DNA
ctgtcacctggaaaaatgtacagcgtaatttcagaaaagatctctgaaacgattaccctacagagacaaacgagctcaagatacattgaatttttcgtctttcgaaacgtggacatcaatgaactttggactacagacatatctgaagacaaaaccgactcggtccgcactagcctgaggtaa

SEQ ID NO: 9726 - DNA, 60 bp, synthetic construct
  misc_feature 1..60: note = Synthetic
  source 1..60: mol_type = other DNA
atgaactttggactacagacatatctgaagacaaaaccgactcggtccgcactagcctga

SEQ ID NO: 9727 - DNA, 156 bp, synthetic construct
  misc_feature 1..156: note = Synthetic
  source 1..156: mol_type = other DNA
atttcagaaaagatctctgaaacgattaccctacagagacaaacgagctcaagatacattgaatttttcgtctttcgaaacgtggacatcaatgaactttggactacagacatatctgaagacaaaaccgactcggtccgcactagcctgaggtaa

SEQ ID NO: 9728 - DNA, 48 bp, synthetic construct
  misc_feature 1..48: note = Synthetic
  source 1..48: mol_type = other DNA
attgcacaaatgttggggccactgatcgagaatcgtttccacgactag

SEQ ID NO: 9729 - DNA, 102 bp, synthetic construct
  misc_feature 1..102: note = Synthetic
  source 1..102: mol_type = other DNA
atattttacagatattccgaaacctgtatggaggtcactgtcagagtaggtgatccagttaccctcggtagtggcgactcggtccgcactagcctgaggtaa

SEQ ID NO: 9730 - DNA, 168 bp, synthetic construct
  source 1..168: mol_type = other DNA
  misc_feature 1..168: note = Synthetic
atgaggcgcgcggtggtgtcctctcctcctccctcgtacgagagcgtgatggcgcaggcaaccctggaggttccgtttgtgcctccgcggtatatggctcctacggagggcagaaacagcattcgttactcggagctggccgactcggtccgcactagcctgaggtaa

SEQ ID NO: 9731 - DNA, 153 bp, synthetic construct
  misc_feature 1..153: note = Synthetic
  source 1..153: mol_type = other DNA
gtgtcctctcctcctccctcgtacgagagcgtgatggcgcaggcaaccctggaggttccgtttgtgcctccgcggtatatggctcctacggagggcagaaacagcattcgttactcggagctggccgactcggtccgcactagcctgaggtaa

SEQ ID NO: 9732 - DNA, 192 bp, synthetic construct
  source 1..192: mol_type = other DNA
  misc_feature 1..192: note = Synthetic
acgactgttcgtcgagcacccgtcatggtacagatccagtttcaccaaggcgagccactcggccataagaaagagaaacccccacccgtgtcgccgccgtcaccaccgccgatccgtcgagtcaccgtaatcaccaaagatgaagacaccctgcggagcgttcacgactcggtccgcactagcctgaggtaa

SEQ ID NO: 9733 - DNA, 192 bp, synthetic construct
  misc_feature 1..192: note = Synthetic
  source 1..192: mol_type = other DNA
acgactgttcgtcgagcacccgtcgccgtacagatccagtttcaccaaggcgagccactcggccataagaaagagaaacccccacccgtgtcgccgccgtcaccaccgccgatccgtcgagtcaccgtaatcaccaaagatgaagacaccctgcggagcgttcacgactcggtccgcactagcctgaggtaa

SEQ ID NO: 9734 - DNA, 60 bp, synthetic construct
  source 1..60: mol_type = other DNA
  misc_feature 1..60: note = Synthetic
ctgagtcatttcgcggttatgccagggtggagtatttgccgagggccgagtagactttga

SEQ ID NO: 9735 - DNA, 93 bp, synthetic construct
  misc_feature 1..93: note = Synthetic
  source 1..93: mol_type = other DNA
gtggcaaatggtgggaaagtgatgatgaatttgctaaagctgtgtatcagcaatttgtggaattttatgaaaaggttactggaacagacttag

SEQ ID NO: 9736 - DNA, 210 bp, synthetic construct
  source 1..210: mol_type = other DNA
  misc_feature 1..210: note = Synthetic
gtggtcctaggcaatgcagcaggtctaggcataatgggagagtatagaggtacgccaagaaaccaggatctttatgatgcagccaaagcatatgcagagcaactcaaagaaaatggagtaataaactacagtgtattagacttaacagcagaagaattggaagccataaagaatcaactcaacgactcggtccgcactagcctgaggtaa

SEQ ID NO: 9737 - DNA, 177 bp, synthetic construct
  source 1..177: mol_type = other DNA
  misc_feature 1..177: note = Synthetic
atgggagaatacagaggtacaccaaggaatcaagatctatatgatgctgcaaaagcatatgctgaacaactcaaagaaaatggtgtgattaactacagtgtattagacttgacagcagaagaactagaggctatcaaacatcagcttaacgactcggtccgcactagcctgaggtaa

SEQ ID NO: 9738 - DNA, 162 bp, synthetic construct
  misc_feature 1..162: note = Synthetic
  source 1..162: mol_type = other DNA
atgaacggtgcggtgatttatgatggcgcggcgaacgaggcggtacaggtgttctcccgtattgttgacatgccagcgggtcggggaaacgtgatcctgacgttcacgcttacgtccacacggcattcggcagacgactcggtccgcactagcctgaggtaa

SEQ ID NO: 9739 - DNA, 192 bp, synthetic construct
  misc_feature 1..192: note = Synthetic
  source 1..192: mol_type = other DNA
acgtattcggcctgttatctgaaagtactgatgaacggtgcggtgatttatgatggcgcggcgaacgaggcggtacaggtgttctcccgtattgttgacatgccagcgggtcggggaaacgtgatcctgacgttcacgcttacgtccacacggcattcggcagacgactcggtccgcactagcctgaggtaa

SEQ ID NO: 9740 - DNA, 72 bp, synthetic construct
  source 1..72: mol_type = other DNA
  misc_feature 1..72: note = Synthetic
atggcgcggcgaacgaggcggtacaggtgttctcccgtattgttgacatgccagcgggtcggggaaacgtga

SEQ ID NO: 9741 - DNA, 147 bp, synthetic construct
  misc_feature 1..147: note = Synthetic
  source 1..147: mol_type = other DNA
aagaactccccaccatcactccctacttgcaggagacgagtccagaacgggccccgtcacttcctcccaaaaagaagttgcgcaagaatgttcaagtgccggatcgcgttccagttttgcctcccgactcggtccgcactagcctga

SEQ ID NO: 9742 - DNA, 168 bp, synthetic construct
  source 1..168: mol_type = other DNA
  misc_feature 1..168: note = Synthetic
atggccggccgtcagcaagaactccccaccatcactccctacttgcaggagacgagtccagaacgggccccgtcacttcctcccaaaaagaagttgcgcaagaatgttcaagtgccggatcgcgttccagttttgcctcccgactcggtccgcactagcctgaggtaa

SEQ ID NO: 9743 - DNA, 210 bp, synthetic construct
  misc_feature 1..210: note = Synthetic
  source 1..210: mol_type = other DNA
acgtgtccattcggcgccagcagcccacccataggttgcataatggcaaagatgggcaaatacggtctcggcttcaaatgggccccagaatttccatggatgcttccgaacgcatcggagaagttgggtaaccctgagaggtcagaggaggatgggttttgcccctctgctgcgcaagaacccgactcggtccgcactagcctgaggtaa

SEQ ID NO: 9744 - DNA, 153 bp, synthetic construct
  source 1..153: mol_type = other DNA
  misc_feature 1..153: note = Synthetic
ctgcaaaaaatgtgcttacctgtctggattgcaaagctttgtagattgccagtaaagaaagtggcaaatggtgggaaagtgatgatgaatttgctaaagctgtgtatcagcaatttgtggaattttatgaaaaggttactggaacagacttag

SEQ ID NO: 9745 - DNA, 168 bp, synthetic construct
  source 1..168: mol_type = other DNA
  misc_feature 1..168: note = Synthetic
atgaaaagatcaatttctgtagacagttcttcacccaaaaacgtttttaatccagagacgcccaatggatttgatgacagtgtatatttaaacttcacctctatgcatagcattcaacctatcctctcacggattcgagacgactcggtccgcactagcctgaggtaa

SEQ ID NO: 9746 - DNA, 27 bp, synthetic construct
  source 1..27: mol_type = other DNA
  misc_feature 1..27: note = Synthetic
atggatttgatgacagtgtatatttaa

SEQ ID NO: 9747 - DNA, 171 bp, synthetic construct
  source 1..171: mol_type = other DNA
  misc_feature 1..171: note = Synthetic
acggccaaaagatcaatttctgtagacagttcttcacccaaaaacgtttttaatccagagacgcccaatggatttgatgacagtgtatatttaaacttcacctctatgcatagcattcaacctatcctctcacggattcgagacgactcggtccgcactagcctgaggtaa

SEQ ID NO: 9748 - DNA, 210 bp, synthetic construct
  source 1..210: mol_type = other DNA
  misc_feature 1..210: note = Synthetic
atagtgattcagttaattttcagacatactcagaacccgatcatggggcaactgatctccttctttggagagattccaaccattctgcaagaggctctcaacattgcactcattgcagtcagcatcattgcaaccatcaagggtgtcgtgaatgtctggaaaagtggtctcatccagctgctcgactcggtccgcactagcctgaggtaa

SEQ ID NO: 9749 - DNA, 168 bp, synthetic construct
  source 1..168: mol_type = other DNA
  misc_feature 1..168: note = Synthetic
atgaataaccaacggaaaaaggcgaaaaacacgcctttcaatatgctgaaacgcgagagaaaccgcgtgtcgactgtgcaacagctgacaaagagattctcacttggaatgctgcagggacgaggaccattaaaactgttcgactcggtccgcactagcctgaggtaa

SEQ ID NO: 9750 - DNA, 171 bp, synthetic construct
  misc_feature 1..171: note = Synthetic
  source 1..171: mol_type = other DNA
ctggccaataaccaacggaaaaaggcgaaaaacacgcctttcaatatgctgaaacgcgagagaaaccgcgtgtcgactgtgcaacagctgacaaagagattctcacttggaatgctgcagggacgaggaccattaaaactgttcgactcggtccgcactagcctgaggtaa

SEQ ID NO: 9751 - DNA, 102 bp, synthetic construct
  misc_feature 1..102: note = Synthetic
  source 1..102: mol_type = other DNA
atgttcaaactaatacatctgaaacatacgataaagaaaaagattgttggacattggataatggtcacttggtaccacacgactcggtccgcactagcctga

SEQ ID NO: 9752 - DNA, 222 bp, synthetic construct
  source 1..222: mol_type = other DNA
  misc_feature 1..222: note = Synthetic
ctggccgcgattgcagatgttatcgacgcgtcacctgacgcactgaatacgctgaatgaactggccgcagcgctcgggaatgatccagattttgctaccaccatgactaacgcgcttgcgggtaaacaaccgaagaatgcgacactgacggcgctggcagggctttccacggcgaaaaataaattaccgtatttcgactcggtccgcactagcctgaggtaa

SEQ ID NO: 9753 - DNA, 222 bp, synthetic construct
  misc_feature 1..222: note = Synthetic
  source 1..222: mol_type = other DNA
ctggccgcgattgcagatgttatcgacgcgtcacctgacgcactgaatacgctgagccaactggccgcagcgctcgggaatgatccagattttgctaccaccatgactaacgcgcttgcgggtaaacaaccgaagaatgcgacactgacggcgctggcagggctttccacggcgaaaaataaattaccgtatttcgactcggtccgcactagcctgaggtaa

SEQ ID NO: 9754 - DNA, 27 bp, synthetic construct
  source 1..27: mol_type = other DNA
  misc_feature 1..27: note = Synthetic
atgaaaaggttactggaacagacttag

SEQ ID NO: 9755 - DNA, 144 bp, synthetic construct
  source 1..144: mol_type = other DNA
  misc_feature 1..144: note = Synthetic
aagatagtgagtagagcacgctctgcgcgatccgagactactacaaaatctccgatgtggaagacgtgcatccataaagctgctactttctatgattataagcttcgccaatcgcaggccgaggagcgactcggtccgcactag

SEQ ID NO: 9756 - DNA, 87 bp, synthetic construct
  misc_feature 1..87: note = Synthetic
  source 1..87: mol_type = other DNA
atgggtttaaaacaggaatttatcaagctgtgtataaaaatcaaaagtgtgacggtgtcaatccatcaaaaaaatttgatttgctga

SEQ ID NO: 9757 - DNA, 39 bp, synthetic construct
  source 1..39: mol_type = other DNA
  misc_feature 1..39: note = Synthetic
atccagccaatctttcacatcagtgttggtattcagtag

SEQ ID NO: 9758 - DNA, 63 bp, synthetic construct
  source 1..63: mol_type = other DNA
  misc_feature 1..63: note = Synthetic
atggatccaaagggaaattggcatactttaggaggtccagtgttctcctttggatactattaa

SEQ ID NO: 9759 - DNA, 30 bp, synthetic construct
  misc_feature 1..30: note = Synthetic
  source 1..30: mol_type = other DNA
atgggaagggccagacgggtgttccaatga

SEQ ID NO: 9760 - DNA, 180 bp, synthetic construct
  misc_feature 1..180: note = Synthetic
  source 1..180: mol_type = other DNA
acgggtgttccaatgagttggttggtaggcgccctgcagactttcgggtctttggctgatgtcgctggcactgtctccaacatagtgtaccagcagcgccaggccgcccagttggaaaaacagaatgaactaatggagacatggatgaacaacgactcggtccgcactagcctgaggtaa

SEQ ID NO: 9761 - DNA, 159 bp, synthetic construct
  misc_feature 1..159: note = Synthetic
  source 1..159: mol_type = other DNA
ttggtaggcgccctgcagactttcgggtctttggctgatgtcgctggcactgtctccaacatagtgtaccagcagcgccaggccgcccagttggaaaaacagaatgaactaatggagacatggatgaacaacgactcggtccgcactagcctgaggtaa

SEQ ID NO: 9762 - DNA, 222 bp, synthetic construct
  source 1..222: mol_type = other DNA
  misc_feature 1..222: note = Synthetic
ttggggaagtcgacgatgcagtctgtgcatcacaactgcattcaccaggcgcaatatttgcaaggtttgagacagttgcaacagtctatttcgttcttggatcaatatttaatcgcagacgaggtttcgtggaacgttgttcccgtaatctgttttttcaggcagtggggactcaagttagatttttttaaaaagttttcgactcggtccgcactagcctga

SEQ ID NO: 9763 - DNA, 222 bp, synthetic construct
  misc_feature 1..222: note = Synthetic
  source 1..222: mol_type = other DNA
ttggggaagtcgacgatgcagtctgtgcatcacaactgcattcatcaggcgcaatatttgcaaggtttgagacagttgcatcagtctatttcgttcttggatcaatatttaattgcagacgaggttttgtggaacgttgttcccgtaatttgttttttcaggcagtggggactcaagttagatttttttaaaaagttttcgactcggtccgcactagcctga

SEQ ID NO: 9764 - DNA, 213 bp, synthetic construct
  misc_feature 1..213: note = Synthetic
  source 1..213: mol_type = other DNA
ctggcctacgacagtctcatggtcatctttttctgcccacctaaccaatgcatccgtcacgccgtctgtctctacctggacagcatggccatctttctcacgttgttgctcatgctctcgggtccccgttggattagtctttcggacggcgcgcctttggacaacgggactttgacagccgccagtacgacgactcggtccgcactagcctga

SEQ ID NO: 9765 - DNA, 66 bp, synthetic construct
  source 1..66: mol_type = other DNA
  misc_feature 1..66: note = Synthetic
acggtatcctttattgggccaagggtgtgggtccgtgttatgttaaaaacatctatttcgttttag

SEQ ID NO: 9766 - DNA, 63 bp, synthetic construct
  source 1..63: mol_type = other DNA
  misc_feature 1..63: note = Synthetic
atacatatgttccactctacatcaaacttctcgcacgactcggtccgcactagcctgaggtaa

SEQ ID NO: 9767 - DNA, 51 bp, synthetic construct
  source 1..51: mol_type = other DNA
  misc_feature 1..51: note = Synthetic
atggtctatacaatatatcccttaaaaacgactcggtccgcactagcctga

SEQ ID NO: 9768 - DNA, 78 bp, synthetic construct
  misc_feature 1..78: note = Synthetic
  source 1..78: mol_type = other DNA
gtggaaaggaccagcagaactcatttggaaaggagaaggagcggtggtaacgactcggtccgcactagcctgaggtaa

SEQ ID NO: 9769 - DNA, 177 bp, synthetic construct
  source 1..177: mol_type = other DNA
  misc_feature 1..177: note = Synthetic
ttggttaatatgctaacaacacaactagaactaaatactctacaaaaccaaatccaaaaaattttgaattttaaggtctactacagagaaggtagagatccagtgtggaaaggaccagcgcgactcatctggaaaggagaaggcgcggtggtaacgactcggtccgcactagcctga

SEQ ID NO: 9770 - DNA, 204 bp, synthetic construct
  source 1..204: mol_type = other DNA
  misc_feature 1..204: note = Synthetic
ataggggatatgaccccagcagaaagactaatcaacatgattaccacagaacaagaaatacaattcctccaaagaaaaaattcaaattttaaaaatttccaggtctattacagagaaggcagagatcagctgtggaaaggacctggtgaactactgtggaagggagaaggagcagtcatagcgactcggtccgcactagcctga

SEQ ID NO: 9771 - DNA, 180 bp, synthetic construct
  misc_feature 1..180: note = Synthetic
  source 1..180: mol_type = other DNA
ataataatgaacgcctctagacaaggtattttccagactgttgggagtggtcttgaccacatcctgtctttggcagacattgaggaagagcaaatgattcaatcagttgataggactgcagtgactggtgcttcttattttacttctgtggacgactcggtccgcactagcctgaggtaa

SEQ ID NO: 9772 - DNA, 123 bp, synthetic construct
  misc_feature 1..123: note = Synthetic
  source 1..123: mol_type = other DNA
acgagccgctgctcctgctctgttgcgttggcgccagcctggcggccaaccgcctgctctcgcgcgccagcaagctcgatgccgttttctccgtgcacgccgtctcgactcggtccgcactag

SEQ ID NO: 9773 - DNA, 93 bp, synthetic construct
  source 1..93: mol_type = other DNA
  misc_feature 1..93: note = Synthetic
atgttgccgcgcgtgctaagagaacaaaacgcgattccgtcacaaacatttatagaacctgcaagcaagcaggcacctgccctcctgatgtaa

SEQ ID NO: 9774 - DNA, 21 bp, synthetic construct
  source 1..21: mol_type = other DNA
  misc_feature 1..21: note = Synthetic
atgctgtcaagggtgtgctag

SEQ ID NO: 9775 - DNA, 153 bp, synthetic construct
  misc_feature 1..153: note = Synthetic
  source 1..153: mol_type = other DNA
atgtttcctgtattgcccagcagggtgcatttctttataataatgttagttcctcttggccagcctatgggtacggtcattgtccaacggcagctaacattggttatatggcacctgtttgtatctatgaccctctcccggtcatactgctag

SEQ ID NO: 9776 - DNA, 213 bp, synthetic construct
  misc_feature 1..213: note = Synthetic
  source 1..213: mol_type = other DNA
atggccaacagcctgtggcaccgcctccgaacgctcgtgagcaacagtcggcagaatgaacaaattcagcaacactcgtatcggcttcacttgcgcggttatggctccgcggactttaattctgacggttggactcctgtgtatgaggatcaggagtttattgtcttctcctgtcgagacgacggtaacaaccgccgactcggtccgcactag

SEQ ID NO: 9777 - DNA, 168 bp, synthetic construct
  source 1..168: mol_type = other DNA
  misc_feature 1..168: note = Synthetic
atgaacaaattcagcaacactcgtatcggcttcacttgcgcggttatggctccgcggactttaattctgacggttggactcctgtgtatgaggatcaggagtttattgtcttctcctgtcgagacgacggtaacaaccgccgactcggtccgcactagcctgaggtaa

SEQ ID NO: 9778 - DNA, 33 bp, synthetic construct
  source 1..33: mol_type = other DNA
  misc_feature 1..33: note = Synthetic
ttggattttgtattacctatattcttgatgtag

SEQ ID NO: 9779 - DNA, 33 bp, synthetic construct
  misc_feature 1..33: note = Synthetic
  source 1..33: mol_type = other DNA
atactatctcccaagtttgttgatgacggctga

SEQ ID NO: 9780 - DNA, 21 bp, synthetic construct
  source 1..21: mol_type = other DNA
  misc_feature 1..21: note = Synthetic
ctggcgatgtcgtttcgatag

SEQ ID NO: 9781 - DNA, 27 bp, synthetic construct
  misc_feature 1..27: note = Synthetic
  source 1..27: mol_type = other DNA
attgcgactcggtccgcactagcctga

SEQ ID NO: 9782 - DNA, 69 bp, synthetic construct
  source 1..69: mol_type = other DNA
  misc_feature 1..69: note = Synthetic
atgcaaccatctaacaaaaccagaagttacagtacaagaagaagcgtacagatattcattatcttctga

SEQ ID NO: 9783 - DNA, 87 bp, synthetic construct
  source 1..87: mol_type = other DNA
  misc_feature 1..87: note = Synthetic
ctgatcgaaactaatagtactgacactacagtactgaaatcatatgagctcatgcttcccaaacgtgctcgactcggtccgcactag

SEQ ID NO: 9784 - DNA, 27 bp, synthetic construct
  source 1..27: mol_type = other DNA
  misc_feature 1..27: note = Synthetic
atgggaattccagaatctcaacattga

SEQ ID NO: 9785 - DNA, 174 bp, synthetic construct
  misc_feature 1..174: note = Synthetic
  source 1..174: mol_type = other DNA
atgaacatgtctagacaaggtattttccagactgttgggagtggtcttgaccacatcctgtctttggcagacattgaggaagagcaaatgattcaatcagttgataggactgcagtgactggtgcttcttattttacttctgtggacgactcggtccgcactagcctgaggtaa

SEQ ID NO: 9786 - DNA, 51 bp, synthetic construct
  source 1..51: mol_type = other DNA
  misc_feature 1..51: note = Synthetic
atgaactcctgcagcttatctcaagaaactttcctaatgatgagagactag

SEQ ID NO: 9787 - DNA, 84 bp, synthetic construct
  misc_feature 1..84: note = Synthetic
  source 1..84: mol_type = other DNA
atgttcatggatatttgtaacccatcggaaaactcctgctttagcaagattttccctgtattgctgaaatgtgatttctcttga

SEQ ID NO: 9788 - DNA, 54 bp, synthetic construct
  misc_feature 1..54: note = Synthetic
  source 1..54: mol_type = other DNA
atgcagcctcagctagtaaacaagatttcagcgactcggtccgcactagcctga

SEQ ID NO: 9789 - DNA, 177 bp, synthetic construct
  misc_feature 1..177: note = Synthetic
  source 1..177: mol_type = other DNA
atatcctcgttctcctggtcgcggcgtttgatgtattgctggtttctttcccgttcatccagcagttccagcacaatcgatggtgttaccaattcatggaaaaggtctgcgtcaaatccccagtcgtcgcccattgcctgctctgccgccgactcggtccgcactagcctgaggtaa

SEQ ID NO: 9790 - DNA, 72 bp, synthetic construct
  misc_feature 1..72: note = Synthetic
  source 1..72: mol_type = other DNA
atggaaaaggtctgcgtcaaatccccagtcgtcgcccattgcctgctctgccgccgactcggtccgcactag

SEQ ID NO: 9791 - DNA, 72 bp, synthetic construct
  source 1..72: mol_type = other DNA
  misc_feature 1..72: note = Synthetic
atggaaaaggtctgcgtcaaatccccagtcgtcatgcattgcctgctctgccgccgactcggtccgcactag

SEQ ID NO: 9792 - DNA, 84 bp, synthetic construct
  source 1..84: mol_type = other DNA
  misc_feature 1..84: note = Synthetic
atgttacagaatataaattatatgccgatttttttaaaaaggaaatacttgactggagtatatatttatctcttcattatatag

SEQ ID NO: 9793 - DNA, 102 bp, synthetic construct
  source 1..102: mol_type = other DNA
  misc_feature 1..102: note = Synthetic
gtgttttccaatttttccacatcccatataatacaggattataatctcgttcgaacatacgagaaagtggataacgactcggtccgcactagcctgaggtaa

SEQ ID NO: 9794 - DNA, 36 bp, synthetic construct
  source 1..36: mol_type = other DNA
  misc_feature 1..36: note = Synthetic
atgatcctgtcgtcgactcggtccgcactagcctga

SEQ ID NO: 9795 - DNA, 99 bp, synthetic construct
  source 1..99: mol_type = other DNA
  misc_feature 1..99: note = Synthetic
atgacactccagtacctcttgagacaatcaaacctacaatcagggtatttgtcatcaataataatgatcctgtcgtcgactcggtccgcactagcctga

SEQ ID NO: 9796 - DNA, 54 bp, synthetic construct
  misc_feature 1..54: note = Synthetic
  source 1..54: mol_type = other DNA
gtgatgggggtgagaaaggccgcttggttaaacaactacgcacaacctacttga

SEQ ID NO: 9797 - DNA, 84 bp, synthetic construct
  source 1..84: mol_type = other DNA
  misc_feature 1..84: note = Synthetic
atgttacagaatataaattatatatggatttttttaaaaaggaaatacttgactggagtatatatttatctcttcattatatag

SEQ ID NO: 9798 - DNA, 99 bp, synthetic construct
  source 1..99: mol_type = other DNA
  misc_feature 1..99: note = Synthetic
ctgaaagattacttggtacctgtgagggcatggatctcgcgacttggagtgacttggccctgctgctctgtacgatgctggccacgggaatggggctag

SEQ ID NO: 9799 - DNA, 168 bp, synthetic construct
  misc_feature 1..168: note = Synthetic
  source 1..168: mol_type = other DNA
atggatctcgcgacttggagtgacttggccctgctgctctgtacgatgctggccacgggaatggggctagctgctctgctctgcgagttgtgcttgcggaggcgcgcgcgcatgccacggcgcggcgtgtccttctcgcgcgactcggtccgcactagcctgaggtaa

SEQ ID NO: 9800 - DNA, 72 bp, synthetic construct
  misc_feature 1..72: note = Synthetic
  source 1..72: mol_type = other DNA
attgggtgtcgacatagcagaataggcgttactcgacagaggagagcaagaagccgagccagtagatcctag

SEQ ID NO: 9801 - DNA, 213 bp, synthetic construct
  source 1..213: mol_type = other DNA
  misc_feature 1..213: note = Synthetic
atgcgagagaatgaatcaaatttccaatgtctgttttacgcatggtcaaagagactgtggggaatgcttccctggaatgtcagaatctcaacccgtttctgtcgtcaaaaagaagacttatcagaaactgtgtccaattcatcatatcctgggaagggcacccgagattgcctgttcggcctgcgcgactcggtccgcactagcctgaggtaa

SEQ ID NO: 9802 - DNA, 168 bp, synthetic construct
  misc_feature 1..168: note = Synthetic
  source 1..168: mol_type = other DNA
atggacgtgctccgcaccgtcaagaacaattactccagcgtggtgttcgccggcatcgcgctgctggtgctcgcctgcatctttgccttcgtggagtttagcaaggtcacgacgagcgactacacctggcgagcgctctgcgactcggtccgcactagcctgaggtaa

SEQ ID NO: 9803 - DNA, 162 bp, synthetic construct
  misc_feature 1..162: note = Synthetic
  source 1..162: mol_type = other DNA
gtgctccgcaccgtcaagaacaattactccagcgtggtgttcgccggcatcgcgctgctggtgctcgcctgcatctttgccttcgtggagtttagcaaggtcacgacgagcgactacacctggcgagcgctctgcgactcggtccgcactagcctgaggtaa

SEQ ID NO: 9804 - DNA, 189 bp, synthetic construct
  source 1..189: mol_type = other DNA
  misc_feature 1..189: note = Synthetic
attgtcttccgttcatccaccatgagccacgaggaactaaccgcgctagcgccggtggggcccgcggcttttctctacttcagcaggttgaacgcagaaacgcaggagattctggccactctctcgctatgcgaccgttcctcgagcgtggtgatcgctcccgactcggtccgcactagcctgaggtaa

SEQ ID NO: 9805 - DNA, 189 bp, synthetic construct
  source 1..189: mol_type = other DNA
  misc_feature 1..189: note = Synthetic
attgtcttccgttcatccaccgccagccacgaggaactaaccgcgctagcgccggtggggcccgcggcttttctctacttcagcaggttgaacgcagaaacgcaggagattctggccactctctcgctatgcgaccgttcctcgagcgtggtgatcgctcccgactcggtccgcactagcctgaggtaa

SEQ ID NO: 9806 - DNA, 84 bp, synthetic construct
  source 1..84: mol_type = other DNA
  misc_feature 1..84: note = Synthetic
atgaactgcccgtggtggcggatgatgaatcgcgccatggtatccaaaccgaggctccaggcgcgcaacagcgggcgaaagtag

SEQ ID NO: 9807 - DNA, 60 bp, synthetic construct
  source 1..60: mol_type = other DNA
  misc_feature 1..60: note = Synthetic
atgaatcgcgccatggtatccaaaccgaggctccaggcgcgcaacagcgggcgaaagtag

SEQ ID NO: 9808 - DNA, 42 bp, synthetic construct
  source 1..42: mol_type = other DNA
  misc_feature 1..42: note = Synthetic
atagacgcagttccgttcccggcgggtacgtcaacggcatga

SEQ ID NO: 9809 - DNA, 120 bp, synthetic construct
  source 1..120: mol_type = other DNA
  misc_feature 1..120: note = Synthetic
ataaaatccatcgctgactgcgtatccagctcactctcaatggtggcggcatacatcgccttcacaatggcgctctgcagctgcgtgttctgcagcgcgactcggtccgcactagcctga

SEQ ID NO: 9810 - DNA, 42 bp, synthetic construct
  source 1..42: mol_type = other DNA
  misc_feature 1..42: note = Synthetic
atttcaccaatccagccggtcagcctttcccgctgctcctga

SEQ ID NO: 9811 - DNA, 75 bp, synthetic construct
  source 1..75: mol_type = other DNA
  misc_feature 1..75: note = Synthetic
atcctcctgtcctcccaggtagccatgctccagcccagcgttggtttccttctgttcatcctgtgggggttctag

SEQ ID NO: 9812 - DNA, 21 bp, synthetic construct
  source 1..21: mol_type = other DNA
  misc_feature 1..21: note = Synthetic
acgagtagccgccaaaactga

SEQ ID NO: 9813 - DNA, 24 bp, synthetic construct
  source 1..24: mol_type = other DNA
  misc_feature 1..24: note = Synthetic
ctgaataactatcggacttcgtaa

SEQ ID NO: 9814 - DNA, 168 bp, synthetic construct
  misc_feature 1..168: note = Synthetic
  source 1..168: mol_type = other DNA
atgccgctgttccggaagctcatggtctcccgcgccctcgtcaaggaatgtttgactctggacttccggcagggcgagcgtctccccacccgatgcttcctcccggtgcccgcggggacgacattccacagagtctgcgacgactcggtccgcactagcctgaggtaa

SEQ ID NO: 9815 - DNA, 162 bp, synthetic construct
  source 1..162: mol_type = other DNA
  misc_feature 1..162: note = Synthetic
ctgttccggaagctcatggtctcccgcgccctcgtcaaggaatgtttgactctggacttccggcagggcgagcgtctccccacccgatgcttcctcccggtgcccgcggggacgacattccacagagtctgcgacgactcggtccgcactagcctgaggtaa

SEQ ID NO: 9816 - DNA, 132 bp, synthetic construct
  source 1..132: mol_type = other DNA
  misc_feature 1..132: note = Synthetic
ctgaggttgcatagacgcagttccgttcccggcgggtacgttaacggcatgaactgcccgtggtggcggatgatgaatcgcgccatggtatccaaaccgaggctccaggcgcgcaacagcgggcgaaagtag

SEQ ID NO: 9817 - DNA, 132 bp, synthetic construct
  misc_feature 1..132: note = Synthetic
  source 1..132: mol_type = other DNA
ctgaggttgcatagacgcagttccgttcccggcgggttcgtcaacggcatgaactgcccgtggtggcggatgatgaatcgcgccatggtatccaaaccgaggctccaggcgcgcaacagcgggcgaaagtag

SEQ ID NO: 9818 - DNA, 27 bp, synthetic construct
  source 1..27: mol_type = other DNA
  misc_feature 1..27: note = Synthetic
ctgaccataaccagcgcccggcagtga

SEQ ID NO: 9819 - DNA, 45 bp, synthetic construct
  misc_feature 1..45: note = Synthetic
  source 1..45: mol_type = other DNA
acgacaagcaacagattatctacagcaatttgtcatcaaaaatga

SEQ ID NO: 9820 - DNA, 33 bp, synthetic construct
  misc_feature 1..33: note = Synthetic
  source 1..33: mol_type = other DNA
ttgtcatcaaaaatgaaagcttatgtaaggtaa

SEQ ID NO: 9821 - DNA, 93 bp, synthetic construct
  misc_feature 1..93: note = Synthetic
  source 1..93: mol_type = other DNA
ctggtcgtcgccggcgccaaggtcaagttcccgcgttcgctgctgtccatgtaccgcgtggtgcccgactcggtccgcactagcctgaggtaa

SEQ ID NO: 9822 - DNA, 132 bp, synthetic construct
  misc_feature 1..132: note = Synthetic
  source 1..132: mol_type = other DNA
ctgaggttgcatagacgcagttccgttcccggcgggtacgtcaacggcatgaactgcccgtggtggcggatgatgaatcgcgccatggtatccaaaccgaggctccaggcgcgcaacagcgggcgaaagtag

SEQ ID NO: 9823 - DNA, 63 bp, synthetic construct
  source 1..63: mol_type = other DNA
  misc_feature 1..63: note = Synthetic
atagacgcagttccgttcccggcgggtacgtcaacggcgccaactgcccgtggtggcggatga

SEQ ID NO: 9824 - DNA, 93 bp, synthetic construct
  source 1..93: mol_type = other DNA
  misc_feature 1..93: note = Synthetic
ttggaagctattcttacaggagaagctttagcagctttggaagcagagatctccagtttaatgaccgactcggtccgcactagcctgaggtaa

SEQ ID NO: 9825 - DNA, 24 bp, synthetic construct
  source 1..24: mol_type = other DNA
  misc_feature 1..24: note = Synthetic
atgatgaaatgtatgagatggtga

SEQ ID NO: 9826 - DNA, 96 bp, synthetic construct
  misc_feature 1..96: note = Synthetic
  source 1..96: mol_type = other DNA
gtgagaatgacggccacgtttctgtcaacaatgtctgtcatatgtatttcgcgttctttgatgttgatacatccgactcggtccgcactagcctga

SEQ ID NO: 9827 - DNA, 132 bp, synthetic construct
  misc_feature 1..132: note = Synthetic
  source 1..132: mol_type = other DNA
atgcacgcgtgtatgtatgcatcgtctctcctccgtcccgactaccatcagcagtaccactaccgccacccccagcgccaccaccgctgccgtcgccaccgcgttatccgttcccgactcggtccgcactag

SEQ ID NO: 9828 - DNA, 84 bp, synthetic construct
  source 1..84: mol_type = other DNA
  misc_feature 1..84: note = Synthetic
atgttacagaatataaattatatatggatttttttaaaaaggaaatacttgactggagtatatatttatttcttcattacataa

SEQ ID NO: 9829 - DNA, 42 bp, synthetic construct
  source 1..42: mol_type = other DNA
  misc_feature 1..42: note = Synthetic
ttgttcgaaaatacgagaacgactcggtccgcactagcctga

SEQ ID NO: 9830 - DNA, 84 bp, synthetic construct
  source 1..84: mol_type = other DNA
  misc_feature 1..84: note = Synthetic
atgttacagaatataaattatatgccgatttttttaaaaaggaaatacttgactggagtatatatttatttcttcattacataa

SEQ ID NO: 9831 - DNA, 24 bp, synthetic construct
  source 1..24: mol_type = other DNA
  misc_feature 1..24: note = Synthetic
ataaagattatactccatctttaa

SEQ ID NO: 9832 - DNA, 168 bp, synthetic construct
  misc_feature 1..168: note = Synthetic
  source 1..168: mol_type = other DNA
atgagttatttaagatattacaatatgcttgacgacttctccgcgggtgctggagtgcttgataaagatttatttacagaggaacagcagcaatcgtttatgcctaaagatggaggtatgatgcaaaacgattatggaggcgactcggtccgcactagcctgaggtaa

SEQ ID NO: 9833 - DNA, 168 bp, synthetic construct
  source 1..168: mol_type = other DNA
  misc_feature 1..168: note = Synthetic
atgagttatttaagatattacaatatgcttgacgacttctctgcgggtgctggagtgcttgataaagatttatttacagaggaacagcagcaatcgtttatgcctaaagatggaggtatgatgcaaaacgattatggaggcgactcggtccgcactagcctgaggtaa

SEQ ID NO: 9834 - DNA, 168 bp, synthetic construct
  misc_feature 1..168: note = Synthetic
  source 1..168: mol_type = other DNA
atgagttatttaagatattacaatatgcttgatgacttctctgcgggtgctggagtgcttgataaagatttatttacagaggaacagcagcaatcgtttatgcctaaagatgggggtatgatgcaaaacgattatggaggcgactcggtccgcactagcctgaggtaa

SEQ ID NO: 9835 - DNA, 21 bp, synthetic construct
  misc_feature 1..21: note = Synthetic
  source 1..21: mol_type = other DNA
gtgacattttttaatatataa

SEQ ID NO: 9836 - DNA, 144 bp, synthetic construct
  misc_feature 1..144: note = Synthetic
  source 1..144: mol_type = other DNA
atgcttgacgacttctccgcgggtgctggagtgcttgataaagatttatttacagaggaacagcagcaatcgtttatgcctaaagatggaggtatgatgcaaaacgattatggaggcgactcggtccgcactagcctgaggtaa

SEQ ID NO: 9837 - DNA, 144 bp, synthetic construct
  source 1..144: mol_type = other DNA
  misc_feature 1..144: note = Synthetic
atgcttgacgacttctctgcgggtgctggagtgcttgataaagatttatttacagaggaacagcagcaatcgtttatgcctaaagatggaggtatgatgcaaaacgattatggaggcgactcggtccgcactagcctgaggtaa

SEQ ID NO: 9838 - DNA, 168 bp, synthetic construct
  source 1..168: mol_type = other DNA
  misc_feature 1..168: note = Synthetic
atggacatgatgcttatgattggaaattatttttccggagtgttaattgctggaatcattcttttgattctttcgtgtatctttgcctttattgactttagtaagtctaccagtcccactcgtacatggaaagtattgagcgactcggtccgcactagcctgaggtaa

SEQ ID NO: 9839 - DNA, 162 bp, synthetic construct
  source 1..162: mol_type = other DNA
  misc_feature 1..162: note = Synthetic
atgatgcttatgattggaaattatttttccggcgtgctaatcgctggaatcattcttttgattctttcgtgtatcttcgcctttattgactttagtaagtctaccagtcccactcgtacatggaaagtattgagcgactcggtccgcactagcctgaggtaa

SEQ ID NO: 9840 - DNA, 168 bp, synthetic construct
  source 1..168: mol_type = other DNA
  misc_feature 1..168: note = Synthetic
atggacatgatgcttatgattggaaattatttttccggcgtgctaatcgctggaatcattcttttgattctttcgtgtatctttgcctttattgactttagtaagtctaccagtcccactcgtacatggaaagtattgagcgactcggtccgcactagcctgaggtaa

SEQ ID NO: 9841 - DNA, 162 bp, synthetic construct
  misc_feature 1..162: note = Synthetic
  source 1..162: mol_type = other DNA
atgatgcttatgattggaaattatttttccggagtgttaattgctggaatcattcttttgattctttcgtgtatctttgcctttattgactttagtaagtctaccagtcccactcgtacatggaaagtattgagcgactcggtccgcactagcctgaggtaa

SEQ ID NO: 9842 - DNA, 162 bp, synthetic construct
  source 1..162: mol_type = other DNA
  misc_feature 1..162: note = Synthetic
gtgtgcttaagaatgccggtggagggcgctctgcgcgagctttttatcatggctggcttggatttacctcaggaactaatacgaatcattcaaggctggaaaaatgaaaattatctggggatggtgcaggagtgcgactcggtccgcactagcctgaggtaa

SEQ ID NO: 9843 - DNA, 24 bp, synthetic construct
  misc_feature 1..24: note = Synthetic
  source 1..24: mol_type = other DNA
ataaaaatggacacgtggatatga

SEQ ID NO: 9844 - DNA, 168 bp, synthetic construct
  misc_feature 1..168: note = Synthetic
  source 1..168: mol_type = other DNA
atgatgattcttttgctcgactatatgacgccgtcaaacaccaataatttccttctcttcattccggacattaaattggctatagataataaagacattgaggtgttacaggctctgttcaaatacgacattaatatctacgactcggtccgcactagcctgaggtaa

SEQ ID NO: 9845 - DNA, 27 bp, synthetic construct
  source 1..27: mol_type = other DNA
  misc_feature 1..27: note = Synthetic
ataaaaatggacacgtggatgccatga

SEQ ID NO: 9846 - DNA, 165 bp, synthetic construct
  misc_feature 1..165: note = Synthetic
  source 1..165: mol_type = other DNA
atgattcttttgctcgactatatgacgccgtcaaacaccaataatttccttctcttcattccggacattaaattggctatagataataaagacattgaggtgttacaggctctgttcaaatacgacattaatatctacgactcggtccgcactagcctgaggtaa

SEQ ID NO: 9847 - DNA, 48 bp, synthetic construct
  misc_feature 1..48: note = Synthetic
  source 1..48: mol_type = other DNA
atgttttattttatgacggatagcggtgttagattgcatgaggcataa

SEQ ID NO: 9848 - DNA, 99 bp, synthetic construct
  misc_feature 1..99: note = Synthetic
  source 1..99: mol_type = other DNA
ttgaaaagagataacatgttacagaatataaattatatatggatttttttaaaaaggaaatacttgactggagtatatatttatctcttcattacataa

SEQ ID NO: 9849 - DNA, 99 bp, synthetic construct
  source 1..99: mol_type = other DNA
  misc_feature 1..99: note = Synthetic
ttgaaaagagataacatgttacagaatataaattatatgccgatttttttaaaaaggaaatacttgactggagtatatatttatctcttcattacataa

SEQ ID NO: 9850 - DNA, 177 bp, synthetic construct
  misc_feature 1..177: note = Synthetic
  source 1..177: mol_type = other DNA
ttgaatcacttagttgatatgaatgtgaaagacttttcaataactaatctgcagtcggtattcgagacggtgtcttcaaacgatgctccggtctatgacttttctgaaattctagcggaggaggacgatcaaggaaacggtgtattaaaatgtgcgactcggtccgcactagcctga

SEQ ID NO: 9851 - DNA, 186 bp, synthetic construct
  misc_feature 1..186: note = Synthetic
  source 1..186: mol_type = other DNA
atgcttaaactgaatcacttagttgatatgaatgtgagagatttttcaatagctaatttgcagtcggtatttgaggcggtgtcttcaaacgatgctccggtctatgacttttctgaaattctagcggaggaggacgatcaagcaagcggtgtattaaaatgtgcgactcggtccgcactagcctga

SEQ ID NO: 9852 - DNA, 129 bp, synthetic construct
  misc_feature 1..129: note = Synthetic
  source 1..129: mol_type = other DNA
aggagcagcttaaagaggaatctcgctttgaacgaatgggtaaacaagatgacggaaaaggggataggaatcataagaacgaagacggaagtgcgttggcatcaaaacaggaaacgcaatataaaataa

SEQ ID NO: 9853 - DNA, 183 bp, synthetic construct
  misc_feature 1..183: note = Synthetic
  source 1..183: mol_type = other DNA
atgggtaaacaagatgacggaaaaggggataggaatcataagaacgaagacggaagtgcgttggcatcaaaacaggaaacgcaatataaaataaccaactacatggttcccactaaaaacgggactgcgggctctagcttatttaatgagaaagacgactcggtccgcactagcctgaggtaa

SEQ ID NO: 9854 - DNA, 168 bp, synthetic construct
  source 1..168: mol_type = other DNA
  misc_feature 1..168: note = Synthetic
atgaggcgtgcggtggtgtcttcctctcctcctccctcgtacgagagcgtgatggcgcaggcgaccctggaggttccgtttgtgcctccgcggtatatggctcctacggagggcagaaacagcattcgttactcggagctcgactcggtccgcactagcctgaggtaa

SEQ ID NO: 9855 - DNA, 51 bp, synthetic construct
  source 1..51: mol_type = other DNA
  misc_feature 1..51: note = Synthetic
atgcaaaataaaactcaccaaggccatagcgtgcgttctcttccttgttag

SEQ ID NO: 9856 - DNA, 177 bp, synthetic construct
  misc_feature 1..177: note = Synthetic
  source 1..177: mol_type = other DNA
ttgttagaggccaggcgtgcggtggtgtcttcctctcctcctccctcgtacgagagcgtgatggcgcaggcgaccctggaggttccgtttgtgcctccgcggtatatggctcctacggagggcagaaacagcattcgttactcggagctcgactcggtccgcactagcctgaggtaa

SEQ ID NO: 9857 - DNA, 69 bp, synthetic construct
  misc_feature 1..69: note = Synthetic
  source 1..69: mol_type = other DNA
atgcattggcatcaaaagaagatagatgaactgacatatagcgaatataaggagatccaacactattag

SEQ ID NO: 9858 - DNA, 168 bp, synthetic construct
  source 1..168: mol_type = other DNA
  misc_feature 1..168: note = Synthetic
atgagggtgtgcttaagaatgccggtggagggcgctctgcgcgagctttttatcatggctggcttggatttacctcaggaactaatacgaatcattcaaggctggaaaaatgaaaattatctggggatggtgcaggagtgcgactcggtccgcactagcctgaggtaa

SEQ ID NO: 9859 - DNA, 168 bp, synthetic construct
  misc_feature 1..168: note = Synthetic
  source 1..168: mol_type = other DNA
atgttttccggtggcggcggcccgctgtcccccggaggaaagtcggcggccagggcggcgtccgggttttttgcgcccgccggccctcgcggagccagccggggacccccgccttgtttgaggcaaaacttttacaaccccgactcggtccgcactagcctgaggtaa

SEQ ID NO: 9860 - DNA, 105 bp, synthetic construct
  misc_feature 1..105: note = Synthetic
  source 1..105: mol_type = other DNA
atggtgggattcgatcgcgccgccaacgccacgccatggacgccgccgagatggaggagctcgacatcaacgcagagtcggtgctgtacgactacttcatcctga

SEQ ID NO: 9861 - DNA, 33 bp, synthetic construct
  source 1..33: mol_type = other DNA
  misc_feature 1..33: note = Synthetic
atgcacataaaaggattagcgcatgcaaattag

SEQ ID NO: 9862 - DNA, 33 bp, synthetic construct
  source 1..33: mol_type = other DNA
  misc_feature 1..33: note = Synthetic
atgcacataaaaggattagcgcgcccaaattag

SEQ ID NO: 9863 - DNA, 171 bp, synthetic construct
  source 1..171: mol_type = other DNA
  misc_feature 1..171: note = Synthetic
ttggatcaatggagcgcccaaactcatctgtcgcagggttatactctggattacatggcaatggctctgtggagaaccttgctacggaggaagagggtcttaggttgcttgccggcgcagcgtccgcacggtttggatccagtgcaggcgactcggtccgcactagcctga

SEQ ID NO: 9864 - DNA, 171 bp, synthetic construct
  source 1..171: mol_type = other DNA
  misc_feature 1..171: note = Synthetic
ttggatcagccgagcgcccaaactcatctgtcgcagggttatactctggattacatggcaatggctctgtggagaaccttgctacggaggaagagggtcttaggttgcttgccggcgcagcgtccgcacggtttggatccagtgcaggcgactcggtccgcactagcctga

SEQ ID NO: 9865 - DNA, 165 bp, synthetic construct
  misc_feature 1..165: note = Synthetic
  source 1..165: mol_type = other DNA
acgctcgtcatgggatcctgctgtggtagattctgtgacgctaagaataagaataagaaggaagatgtagaagagggaagagaaggatgttacaattataagaaccttaatgatctggatgaatccgaagcacgtgtcgactcggtccgcactagcctgaggtaa

SEQ ID NO: 9866 - DNA, 213 bp, synthetic construct
  misc_feature 1..213: note = Synthetic
  source 1..213: mol_type = other DNA
ctgaagccgaaggagaggcaccacgaaaacaagaatcactctcagatgtcatcggactccttgacgtcgtcttatcctacaagcccacagaaattggagaagacagaagctggctccatggtatcatcgacaacccaaaagaaaacaagccatcatgcaaagccgacgataacaacaaagacagacgactcggtccgcactagcctgaggtaa

SEQ ID NO: 9867 - DNA, 204 bp, synthetic construct
  source 1..204: mol_type = other DNA
  misc_feature 1..204: note = Synthetic
aaggagaggcaccacgaaaacaagaatcactctcaggcctcatcggactccttgacgtcgtcttatcctacaagcccacagaaattggagaagacagaagctggctccatggtatcatcgacaacccaaaagaaaacaagccatcatgcaaagccgacgataacaacaaagacagacgactcggtccgcactagcctgaggtaa

SEQ ID NO: 9868 - DNA, 189 bp, synthetic construct
  misc_feature 1..189: note = Synthetic
  source 1..189: mol_type = other DNA
aagaacatgggccttgaaacctggcctatggcacttcttagaagcatatctcctatctcaagaacacagtacttctcccatttgtgtggttcaagtcttgggtcagtgagagaaaactccatgctcacaaagtttaccacgtcggtgtcattccttaagtgggatcttcctcgactcggtccgcactag

SEQ ID NO: 9869 - DNA, 189 bp, synthetic construct
  source 1..189: mol_type = other DNA
  misc_feature 1..189: note = Synthetic
aagaacatgggccttgaaacctggcctgccgcacttcttagaagcatatctcctatctcaagaacacagtacttctcccatttgtgtggttcaagtcttgggtcagtgagagaaaactccatgctcacaaagtttaccacgtcggtgtcattccttaagtgggatcttcctcgactcggtccgcactag

SEQ ID NO: 9870 - DNA, 102 bp, synthetic construct
  misc_feature 1..102: note = Synthetic
  source 1..102: mol_type = other DNA
atgcttacctcccgaatgtacaaatcggcaaagcgtccaatccccgtccatttgcaactccggccggccaggacgtgtgcacggcaggcaccgtcgttttag

SEQ ID NO: 9871 - DNA, 204 bp, synthetic construct
  source 1..204: mol_type = other DNA
  misc_feature 1..204: note = Synthetic
atgtcaaataaatctatacttgtcgtggctgtgaaagccgcctttgctgacaagcctaatcatttcataaactttcccctggcccaatttagtggctttatgggtaagtatttaaagctacagtctcaacttgtggaaatgggtttagactgtaaattacagaaggcaccacatgtcgactcggtccgcactagcctgaggtaa

SEQ ID NO: 9872 - DNA, 162 bp, synthetic construct
  source 1..162: mol_type = other DNA
  misc_feature 1..162: note = Synthetic
atgatgcttatgattggaaattatttttccggcgtgctaatcgctggaatcattcttttgattctttcgtgtatctttgcctttattgactttagtaagtctaccagtcccactcgtacatggaaagtattgagcgactcggtccgcactagcctgaggtaa

SEQ ID NO: 9873 - DNA, 27 bp, synthetic construct
  source 1..27: mol_type = other DNA
  misc_feature 1..27: note = Synthetic
attttgtcaacgacagagctttactaa

SEQ ID NO: 9874 - DNA, 18 bp, synthetic construct
  source 1..18: mol_type = other DNA
  misc_feature 1..18: note = Synthetic
atgcctgtatttccctga

SEQ ID NO: 9875 - DNA, 51 bp, synthetic construct
  misc_feature 1..51: note = Synthetic
  source 1..51: mol_type = other DNA
ttgtatctgaaccagcaggcggacttccgacggattcctgtcaccctttga

SEQ ID NO: 9876 - DNA, 81 bp, synthetic construct
  misc_feature 1..81: note = Synthetic
  source 1..81: mol_type = other DNA
atggtgcgggtgatcggcgtgtcatatttcacttccgtacccagcaccgtctcggagccgactcggtccgcactagcctga

SEQ ID NO: 9877 - DNA, 159 bp, synthetic construct
  misc_feature 1..159: note = Synthetic
  source 1..159: mol_type = other DNA
ctgtcaccctttgaggtggtttccaccagtgcctgtacaccgaaggtaaagcgcagacggtcgatgtttgcagacgtaatggtgcgggtgatcggcgtgtcatatttcacttccgtacccagcaccgtctcggagccgactcggtccgcactagcctga

SEQ ID NO: 9878 - DNA, 165 bp, synthetic construct
  source 1..165: mol_type = other DNA
  misc_feature 1..165: note = Synthetic
ttgcgcggagattcggccgccaagatccaggagcgctacgcggagctgcagaagcgcaagagccaccccacctcctgcatctccacggccttcaccaatgtggcggcgctgtgccgcaagcgctaccagatgatgcacgactcggtccgcactagcctgaggtaa

SEQ ID NO: 9879 - DNA, 171 bp, synthetic construct
  misc_feature 1..171: note = Synthetic
  source 1..171: mol_type = other DNA
atcgccttgcgcggagattcggccgccaagatccaggagcgctacgcggagctgcagaagcgcaagagccaccccacctcctgcatctccacggccttcaccaatgtggcggcgctgtgccgcaagcgctaccagatgatgcacgactcggtccgcactagcctgaggtaa

SEQ ID NO: 9880 - DNA, 90 bp, synthetic construct
  misc_feature 1..90: note = Synthetic
  source 1..90: mol_type = other DNA
atgtttctaggaattatgttaaaaattgacaaaaatgatcgaggatattttacctttgctcccgctattattgattcaaaatattcgtaa

SEQ ID NO: 9881 - DNA, 123 bp, synthetic construct
  source 1..123: mol_type = other DNA
  misc_feature 1..123: note = Synthetic
atggctaagcgatatgcatcaagaaagagagtttatcgtcgaaaaacgcggaaaccttttagaagggttcgtcgatatcgtgttaaggcacgttcgacagctaaacgactcggtccgcactag

SEQ ID NO: 9882 - DNA, 27 bp, synthetic construct
  misc_feature 1..27: note = Synthetic
  source 1..27: mol_type = other DNA
atgttttacatgccatatgttttgtaa

SEQ ID NO: 9883 - DNA, 192 bp, synthetic construct
  misc_feature 1..192: note = Synthetic
  source 1..192: mol_type = other DNA
attgcttttttggcaaccatattggataaatggagcgagaaatcccacctgagttgggattacatgctggattacatgtcaatgcagctgtggagggcatggctgaagaggagggtttgcatttactcgctggcgcggcctttgaccatgccgccgctgccgacgttgccgactcggtccgcactagcctga

SEQ ID NO: 9884 - DNA, 192 bp, synthetic construct
  misc_feature 1..192: note = Synthetic
  source 1..192: mol_type = other DNA
attgcttttttggcaaccatattggataagccgagcgagaaatcccacctgagttgggattacatgctggattacatgtcaatgcagctgtggagggcatggctgaagaggagggtttgcatttactcgctggcgcggcctttgaccatgccgccgctgccgacgttgccgactcggtccgcactagcctga

SEQ ID NO: 9885 - DNA, 183 bp, synthetic construct
  source 1..183: mol_type = other DNA
  misc_feature 1..183: note = Synthetic
ttgagttttataaaggataaatggagcgaagaaacccatctgagcggggggtacctgctggattttctggccatgcatctgtggagagcggtggtgagacacaagaatcgcctgctactgttgtcttccgtccgcccggcaataataccgacggaggagccgactcggtccgcactagcctga

SEQ ID NO: 9886 - DNA, 144 bp, synthetic construct
  misc_feature 1..144: note = Synthetic
  source 1..144: mol_type = other DNA
ctgagcggggggtacctgctggattttctggccatgcatctgtggagagcggtggtgagacacaagaatcgcctgctactgttgtcttccgtccgcccggcaataataccgacggaggagccgactcggtccgcactagcctga

SEQ ID NO: 9887 - DNA, 183 bp, synthetic construct
  misc_feature 1..183: note = Synthetic
  source 1..183: mol_type = other DNA
gtggtttttctggttgacaaatggagccaggacacccaactgagcaggggctacatcctggacttcgcagccatgcacctgtggagggcctggatcaggcagcggggacagagaatcttgaattactggcttctacagccagcagctccgggtcttcttccgactcggtccgcactagcctga

SEQ ID NO: 9888 - DNA, 144 bp, synthetic construct
  source 1..144: mol_type = other DNA
  misc_feature 1..144: note = Synthetic
ctgagcaggggctacatcctggacttcgcagccatgcacctgtggagggcctggatcaggcagcggggacagagaatcttgaattactggcttctacagccagcagctccgggtcttcttccgactcggtccgcactagcctga

SEQ ID NO: 9889 - DNA, 111 bp, synthetic construct
  misc_feature 1..111: note = Synthetic
  source 1..111: mol_type = other DNA
aagcgcagacggtcgatgtttgcagacgtaatggtgcgggtgatcggcgtgtcatatttcacttccgtacccagcaccgtctcggagccgactcggtccgcactagcctga

SEQ ID NO: 9890 - DNA, 111 bp, unidentified; identical to SEQ ID NO: 9889
  misc_feature 1..111: note = Synthetic
  source 1..111: mol_type = other DNA

SEQ ID NO: 9891 - DNA, 33 bp, unidentified; identical to SEQ ID NO: 1
  source 1..33: mol_type = other DNA

SEQ ID NO: 9892 - DNA, 33 bp, unidentified; identical to SEQ ID NO: 1
  source 1..33: mol_type = other DNA
  misc_feature 1..33: note = Synthetic

SEQ ID NO: 9893 - DNA, 24 bp, unidentified
  source 1..24: mol_type = other DNA
  misc_feature 1..24: note = Synthetic
gtgctcaaaatgctctttaaataa

SEQ ID NO: 9894 - DNA, 1560 bp, unidentified
  misc_feature 1..1560: note = Synthetic
  source 1..1560: mol_type = other DNA
attacttatagtacttcaagaatggaaagcgtgatattttctatcaatggggaaattatacaagtgaataaggaaattattacggcatctccgtataatttttttaaacgaattcaggatcaccatctaaaggatgaagcgattatattgaatggtataaactatcacgcgtttgaatcgctattagactatatacgctggaagaagataaacatcaccataaacaatgtagaaatgatactagttgctgccataataattgatgttccgcctgtagtagatctatgtgtaaaaactatgattcataatattaattccacaaattgtataaggatgtttaacttttctaaaagatatggaattaaaaaactatataatgcgtcgatgtcagaaataatcaacaatattactgcggtgacatccgatccagaatttggaaaattatcaaaggatgaactgacaactatcttatcccacgaaaacgttaacgtaaatcatgaggatgttacagctatgatattattaaagtggatacataaaaatccaaacgatgtagatatcatcaacattttacatcccaagtttatgactaatactatgcgcaatgctatatcattgttgggattaactatatccaaatctacaaagccagtgacacgaaatggtataaaacataatatagtagtcattaaaaactctgattatatatccacaataacccattactctcctagaacagaatattggacgatagtcggtaatacagatagacaattctataatgcaaatgttttacataattgtctatacattattggcggcatgattaacaatagacatgtttattccgtatcgcgggtagatcttgaaacgaaaaaatggaaaacggttactaatatgtcgtcgttaaaatcagaagttagtacttgtgttaacgatggaaagttatatgtaataggaggattagaattttctatttcaacgggtgtggcagaatatttgaaacacggcacttcgaaatggataagacttccaaacttaattactcctagatattcaggcgcgtcggtattcgtaaacgatgatatatatgtaatgggtggagtttataccacgtatgaaaaatatgtagtattaaacgatgtggaatgtttcactaaaaatcgttggataaaaaagtctcccatgcctagacatcatagtatagtttatgctgtagagtacgacggcgacatctatgtaattactggaattactcacgagactcgtaattatctatacaaatatatagttaaggaagacaaatggatagaattatacatgtactttaaccatgtaggaaagatgttcgtgtgttcttgcggtgattatatcttaattatagcagatgcaaaatacgaatattatccaaaatcaaatacttggaatttgttcgatatgtcaactcgtaatatcgaatattatgatatgtttactaaagatgagactccaaagtgtaacgtaactcataagtcactgccatcgtttttgagcaactgtgaaaaacaatttctacaatag

SEQ ID NO: 9895 - DNA, 741 bp, unidentified
  source 1..741: mol_type = other DNA
  misc_feature 1..741: note = Synthetic
atggaagacatcaatttttcatccttggctccgcgacacggcacgaagccgtacatgggcacctggagcgacatcggcacgagccaactgaacgggggcgccttcaattggagcagtatctggagcgggcttaaaaattttggctcaaccataaaaacatacgggaacaaagcttggaacagcagtacaggacaggcgcttagaaataaacttaaagaccagaacttccaacaaaaagtagtcgatgggatagcttccggcatcaatggagtggtagatttggctaaccaggctgtgcagaaaaagataaacagtcgtttggacccgccgccagcaaccccaggtgaaatgcaagtggaggaagaaattcctccgccagaaaaacgaggcgacaagcgtccgcgtcccgatttggaagagacgctggtgacgcgcgtagatgaaccgccttcttatgaggaagcaacgaagcttggaatgcccaccactagaccgatagccccaatggccaccggggtgatgaaaccttctcagttgcatcgacccgtcaccttggatttgccccctccccctgctgctactgctgtacccgcttctaagcctgtcgctgccccgaaaccagtcgccgtagccaggtcacgtcccgggggcgctcctcgtccaaatgcgcactggcaaaatactctgaacagcatcgtgggtctaggcgtgcaaagtgtaaaacgccgtcgctgcttttaa

SEQ ID NO: 9896 - DNA, 6438 bp, unidentified
  source 1..6438: mol_type = other DNA
  misc_feature 1..6438: note = Synthetic
atgccccttggtcaaagtcaacgcctcaacactcctcctacttcagttgcaaccatgatggacgttacggaggtgtatgacgacccgatagaccctgttgagccagaaggagaatggaatagcagtcccgtagttccaaatattttgcggaactctgactacaacctgaactctcctttgctagaagaccccgcaaatctaatgattcagtggctaacatccgggaatagaccctcgagaatgaatgtcacagagaacacaaccaggtcttacaaagtcttgagagcacttttcaagggagtggatatagcaacaataaaaatagggggtgtgggagctcaggcaatgatggggctgtgggtcttggggtctcactcagaatcgtctcgaagcagaaagtgtctagctgacttgtctgcattttatcagaggaccctacctatagagtccatcttgaaccacaccttaatgaacagaggactacagacccctagagaaggagttttatccggattgaatagagttagctatgatcagtcctttggccggtatttaggcaatttgtactcctcttatctcctctttcacgtcatcatattgtacatgaatgcgttggattgggaagaggagaagaccattctggccctgtggagagacataacatctatagatatcaaaaatgaccgagtctactttaaggaccctttgtgggggaaactcttagtaacaaaagattttgtatatgcacacaatagcaactgtttatttgacaaaaattacacactgatgctaaaagacttgttcctgtcaagattcaactcattgctcatacttgtgtccccgccggactcccgttactcagatgatctggctgccaacctgtgtcgactttacatctcaggggataggcttctctccagttgtgggaatgcaggatatgatgtcatcaaaatgttagagccttgtgtggtggatctactggttcaaagagctgagacgttccgtcctttaattcactcactgggggagttccctgctttcataaaagacaaaacaactcaactgataggcacttttggaccatgcgcatcacaattcttctcgatgctccagcaattcgacaatattcatgatttggtatttatttacggatgttaccggcactgggggcatccctacatagactatagaaaagggctttccaagctctttgatcaagtccatatgaagaagactatagatcagcaatatcaagagcgtctggctagcgatctagccaggaagattctgcgttgggggttcgaaaagtactccaaatggtatctagatacaggtgtcattcccaaagaccatcccctggctccttatattgcaacacagacatggcccccgaaacatgtggtggatctcctgggagattcttggcacactctcccgatgactcaaatttttgaggttcctgaatctatggacccttctgagattctagatgacaaatctcactcatttacccggacaaagctgtcaagttggtcatctgaacacagagggggaccggtaccaagtgaaaaagtgattataacagctctgtccaggcccccagtaaatcccagagactttctcaagtcgatagatcaaggagggttgccagatgatgaccttattataggactcaaaccaaaagaaagagagttaaagatagatgggcgattctttgcactgatgtcttggaacctgagactgtactttgtgattaccgagaagttactggccaatcacatcatccctcttttcgatgcactaacaatgacagataatcttaacaaagttttcaagaaactgatagacagagtgactggtcaagggctcaaagactactctcgcgtcacctatgcgttccatctagactatgaaaaatggaacaaccaccagagactcgagtcgacaaaggatgtgttttctgttcttgacagagcgttcggaatgaagaaggtattctctaggacacatgagttttttcaaaaatcctggatatattactcagatagatcagatctcatcgggatttggaaggaccagatctattgtcttgacatgactgaaggccctacttgctggaatggtcaggatggaggattagaaggtctaaggcaaaaaggatggagtttagtgagcctcctgatgattgagagggaatcaaaaaccaggaacacccgaactaagattttagctcagggggacaaccaagtgttgtgtcccacttatatgctgtcttctggcctcaataacgaaggactcaggtatgagctagaaaacatctctaagaatgcaatgtccatatatcgagctattgaagacggagcctctaagctcgggctaatcataaagaaggaggaaacaatgtgtagctttgactttctgatatatggaaagacacctctctttagaggtaacatattggttcctgaatccaagcggtgggctagagtttcttgtatctccaatgaccagattgtgaatttggccaatatcatgtcaacagtgtcaactaatgccctgactgtagctcaacactctcaatcccttgtgaagcccatgcgagacttccttctaatgtcagtccaagcaatttatcattatctgctgttcagccctatcatcaaggatcgagtttacaaggtgctgaactctaaggatgatgactttcttctagccatgtcacgaatcatatatttggatccttctcttggtggtgtttctggaatgtccttaggaaggtttccaataagacagttctctgacccggtgtctgagggactaaccttttggaaagagatctggctgagttcatctgagacttggatccatcatctttgtcaagaagcaggaaaccccgacttgggggatagaagtctggagagttttactcgtctcttagaagaccccactacattgaatatcagggggggggctagtcccactatcttactgaaagaagccatcaggaaggccttgtatgatgaggtagacagggtggagaattctgaatttagagaggccatcatcttgtccaagactcaccgggacaacttcatactgtttttaaagtctatagagcccctattccctcgtttcttgagtgagctcttcagctcttctttcctgggtattcctgaatctataattgggcttatccagaactcaagaactgtcaggagacagtttagaaagagcctctcaaaaacattagaggagtctttccttaattccgagatccatgggataaacagggtgacacaaacccctcaacgactcgggagagtatggacatgctctgctgagagggcagatcagttgagagagatatcatggggaaggaaggttgtcggcacaacagttcctaatccctctgagatgttgaccttggtccccaagtcctcagtggcttgtgggtgttataccagggaggttggaaacccccggatctctgtctcagtgttgccttcctttgacccttctttcctctcaaggggccctcttaaggggtacttaggatcttccacatctatgtccactcagttgttccactcatgggagaaagtcacaaatgttcatgtggtcaagagggctctatcactcaaagagtccatcaactggtttgtgtctcgggagtctaacttggcaaagactctgataggaaacatactgtccctaacaggaccatcttttcccatagaggaggctccggttttcaagaggaccggctcagctttacatcgattcaaatctgctaggtatagtgagggcggttactcagccgtgtgtcccaacctactgtcccacatatcagtcagcactgataccatgtctgatttgacacaggacggaaccaatttcgacttcatgttccagcccttgatgttatatgctcagacctggacgtcagagctggtccaaaaggactttagattggcagattcgacttttcattggcatctaaggtgtcaaaaatgtatcaggcccatagaagaagtcactctggatgcccctcaactttttgacttcccagacatatcttctagaatctcaagaatggtctcgggggcagttccccaatttagaaagttgccagaagttgggctcaaggccggagacctgacggcattaagtagcagcgagaggtcctatcatatagggacagctcaaggattgctatactccatactagttgcagttcatgaccccgggtataacgacaactccctattccctgtgaacatctatggcaaagtgtctgccagaggttatttaagagggcttgcaagaggaattctaatagggtcttctatatgttttctaacgagaatgaccaatatcaacattaatcgcccccttgagctgatttctggggtaatttcttacatactgctaaagctagacaaccatccgtctctttacattatgctgaaagaacccgagttgagggcagagatcttctccatccctcagaaagtgcctgcggcttacccgacgacaatggaagaagggaatagatctgtcttatgttatcttcaacaagtcctcaggtatgagagagacagtatgtcttttcctccagggaatgacatcttgtggatattttctgattttaggagtataaagatgacgtacttgacgctgataacctttcaggcatacctatggctgcagagagtagagagaaacttgtctaaacaggtaagagtcagattgagacagctgaactctctcatgagacaggtcctgggtggccacggagaagatactattgactctgatgatgagatattatcccttcttaaagaatccctgagaaggacaagatgggtagatcaagaggtccgccatgcagctaagtcaatgacaccagatctcaatcctgtccctaagatctcacgtagaatggggtcttcagagtggatttgctctgcacagcagatagctatctccacctctctaaatccagcatctgcttctgacattgacctcagatctttatcacgtcagtatcagaatcctctcatctctggcttgagagtggtacagtgggccactggggcccattacaagatcaagccaattctgaacgacttggatgtttgcccttgcctatcattggtcattggagatggatctggaggtatttcgagagtcgttttgagcatgttcccagattctaaacttgtgtttaacagcctattagaagtgaacgacttgatggcatcaggcactcaccctttaccgccgtctgcccttatgagaggaggtgacgacataacctctcgagtgatagacttcgagtctatttgggaaaaaccttctgatttgagaaatcccctcacttggaagtatttccattctatacaatccaagttgagatcacagtttgacttaatagtttgtgatgccgaagtgacagatatagagtcagtcaacaagattaccttgttactatctgatttctcaatgtcgattaagggtcccttatatctaatctttaagacctacgggactatgctcgtgaatccagattataaggcaatccaccatctatcccgagcattcccaaatgtgacagggtttgttactcaaatgacatcatctttctcgtccgagatctaccttagattctccaaaacaggttatttcttcagagaccatgagctgctgacggcatctacagtcagagaaatgagtctagtattattcaattgcagtaatcctaagagtgagatgctgagagccagaaccctgaattaccaagacttgataagaggctttcctccggagattatctccaatccttacaatgagatgataattaccctgatagacagtgaggtagagtccttcttagttcacaaggtggttgatgatttggagcttaagagaggagccccgtccaagatggccattataatcgccgttgccattttgttctctaacagtgtcctcaatgtgtctaagtcattgaatgagccaaagttcttccccccatctgatccaaagctgttgaggcacttcaacatatgctctagtacacttctattcctgtctacggcacttggagatttgtctaacttcacaagactccacgagctctacaactctcctgtgacttattactttggaaagcagactatcaaagggaggaggtatctatcgtggagttgggccaactcaagtccaatcttcaaaaaggtggcatgcaactcctctatcagtctatcctctcactggataaggttgatatacaagatagtcaaaaccactcgcctgaattgctctcctagggacatgttaagagagacagaagcttgccttagaacctataacaagtggatcaacataagagacacaagatctagaacttcgatattggactactgctgtctttag

SEQ ID NO: 9897 - DNA, 222 bp, unidentified
  misc_feature 1..222: note = Synthetic
  source 1..222: mol_type = other DNA
atggattcagacgatggtttttatgaatggttgaatggcgacggttcagtatttgctgcctcaaaacagcaaatgttgatgaatcacgttgctaactttgacgacgatcttctaactatggaagaagccatgtcgatgatttcgagacattgttgtatcttaatttatgcacaggattatgatcaatatattagcgctagacatattacagaactattttag

SEQ ID NO: 9898 - DNA, 222 bp, unidentified
  misc_feature 1..222: note = Synthetic
  source 1..222: mol_type = other DNA
atggattcagacgatggtttttatgaatggttgaatggtgatggttcagtatttgctgcctcaaaacagcaaatgttgatgaatcacgttgctaactttgacgatgatcttctaactatggaagaagccatgtcgatgatttcaagacattgttgtatcttaatttatgcacaggattatgatcaatatattagcgctagacatattacagaactattttag

SEQ ID NO: 9899 - DNA, 33 bp, unidentified; identical to SEQ ID NO: 10
  source 1..33: mol_type = other DNA
  misc_feature 1..33: note = Synthetic

SEQ ID NO: 9900 - DNA, 33 bp, unidentified; identical to SEQ ID NO: 10
  misc_feature 1..33: note = Synthetic
  source 1..33: mol_type = other DNA

SEQ ID NO: 9901 - DNA, 2088 bp, unidentified
  source 1..2088: mol_type = other DNA
  misc_feature 1..2088: note = Synthetic
atggcaaaggaactggcggcggtctatgccgatgtgtcagccctagccatggacctctgtcttcttagttacgcagacccggcaacactggacactaaaagtctggccctcactacagggaagtttcagagccttcacggcacactactccccctcctcagacgacaaaacgcacacgaatgctcaggtctgtcactagaattggagcaccttttggaaaacgtggctgatgctctgaccacgttgggagtgtgcactagcagaaaactgtctccagaagagcatttttccctcctgcatttggacataacatgcaacaagcaccggagcgttaggtttaatttttacggaaattgggccttggagttaaagctgtcactaataaacgacgttgaaattttctttaaacgtcttagtagcgttttttattgtataggatcgggcagtgctctggagggtttgggggaggtattgcgtttcgttgggaagctgaggggtatctcacccgtacctgggccggacctatatgtctcaaatctgccctgcctagaatgccttcaggaagtgtgtctgactcccaaccagggcaccagtctgcaggccatgctcccagacacggcctgcagtcacatatgtacccccgcatgcggtgagcctgtccggggcctctttgagaacgagctaaaacagctcgggcttcaaacccctgagtccatacctactaccccctgtcagtcccgggtaaggcaagatgatgaaatcagacagagctctctaatggcggtaggagatcaccacattttcggagaggtgaccagatctgtcctggaaatctcaaacctgatctattggagctctggccactcggatgccacctgcgacggagacagagactgctctcacctggcctcgctgtttactcacgaggctgacatgcataaaaggcgcgtcgacctggccggatgcttgggcgaacgcggcacgcccaaacacttttttgactgctttcgcccagactccctagaaacccttttctgtggtggtctttttagctccgtggaggacaccatagaaagtctccaaaaggactgctcttctgccttctaccaacaggtaaactacactactgcactgcaaaaacagaacgagttttacgtccgactcagcaaactgctggcagctggtcagctaaatttgggcaaatgttccactgaaagttgcccatccgaggcccgtaggcagctggtaggtggggacaaaccagaggaagtgctgagggatgcaaaacaccggcaagaactataccttcagaaagtggcacgcgacggttttaaaaaactctctgattgtataagacaccagggccacatcctgtctcagaccctgggtctaagactgtgggggtctgtcatctacaacgaggcatctgccctacaaaaccactttttacacagagcacagttcatatccctcccctggcaggacctgacggtcgactgtccaacgcggtttgaaaattctaaatatatcaaaaattctctgtactgccagcgtctggggcgggaacacgtagagatcctgacactggagttctacaaacttatcacgggcccgctgtcaaagcgacatactttatttcccagtcctccaaatgtgacgctggctcagtgcttcgaggctgcgggcatgcttccccatcaaaagatgatggtatcagagatgatctggcccagcatagagccgaaggactggatagagcccaacttcaaccagttctatagctttgagaatcaagacataaaccatctgcaaaagagagcttgggaatatatcagagagctggtattatcggtttctctgtacaacagaacttgggagagggagctaaaaatacttctcacgcctcagggctcaccggggtttaaggaaccgaaacccgcaggactcacaacggggctgtacctaacatttgagacatctgcgcccttggtgttggtggataaaaaatatggctggatatttaaagacctgtacgcccttctgtaccaccacctgcaattgagcaaccacaatgactcccaggtctag

SEQ ID NO: 9902 - DNA, 2088 bp, unidentified
  misc_feature 1..2088: note = Synthetic
  source 1..2088: mol_type = other DNA
atggcaaaggaactggcggcggtctatgccgatgtgtcagccctagccatggacctctgtcttcttagttacgcagacccggcaacactggacactaaaagtctggccctcactacagggaagtttcagagccttcacggcacactactccccctcctcagacgacaaaacgcacacgaatgctcaggtctgtcactagaattggagcaccttttggaaaacgtggctgatgctctggccacgttgggagtgtgcactagcagaaaactgtctccagaagagcatttttccctcctgcatttggacacaacatgcaacaagcaccggagcgttaggtttaatttttacggaaattgggccttggagttaaagctgtcactaataaacgacgttgaaattttctttaaacgtcttagtagcgttttttattgtataggatcgggcagtgctctggagggtttaggggaggtattgcgtttcgttgggaagctgaggggtatctcacccgtacctgggccggacctatatgtctcaaatctgccctgcctagaatgccttcaggaagtgtgtctgactcccaaccagggcaccagtctgcaggccatgctcccagacacggcctgcagtcacatatgtacccccgcatgcggtgagcctgtccggggcctctttgagaacgagctaaaacagctcgggcttcaaacccctgagtccatacctactaccccctgtcagtcccgggtaaggcaagatgatgaaatcagacagagctctctaatggcggtaggagatcaccacattttcggagaggtgaccagatctgtcctggaaatctcaaacctgatctattggagctctggccactcggatgccacctgcgacggagacagagactgctctcacctggcctcgctgtttactcacgaggctgacatgcataaaaggcgcgtcgacctggccggatgcttgggcgaacgcggcacgcccaaacacttttttgactgctttcgcccagactccctagaaacccttttctgtggtggtctttttagctccgtggaggacaccatagaaagtctccaaaaggactgctcttctgccttctaccaacaggtaaactacactactgcactgcaaaaacagaacgagttttacgtccgactcagcaaactgctggcagctggtcagctaaatttgggcaaatgttccactgaaagttgcccatccgaggcccgtaggcagctggtaggtgggggcaaaccagaggaagtgctgagggatgcaaaacaccggcaagaactataccttcagaaagtggcacgcgacggttttaaaaaactctctgattgtataagacaccagggccacatcctgtctcagaccctgggtctaagactgtgggggtctgtcatctacaacgaggcatctgccctacaaaaccactttttacacagagcacagttcatatccctcccctggcaggacctgacggtcgactgtccaacgcggtttgaaaattctaaatatatcaaaaattctctgtactgccagcgtctggggcgggaacacgtagagatcctgacactggagttctacaaacttatcacgggcccgctgtcaaagcgacatactttatttcccagtcctccaaatgtgacgctggctcagtgcttcgaggctgcgggcatgcttccccatcaaaagatgatggtatcagagatgatctggcccagcatagagccgaaggactggatagagcccaacttcaaccagttctatagctttgagaatcaagacataaaccatctgcaaaagagagcttgggaatatatcagagagctggtattatcggtttctctgtacaacagaacttgggagagggagctaaaaatacttctcacgcctcagggctcaccggggtttgaggaaccgaaacccgcaggactcacaacggggctgtacctaacatttgagacatctgcgcccttggtgttggtggataaaaaatatggctggatatttaaagacctgtacgcccttctgtaccaccacctgcaattgagcaaccacaatgactcccaggtctag

SEQ ID NO: 9903 - DNA, 21 bp, unidentified
  misc_feature 1..21: note = Synthetic
  source 1..21: mol_type = other DNA
ataaacaggatccactactaa

SEQ ID NO: 9904 - DNA, 18 bp, unidentified
  source 1..18: mol_type = other DNA
  misc_feature 1..18: note = Synthetic
atggccgttcacacctaa

SEQ ID NO: 9905 - DNA, 54 bp, unidentified; identical to SEQ ID NO: 15
  misc_feature 1..54: note = Synthetic
  source 1..54: mol_type = other DNA

SEQ ID NO: 9906 - DNA, 15 bp, unidentified
  source 1..15: mol_type = other DNA
  misc_feature 1..15: note = Synthetic
atgtaccaggtgtga

SEQ ID NO: 9907 - DNA, 36 bp, unidentified; identical to SEQ ID NO: 19
  source 1..36: mol_type = other DNA
  misc_feature 1..36: note = Synthetic

SEQ ID NO: 9908 - DNA, 102 bp, unidentified; identical to SEQ ID NO: 20
  source 1..102: mol_type = other DNA
  misc_feature 1..102: note = Synthetic

SEQ ID NO: 9909 - DNA, 27 bp, unidentified
  source 1..27: mol_type = other DNA
  misc_feature 1..27: note = Synthetic
atgcgggcttgctgttctcatttctag

SEQ ID NO: 9910 - DNA, 99 bp, unidentified; identical to SEQ ID NO: 22
  misc_feature 1..99: note = Synthetic
  source 1..99: mol_type = other DNA

SEQ ID NO: 9911 - DNA, 45 bp, unidentified; identical to SEQ ID NO: 23
  misc_feature 1..45: note = Synthetic
  source 1..45: mol_type = other DNA

SEQ ID NO: 9912 - DNA, 459 bp, unidentified
  source 1..459: mol_type = other DNA
  misc_feature 1..459: note = Synthetic
atgtgcagtaccagtgacgacacggtatccgctactcagcttgttaaacagctacagcacaccccctcaccgtattccagcaccgtgtccgtgggcaccgcaaagacctacggccagacgtcggctgctacacgacctggacactgtggactcgcggagaagcagcattgtggacctgtcaacccacttctcggtgcagctacacctacaggcaacaacaaaagacggaaactctgtagtggtaacactacgcctataatacatttaaaaggtgacagaaacagtttaaaatgtttacggtacagattgcgaaaacatagcgaccactatagagatatatcatccacctggcattggacaggtgcaggcaatgaaaaaacaggaatactgactgtaacataccatagtgaaacacaaagaacaaaatttttaaatactgttgcaattccagatagtgta

SEQ ID NO: 9913 - DNA, 1494 bp, unidentified
  misc_feature 1..1494: note = Synthetic
  source 1..1494: mol_type = other DNA
aagccctgtggatacctagtcaaaatgaagacactcatattcttctggaatttatggctttgggccctactggtatgtttttggtgtatcactcttgtctgtgtaactaccaactcaattgatacaatggcttctttgcttgttatgtgcattttgtttgtcagtgctattaataagtatacacaggcaatctctagcaacaatcctaaatggccttcatcctggcacctaggaattattgcttgcattgtccttaaactttggaacttgtcaactaccaactctgtaacctatgcttgcttaatcaccacggccattttatcactggtaacagcttttttgacgttaataaaacactgcaccgcctgtaaattacaacttgaacatggaatattattcacatcaacgtttgctgtgttgatgacaaacatgctggtccacatgtcaaacacctggcaatcgtcttggatattttttccaattagcttcactctcagcttgccattcttgtatgcatttgccaccgtgaaaacaggcaatattaaattagtgtcatctgtctctttcatttgtgcaggcttggtcatgggttaccctgtatcctgctgtaaaacgcatacatgtactgccaccgctgcaggattaagtctttccagcatttatttgggattcactggcataatcagcactcttcataagtcatgggctccaccaaaacgtggaatattaacgttcctgcttcttcaggggggagtgctaaccacacaaactttaacaaccgaactacttgcaattactagcaccactggcaatatcaaaggccacgaaatattgcttcttgtatgcctcatttttctatggtgcctttatgtgtggcaaagttttaacaaggcgtctcttgttactggaatgctgcatttaattgcagcgtggtcccacactggaggttgtgtacaattagtaatgcttctccctagtggtttaacaagaggcatcctaacaatgatcatctgcatcagtacactattcagtacgttacaaggactgctggtattttatttatataaggaaaaaaaagtggtggctgtaaatagttaccgacagagaaggcggcgcatatacacgcgggaccagaacttacaccacaatgacaaccaccttggcaataatgtaattagccctccaccattaccacctttttttagacagcctgttaggttacctagccatgtcaccgataggggccgcgggagccaactactgaacgaggtggagttacaggaagtgaatagggacccacccaatgtattcgggtatgccagtattttagtgtccggtgcggaagaatcacgtgaaccatcaccacagccagaccaatcaggaatgtcaattttaagggttgatggtgggagtgccttccgtatagacaccgcccaagccgccacccaaccgacagacgacctgtatgaggaggttttatttcccaggaactag

SEQ ID NO: 9914 - DNA, 1494 bp, unidentified
  source 1..1494: mol_type = other DNA
  misc_feature 1..1494: note = Synthetic
aagccctgtggatacctagtcaaaatgaagacactcatattcttctggaatttatggctttgggccctactggtatgtttttggtgtatcactcttgtctgtgtaactaccaactcaattgatacaatggcttctttgcttgttatgtgcattttgtttgtcagtgctattaataagtatacacaggcaatctctagcaacaatcctaaatggccttcatcctggcacctaggaattattgcttgcattgtccttaaactttggaacttgtcaactaccaactctgtaacctatgcttgcttaatcaccacggccattttatcactggtaacagcttttttgacgttaataaaacactgcaccgcctgtaaattacaacttgaacatggaatattattcacatcaacgtttgctgtgttgatgacaaacatgctggtccacatgtcaaacacctggcaatcgtcttggatattttttccaattagcttcactctcagcttgccattcttgtatgcatttgccaccgtgaaaacaggcaatattaaattagtgtcatctgtctctttcatttgtgcaggcttggtcatgggttaccctgtatcctgctgtaaaacgcatacatgtactgccaccgctgcaggattaagtctttccagcatttatttgggattcactggcataatcagcactcttcataagtcatgggctccaccaaaacgtggaatattaacgttcctgcttcttcaggggggagtgctaaccacacaaactttaacaaccgaactacttgcaattactagcaccactggcaatatcaaaggccacgaaatattgcttcttgtatgcctcatttttctatggtgcctttatgtgtggcaaagttttaacaaggcgtctcttgttactggaatgctgcatttaattgcagcgtggtcccacactggaggttgtgtacaattagtaatgcttctccctagtggtttaacaagaggcatcctaacaatgatcatctgcatcagtacactattcagtacgttacaaggactgctggtattttatttatataaggaaaaaaaagtggtggctgtaaatagttaccgacagagaaggcggcgcatatacacgcgggaccagaacttacaccacaatgacaaccaccttggcaataatgtaattagccctccaccattaccacctttttttagacagcctgttaggttacctagccatgtcaccgataggggccgcgggagccaaccactgaacgaggtggagttacaggaagtgaatagggacccacccaatgtattcgggtatgccagtattttagtgtccggtgcggaagaatcacgtgaaccatcaccacagccagaccaatcaggaatgtcaattttaagggttgatggtgggagtgccttccgtatagacaccgcccaagccgccacccaaccgacagacgacctgtatgaggaggttttatttcccaggaactag

SEQ ID NO: 9915 - DNA, 1881 bp, unidentified
  misc_feature 1..1881: note = Synthetic
  source 1..1881: mol_type = other DNA
atggataacaatgttgaagacaataaaatcatggattcttgggaagaaagagcagagaatagatcagctgacatctcctcagcgctcgacattatcgaattcatactcaacaacgacacccaagaaaacgcaaatattgaaaacagaattgagaccggagaagtggacctcagtgcaacgataccctatacaaaatcccaaacaacagaaccctacaagaaagatagtagatcaactgacaaaaatagatggtctaggacatcacacaaatataccacaaaaacagaaagtggagatgttgatcaggaagttgtacagagaagagataggagaggaagcagcacagataatagaattgaaattatgggcattggaagactccccagaagcatcgcagatcctgaacatggatcccaaatccaggaaaatactgatcatgatgaagttagaaaggtggataaggaccctcttgagagggaaatacgacaacttgaagatgttccaattaagatatcaggaggtgataccattccttcggcagaacaaggtggagacagtaatgatggaggaagcctggaatttgtcagtgcaccttattcaagaggtgccgatgtgataaccattgcaacaccatcagatgaggaagaactacttgcaaagaatacaagacagcgtaaaaatccaccagaatatcaacaagataatcaagaaattaaaaaagggaagagagaagagaaaaaatggagcaaaggagagagaagagagggacaacagagaagagaggaaggggagaagagagagagagaagagaagatcgagactgggagaggaatcgatccagtgcccccacttgccatacaatcaccacaaattggagcatcgagagagaatcaaacagtctcagagtcccagacaaagagaacggatccaaccaaaacaacaggcgggaaccaaagagaaagaccaacacccctggacccatgcaccaagggacaacacactcaagcccaccgattcagccatggagcgcagagatccacaggagaccagagcgggacattcagaccaaaggtatcaacacaggggtcacaagtcgaatcgagaaagaaatcaggagaggaaaaagagaacacagaagagagcactcaatatacagaaaaggcgattacattattacagagtcttggtgtaatccaatctgcagcaaaattagacctataccaagacaagagaattgtatatgcggcgaatgtcctaaacaatgtagatattgcatcaaagattgatttccttgcagggttaatgattggtgtttcaatagataatgataataagcttaatcagattcaaaatgaaataatggatcttaaaaatgatcttaaaagagtagacgaatcacacagaagattaattgaaaatcagaaggaacagttatcattaatcatatcgttaatttccaatctcaagataataacagaaagaggagggagaaaagatcaaactgaactatctgatcgtatgcccatggtcagaacaaagacaaaagaagagaaagccaagaaagtcagatttgatcctttaatggaatcacaaggagatgatagaaacatcccagatctatacagaaacacagagaaagcaccagaaaatgaccaacaaatcagatctgatatacatctgtcaaacaatgattcaaatgcaactagactagtaccaaagcggaccaacaataccatgagatcactcgctataatcatcaacaacagcaatttgtcagcaacatccaagcagtcatatataaatgaactcaaactttgtaagagtgatgaggaagtctcagaattgatggagttgttcaatgaagacatcaactctcaatga

SEQ ID NO: 9916 - DNA, 603 bp, unidentified
  misc_feature 1..603: note = Synthetic
  source 1..603: mol_type = other DNA
ttgaagacaataaaatcatggattcttgggaagaaagagcagagaatagatcagctgacatctcctcagcgctcgacattatcgaattcatactcaacaacgacacccaagaaaacgcaaatattgaaaacagaattgagaccggagaagtggacctcagtgcaacgataccctatacaaaatcccaaacaacagaaccctacaagaaagatagtagatcaactgacaaaaatagatggtctaggacatcacacaaatataccacaaaaacagaaagtggagatgttgatcaggaagttgtacagagaagagataggagaggaagcagcacagataatagaattgaaattatgggcattggaagactccccagaagcatcgcagatcctgaacatggatcccaaatccaggaaaatactgatcatgatgaagttagaaaggtggataaggaccctcttgagagggaaatacgacaacttgaagatgttccaattaagatatcaggaggtgataccattccttcggcagaacaaggtggagacagtaatgatggaggaagcctggaatttgtcagtgcaccttattcaagaggtgccgatgtga

SEQ ID NO: 9917 - DNA, 219 bp, unidentified
  source 1..219: mol_type = other DNA
  misc_feature 1..219: note = Synthetic
aagccttttataacacaactatttgaaagcatgaaacccaccacgagtctatataagaaattgatggctacccaaaaactgaccaccgaccgcattccatttctcgatatcttcgacgataggtacaacctagtcagacacgtcgaacgacaattaaactggtacgccgcatatgccgaagcagcgcagcaagatcttattgctcctcttacgttttaa

SEQ ID NO: 9918 - DNA, 81 bp, unidentified; identical to SEQ ID NO: 33
  source 1..81: mol_type = other DNA
  misc_feature 1..81: note = Synthetic

SEQ ID NO: 9919 - DNA, 81 bp, unidentified; identical to SEQ ID NO: 33
  misc_feature 1..81: note = Synthetic
  source 1..81: mol_type = other DNA

SEQ ID NO: 9920 - DNA, 81 bp, unidentified; identical to SEQ ID NO: 33
  source 1..81: mol_type = other DNA
  misc_feature 1..81: note = Synthetic

SEQ ID NO: 9921 - DNA, 54 bp, unidentified; identical to SEQ ID NO: 34
  source 1..54: mol_type = other DNA
  misc_feature 1..54: note = Synthetic

SEQ ID NO: 9922 - DNA, 207 bp, unidentified
  misc_feature 1..207: note = Synthetic
  source 1..207: mol_type = other DNA
atgatgctaacggacgcggccatgctcctgatctgcgtggccatcgtcgcgttgctactctacgccgtgtaccgccgcggccgcgagacgcagacgacgcccaagcgcaccgttgacgagctggtagagaacgacgcgatcttccgcgacgagctcacgccggaccagatccgggcgctgcaccgcttctttacgggcgccagctaa

SEQ ID NO: 9923 - DNA, 1143 bp, unidentified
  source 1..1143: mol_type = other DNA
  misc_feature 1..1143: note = Synthetic
atgtatccagcggcggcggcgcgcaacgaagctatgtccaagcgcaaaatcaaagaagagatgctccaggtcatcgcgccggagatctatggccccccgaagaaggaagagcaggattacaagccccgaaagctaaagcgggtcaaaaagaaaaagaaagatgatgatgatgatgaacttgacgacgaggtggaactgctgcacgcaaccgcgcccaggcggcgggtacagtggaaaggtcgacgcgtaagacgtgttttgcgacccggcaccaccgtagtttttacgcccggtgagcgctccacccgcacctacaagcgcgtgtatgatgaggtgtacggcgacgaggacctgcttgagcaggccaacgagcgcctcggggagtttgcctacggaaagcggcataaggacatgttggcgttgccgctggacgagggcaacccaacacctagcctaaagcccgtgacactgcagcaggtgctgcccacgcttgcaccgtccgaagaaaagcgcggcctaaagcgcgagtctggtgacttggcacccaccgtgcagctgatggtacccaagcgccagcgactggaagatgtcttggaaaaaatgaccgtggagcctgggctggagcccgaggtccgcgtgcggccaatcaagcaggtggcaccgggactgggcgtgcagaccgtggacgttcagatacccaccaccagtagcactagtattgccactgccacagagggcatggagacacaaacgtccccggttgcctcggcggtggcagatgccgcggtgcaggcggccgctgcggccgcgtccaaaacctctacggaggtgcaaacggacccgtggatgtttcgcgtttcagccccccggcgcccgcgccgttccaggaagtacggcaccgccagcgcactactgcccgaatatgccctacatccttccatcgcgcctacccccggctatcgtggctacacctaccgccccagaagacgagcgactacccgacgccgaaccaccactggaacccgccgccgccgtcgccgtcgccagcccgtgctggccccgatttccgtgcgcagggtggctcgcgaaggaggcaggaccctggtgctgccaacagcgcgctaccaccccagcatcgtttaa

SEQ ID NO: 9924 - DNA, 990 bp, unidentified
  source 1..990: mol_type = other DNA
  misc_feature 1..990: note = Synthetic
atgtgggactcgtcatacatgcaacaagtgagtgagggactgatgactggaaaagttccaatagatcaagtgttcggcactaatcccttagaaaagttatataagagaagaaagccgaaagggacagtgggattacaatgtagtccttgcttaatatcaaaatcaacaagtactgacgacattgtttgggatcagctaatcgtaaagaaaacattggctgacttgcttatacctataaataggcaaatgtcggacattcaaagcaccctaagcgaaatgacaacaaaagtccatgagatcgagcgtcaactacatgatatcaccccagttgtaaaaatgggaaaaacgctagaagcaatttccaaaggaatgtcagagatgctagctaagtacgatcatctcgtgatttcaactggaagaaccaccgcaccagctgctgcctttgatgcttacttaaacgagcatggagtccccccccctcagcctgcaatcttcaaagatcttggagttgcccaacaagcctacagtcaaaagactatggtcaaaaaccaaacaacagatgcagctgacaaaatgtcaaaggttctggaactcagtgaagaaacattttccaagccaaacctttcagctaaggatttagctctattattatttactcatctccctggcaacaacactccattccacatactcgcccaagtcctttcaaaaattgcttacaaatcaggaaagtctggagcattcttggatgcattccatcagattttaagcgaaggggagaatgctcaggctgcattaacccgattaagcagaacattcgatgctttccttggagcagttcctccagtaataaaagttaaaaactttcaaacggtcccccgcccttgtcaaaaaagcctccgagctgttcccccaaatccaacaattgacaagggatgggtctgtgtctattcatctgaacagggtgaaacccgggctcttaaaatctaa

SEQ ID NO: 9925 - DNA, 27 bp, unidentified
  source 1..27: mol_type = other DNA
  misc_feature 1..27: note = Synthetic
atgaacaaaaaggtgatgcattactaa

SEQ ID NO: 9926 - DNA, 33 bp, unidentified; identical to SEQ ID NO: 42
  source 1..33: mol_type = other DNA
  misc_feature 1..33: note = Synthetic

SEQ ID NO: 9927 - DNA, 1182 bp, unidentified
  misc_feature 1..1182: note = Synthetic
  source 1..1182: mol_type = other DNA
atggattttacagacattgacgctgtcaactcactgattgagtcatcatcggcaattatagactccatacagcatggagggctgcaaccagcaggcactgttggcttatctcaaattccaaaagggataaccagtgcactgaataaagcctgggaagctgaggcggcaactgccggcagtggagacacccaacacaaacccgatgacccagaggaccaccaggctagggacacggagtccctggaagacacaggcaacgacccggccacacaggggactaacattgttgagacaccccacccagaagtactgtcagcagccaaagctagactcaagagacccaaagcagggaaagacacccatggcaatccccccactcaacccgatcactttttaaaggggggcctcccgagtccacaaccgacagcaccgcggatgcaaagtccacccaaccatggaagctccagcaccgccgatccccgccaatcacaaactcaggatcattcccccaccggagagaaatggcaattgtcaccgacaaagcaaccggagacatcgaactggtggagtggtgcaacccagggtgtacagcagtccgaattgaaccagccagacttgactgtgtatgcggacactgccccaccatctgcagtctctgcatgtatgacgactgatcaggtacagttgttgatgaaggaggttgctgacataaaatcactcctccaggcactagtaaggaatctagctgtcttgccccaactaaggaatgaggttgcagcaatcagaacatcacaggccatgatagaggggacactcaattcaattaagattcttgatcctggaaattatcaggaatcatcactaaacagttggttcaaacctcgccaggaacacactgttattgtgtcaggaccagggaatccactggccatgccgactccagttcaggacagtaccatattcttagatgagctagcaagacctcatcctaatttggtcaatccgtctccgcccgtcaccagcaccaatgttgaccttggcccacagaagcaggctgcaatagcctacgtttccgccaagtgcaaggacccagggaaacgggaccagctttcaaggcttattgaacgggcggctaccttgagtgagatcaacaaggttaaaagacaggctctcgggctctaa

SEQ ID NO: 9928 - DNA, 1572 bp, unidentified
  misc_feature 1..1572: note = Synthetic
  source 1..1572: mol_type = other DNA
atggctagccttcttaaaagcctcacactgttcaagaggactcgggaccaaccccctcttgcctctggctccgggggagcaataagaggaataaagcatgtcattatagtcctaatcccgggtgattcaagcattgttacaagatctcgactattggatagacttgttaggttggttggtgatccaaaaatcaacggccctaaattaactgggatcttaatcagtatcctctccttgtttgtggaatcccctggacagttgatccagaggatcatagacgaccctgatgtaagcatcaagttagtagaggtaataccaagcatcaactctgcttgcggtcttacatttgcatccagaggagcaagtctggattctgaggcagatgagttcttcaaaattgtagacgaagggtcgaaagctcaagggcaattaggctggttagagaataaggatatagtagacatagaagttgataatgctgagcaattcaatatattgctagcttccatcttggctcaaatttggatcctgctagctaaagcggtgactgctcctgatactgcagccgactcggagatgagaaggtggattaagtatacccagcaaagacgtgtggtcggagaatttagaatgaacaaaatctggcttgatattgttagaaacaggattgctgaggacctatctttgaggcgattcatggtggcgctcatcttggacatcaaacgatccccagggaacaagcctagaattgctgaaatgatttgtgatatagataactacattgtggaagctgggttagctagtttcatcctaactatcaagtttggcattgaaactatgtatccggctcttgggttgcatgagttttccggagaattaacaactattgaatccctcatgatgctatatcaacagatgggtgaaacagcaccgtacatggttatcttggaaaactctgttcaaaacaaatttagtgcagggtcctacccattgctctggagttatgctatgggggttggtgttgaacttgaaaactccatgggagggttaaatttcggtcgatcttactttgacccagcttacttcagactcgggcaagaaatggttaggagatctgccggcaaagtaagctctgcacttgccgccgagcttggcatcaccaaggaggaagctcagctagtgtcagaaatagcatccaagacaacagaggaccggacaattcgagctactggtcctaagcaatcccaaatcacttttctgcactcggaaagatccgaagtcgccaatcaacaacccccaaccatcaacaagaggtccgaaaaccagggaggagacaaataccccattcacttcagtgacgaaaggcttccagggtataccccagatgtcaacagttctgaatggagtgagtcacgctatgacacccaaattatccaagatgatggaaatgacgatgatcggaaatcgatggaagcaatcgccaagatgaggatgcttactaagatgctcagtcaacctgggaccagtgaagataattctcctgtttatagtgataaagagctactcaattaa

SEQ ID NO: 9929 - DNA, 33 bp, unidentified; identical to SEQ ID NO: 46
  misc_feature 1..33: note = Synthetic
  source 1..33: mol_type = other DNA

SEQ ID NO: 9930 - DNA, 996 bp, unidentified
  misc_feature 1..996: note = Synthetic
  source 1..996: mol_type = other DNA
atgcagcggattcgaccttactggataaaattcgagcaaaccggaggcgcggggatggccgatgggatgtccggaataaatatacccagcattttaggttgcagcgtaacgatcgacaacttactaacacgagccgaagaggggttggatgtgagcgacgtgatcgaagatcttagaatacaagcaataccaagattcgtatgcgaggcgcgggaggtaaccggtttgaagccacgctttttggcaaactctgttgtatcactgcgcgtaaaaccggaacaccaagagaccgttttagtagtgttgaatggtgattcaagtgaggtgtcctgtgatcgttactacatggagtgtgttactcaaccagcgttccgcggatttattttttccgtattaactgcggttgaagatagggtgtatacggtgggggtgcctccgcgcctgttaatctatcggatgactctattccgcccggataatgtcctagattttaccttatgtgttattttaatgtatctggaaggcattgggccctccggggcatctccatcgctgtttgtacaattgtctgtatatcttagacgcgttgagtgtcaaataggacctttggaaaaaatgcgtcggtttttatatgagggagttttatggttgttaaacactctaatgtatgtcgttgataacaacccctttacaaaaacccgcgtattgccgcattatatgtttgttaagttactgaaccctcagcctggaacggcccccaatattataaaggctatatattcatgtggggtgggtcagcgttttgacctgccccacggaacccccccctgtccagatggtgtggtgcaagtacccccgggattgttaaatggacctttacgagattcggaatatcagaagagcgtatatttttggtggttaaatcgcaccatggtaacaccgaaaaatgttcagttatttgaaacgtataaaaattcaccacgggttgtaaagtaa

SEQ ID NO: 9931 - DNA, 735 bp, unidentified
  source 1..735: mol_type = other DNA
  misc_feature 1..735: note = Synthetic
atgggtaataaaaatatcaaaccatctaaggaaaatagactgtccatcttgtccaaggataagatggattcatttaagagaggatcttgggcaacatcatcctttagagaaaagtcacgtgcaaccatccaaagattttcatctcttagacgagaacatgttaaagtagatcatcctgacaagttcctggagttaaagagagagatatatgcaataattcagaaatcatcgtctatagatgtggacaaacggactaagctcatatccaacataaaaacgatgatgataaatccattcatgatcgagggtttaatgacatctttagaaagcttggatcccaataacaagatgagctactcatcagtgatgatattaggagaattcgacatcatcaatataagcgacaatgaggcggcattcgagttcataaacagtctgttgaaatctcttctcttgctaaatactagccaattaaaactcttggaatactccattagtaatgacttgttgtatgccaacataaatgcgttggagtatatcataaaaaatacatttaatgttccagaacggcaactgattctgagaggtcaatatctaactccaattttcagtgatttgttaaagtatgcgggtctaaccataaagtcaaacatactcatgtggaataaaaagtttatcaaaccagtatctgacctctatacatctatgagactccttcactgtgttacagtataa

SEQ ID NO: 9932 - DNA, 4632 bp, unidentified
  source 1..4632: mol_type = other DNA
  misc_feature 1..4632: note = Synthetic
ttgagagggaaaaaagcagacgaattagaaaaagttaggttacggcccggcggaaagaaaaagtacaggttaaaacatattgtgtgggcagcgaatgaattggataaattcggattggcagagagcctgttggagtcaaaagaaggttgccaaaagattctcagagttttagatccattagtaccaacagggtcagaaaatttaaaaagcctttttaataccgtctgcgtcatttggtgcttgcacgcagaagagaaagtgaaagatactgaggaagcaaagaaactagcacagagacatctagtggcagaaactggaactgcagagaaaatgccaaatacaagtagaccaacagcaccacctagtgggaaaagaggaaactaccccgtgcaacaagcgggtggcaactatgtccatgtgccactgagcccccgaactctaaatgcatgggtaaaattagtggaggaaaagaagttcggggcagaagtagtgccaggatttcaggcactctcagaaggctgcacgccctatgatattaatcaaatgcttaattgtgtgggcgatcaccaagcagctatgcaaataatcagagagattattaatgaagaagcagcagactgggattcgcagcacccaataccaggccccttaccagcaggacagctcagagacccaagagggtctgacatagcaggaacaacaagcacagtagatgaacagatccagtggatgtataggccacaaaatcccgtaccggtagggaacatctacagaagatggatccaaatagggctgcaaaagtgtgtcagaaagtacaacccaactaacatcttagacataaaacagggaccaaaagaaccgttccaaagctatgtagacaggttctacaaaagcttgagggcagaacaaacagacccagcagtaaaaaattggatgacccaaacgctgctaatacagaatgccaacccagactgcaagttagtactaaaaggactggggatgaatcccaccctagaagagatgctaaccgcctgccagggggtaggcggaccaggccagaaagccaggctaatggctgaagccctaaaagaggctatgggaccaagccctatcccatttgcagcagcccaacaaagaaaggcaattaggtattggaactgtggaaaggagggacactcggcaagacagtgccgagcacctagaagacagggctgctggaagtgtggcaagccaggacacatcatggcaaactgcccggaaagacaggcaggtttttttagggttgggcccacggggaaagaagcctcgcaacttccccgtgacccaagcccctcaggggctgataccaacagcacctccggcagatccagcagcggaactgttggagagatatatgcagcaagggagaaagcagagggagcagagggagagaccatacaaagaggtgacggaggacttgctgcacctcgagcagagagagacacctcacagagaggagacagaggacttgctgcacctcaattctctctttggaaaagaccagtagtcacagcgtacatcgaggatcagccggtagaagtcttactagacacaggggctgatgactcaatagtagcaggaatagaattaggggacaattacactccaaaaatagtagggggaatagggggatttataaacaccaaagaatacaaaaatgtagaaataaaagtactaaataaaagagtaagagccaccataatgacaggagataccccaatcaacatctttggcagaaatattctgacagccttaggcatgtcattaaatttaccagttgccaagatagagccaataaaagtaacattgaagccagggaaagatggaccaaggctgaaacaatggcccctaacaaaagagaaaatagaagcactaaaagagatctgtgaaaaaatggaaaaagagggccagctagaagaggcacctccaactaatccttataatacccccacatttgcaattaagaaaaaggacaagaacaaatggaggatgctgatagattttagagaactaaataaggtgactcaagatttcacagaaattcagctaggaattccacacccggcaggactagccaaaaagaaaaggatctctatattagatgtaggggatgcctatttttccataccactacatgaagattttaggcagtatactgcatttaccctaccagcagtaaacaatatggaaccaggaaaaagatatatatataaagtcttgccacaaggatggaagggatcaccagcaatttttcaatacacaatgaggcaagtcttagaacctttcagaaaagcaaacccagatgtcattctcatccagtacatggatgatatcttaatagctagtgacaggacaggtttagagcatgacaaagtggtcctgcagctaaaagaacttctaaatggcctagggttttctactccagatgagaagttccaaaaagaccctccatttcaatggatgggctgtgaactatggccaactaaatggaagctgcagaaactacaactgccccagaaagacatatggacagtcaatgacatccaaaagctagtgggagtcttaaattgggcggcacaaatctattcaggaataaaaaccaaacacttatgtagactaattagaggaaaaatgacactcacagaagaagtgcagtggacagaactagcagaagcagagctagaagaaaacaaaattatcttgagccaggaacaagaaggatattattaccaagaagaaaaagaattagaggcaacaatccaaaaaagccaaggacatcaatggacatacaaaatacaccaggaagagaaaatcctaaaagtaggaaagtatgcaaagataaaaaatacccataccaatggggtcagattactagcacaggtagttcagaaaataggaaaagaggcactagtcatttggggacggataccaaaatttcacctgccagtggagagagagacctgggagcagtggtgggataactactggcaagtgacatggatcccagagtgggactttgtatctaccccaccactggtcaggttaacatttaacctagtaggagatcctataccaggcgcagagaccttctacacagatggatcatgcaatagacagtcaaaagagggaaaagcaggatatgtaacagatagaggaaaagacaaagtaaaagtattagaacaaactaccaatcagcaggcagaattagaagtctttcggatggcactggcagactcaggcccaaaggttaatatcatagtagattcacagtatgtaatggggatagtagcaggccagccaacagagtcagaaaatagaatagtgaaccagatcatagaagaaatgataaagaaggaagcagtctatgttgcatgggtcccagcccataaaggcataggaggaaaccaggaagtagaccatttagtaagtcaaggcatcagacaagtattattcctggaaaagatagagcccgctcaagaggaacatgaaaaatatcatagcattataaaagaactaacccataaatttggaataccccttctagtagcaagacagatagtaaactcatgtgcccaatgccaacagaaaggagaagccatacatgggcaagtaaatgcagaaataggcgtttggcaaatggactacacacacttagaaggaaaaatcattatagtagcagtacatgttgcaagtggattcatagaagcagaagtcatcccacaggaatcaggaaggcagacagcactcttcctattaaaactggccagtaggtggccaataacgcacttgcacacagacaatggccccaacttcacttcacaggaagtgaagatggtggcatggtgggtaggtatagaacaatcctttggagtaccttacaacccacaaagccagggagtagtagaagcaatgaatcaccacctaaagaatcagataagtagaattagagaacaggcaaatacaatagaaacaatagtactgatggcagttcattgcatgaattttaaaagaaggggaggaataggggatatgaccccagcagaaagactaatcaacatgattaccacagaacaagaaatacaattcctccaaagaaaaaattcaaattttaaaaatttccaggtctattacagagaaggcagagatcagctgtggaaaggacctggtgaactactgtggaagggagaaggagcagtcatagtcaaggtagggacagacataaaagtagtaccaagaaggaaggccaagattatcagggactatggaggaagacaggaactggatagtagtccccacctggagggtgccagggaggatggagaaatggcatgcccttgtcaagtacctgaaatacagaacaaaagacctagaggaggtgcgctatgttccccaccacaaggtgggatgggcatggtggacttgcagcagggtaatattcccactacaaggaaaaagtcatctagaaatacaggcatattggaacctaacaccagaaaaaggatggctctcctctcatgcagtaagattaacctggtatacagaaaagttctggacagatgttaccccagactgtgcagacatcctaatacatag

SEQ ID NO: 9933 - DNA, 1545 bp, unidentified
  source 1..1545: mol_type = other DNA
  misc_feature 1..1545: note = Synthetic
ttgagagggaaaaaagcagacgaattagaaaaagttaggttacggcccggcggaaagaaaaagtacaggttaaaacatattgtgtgggcagcgaatgaattggataaattcggattggcagagagcctgttggagtcaaaagaaggttgccaaaagattctcagagttttagatccattagtaccaacagggtcagaaaatttaaaaagcctttttaataccgtctgcgtcatttggtgcttgcacgcagaagagaaagtgaaagatactgaggaagcaaagaaactagcacagagacatctagtggcagaaactggaactgcagagaaaatgccaaatacaagtagaccaacagcaccacctagtgggaaaagaggaaactaccccgtgcaacaagcgggtggcaactatgtccatgtgccactgagcccccgaactctaaatgcatgggtaaaattagtggaggaaaagaagttcggggcagaagtagtgccaggatttcaggcactctcagaaggctgcacgccctatgatattaatcaaatgcttaattgtgtgggcgatcaccaagcagctatgcaaataatcagagagattattaatgaagaagcagcagactgggattcgcagcacccaataccaggccccttaccagcaggacagctcagagacccaagagggtctgacatagcaggaacaacaagcacagtagatgaacagatccagtggatgtataggccacaaaatcccgtaccggtagggaacatctacagaagatggatccaaatagggctgcaaaagtgtgtcagaaagtacaacccaactaacatcttagacataaaacagggaccaaaagaaccgttccaaagctatgtagacaggttctacaaaagcttgagggcagaacaaacagacccagcagtaaaaaattggatgacccaaacgctgctaatacagaatgccaacccagactgcaagttagtactaaaaggactggggatgaatcccaccctagaagagatgctaaccgcctgccagggggtaggcggaccaggccagaaagccaggctaatggctgaagccctaaaagaggctatgggaccaagccctatcccatttgcagcagcccaacaaagaaaggcaattaggtattggaactgtggaaaggagggacactcggcaagacagtgccgagcacctagaagacagggctgctggaagtgtggcaagccaggacacatcatggcaaactgcccggaaagacaggcaggttttttagggttgggcccacggggaaagaagcctcgcaacttccccgtgacccaagcccctcaggggctgataccaacagcacctccggcagatccagcagcggaactgttggagagatatatgcagcaagggagaaagcagagggagcagagggagagaccatacaaagaggtgacggaggacttgctgcacctcgagcagagagagacacctcacagagaggagacagaggacttgctgcacctcaattctctctttggaaaagaccagtag

SEQ ID NO: 9934 - DNA, 1698 bp, unidentified
  source 1..1698: mol_type = other DNA
  misc_feature 1..1698: note = Synthetic
atggcgacttatatccagagggtacagtgcatatctgcattattgtcagttgtgctcacaacactggtctcgtgtcaaattcctagagataggctctctaatataggggtcatagtcgacgaagggaaatcactgaagattgccgggtcccacgaatctaggtacatcgtattaagtctggtcccagggatagacctcgaaaatgggtgcggaacagctcaggttatccagtataagagcctactgaaccggttgttaatcccattgagagatgccttagatcttcaggaggctctgataactgtcactaatgacacgatgaccggtgctgatgtcccacagtcaagattcttcggcgccgtgattgggaccatagcacttggagtggcaacatcagcacagataaccgcagggatcgcgctagctgaggcgagggaggccaagagagacatagcactcataaaagaatcaatgacaaagacacacaaatctatagaactgctgcaaaacgctgtgggggaacaaattcttgctctaaagacgctccaggatttcgtgaatgatgagatcaaacccgcgataagcgaattgggttgtgagactgccgctttaagactggggataaaactgacacaacattactccgagctgctgactgcatttggatctaactttggaaccatcggagagaagagcctcacactgcaggcactgtcttcactctactctgctaacatcactgagattatgaccacgatcaggacagggcagtccaacatctatgacgtcatttatacggagcagatcaagggaactgtgattgatgtagatctagagagatacatggttaccctgtctgtaaaaatccccattctttctgaagtcccaggtgtgcttatacacaaagcatcgtctatttcttacaatatagacggggaggagtggtatgtgactgtccccagtcacatactcagtcgtgcctccttcctggggggtgcaaacatagctgattgtgtagagtccagattgacctacatatgccctagggatcctgcacaattgatacctgacagccagcaaaaatgtatcttgggggacacaacaaggtgtcctgtcacaaaggttgtggataacatcatccccaaatttgcctttgtaaatggaggtgtcgttgcgaactgcatagcatccacatgtacctgtgggacaggccgaaggccaatcagtcaggatcgctctaaaggtgtagtattcttaactcatgataactgtggactcataggagtcaatgggatagaattgtatgctaataggaaagggcatgatgccacttggggggtccagaatttgacagtcggtcctgcaatcgctatcagacccgtggacatttctctcaaccttgccgctgctactgacttcctgcaagactctagagctgaacttgagaaggcacgaaaaatcctctctgaagtaggtagatggtacaattcaggggcgactttgattacgatcatagtagtcatgattgtagtattggtggtcattatagtgattgtcattgtgctctacagactcaggagatcaatgctaatgagtaatccagccggtcggatatcaagagacacatatacattagagccgaagataaggcatatgtatactaacggtgggttcgatgctatgactgagaaaagatga

SEQ ID NO: 9935 - DNA, 114 bp, unidentified
  source 1..114: mol_type = other DNA
  misc_feature 1..114: note = Synthetic
gtgactaaatccgagaatatgatagaaatgatgaaggaaagatcgactattttaaatagcatagatatagaaacggaatcggtagatcgtctaaaagaattgcttctaaaatga

SEQ ID NO: 9936 - DNA, 180 bp, unidentified
  source 1..180: mol_type = other DNA
  misc_feature 1..180: note = Synthetic
aagttttttaaggggaaaaagctcaatattgtagcattacgatctctggaggattgtataaattacgtgactaaatccgagaatatgatagaaatgatgaaggaaagatcgactattttaaatagcatagatatagaaacggaatcggtagatcgtctaaaagaattgcttctaaaatga

SEQ ID NO: 9937 - DNA, 180 bp, unidentified; identical to SEQ ID NO: 9936
  source 1..180: mol_type = other DNA
  misc_feature 1..180: note = Synthetic

SEQ ID NO: 9938 - DNA, 237 bp, unidentified
  source 1..237: mol_type = other DNA
  misc_feature 1..237: note = Synthetic
attaagtcattggatcataccgttttcccctctctgttagatgaggatagtaaaataaagttttttaaggggaaaaagctcaatattgtagcattacgctctctggaggattgtataaattacgtgactaaatccgagaatatgatagaaatgatgaaggaaagatcgactattttaaatagcatagatatagaaacggaatcggtagatcgtctaaaagatttgcttctaaaatga

SEQ ID NO: 9939 - DNA, 537 bp, unidentified
  source 1..537: mol_type = other DNA
  misc_feature 1..537: note = Synthetic
atagggtgtgaccgaaaacggtcagaccgaattcggttgtatataaacagaagcaggatgcacacaagggcagggatgtctgaggagaatccatgccctaggaacatctttttgctttgcaaagagtatggtttggagctagaggatttgcgattgctctgtgtatggtgcaaacggccgttatcagaggctgacatatgggcatttgcaataaaagaactgtttgtagtgtggagaaagggcttcccatttggagcctgcggaaaatgcctgattgcagcaggaaaacttagacaatacagacattggcattactcatgctacggagacacagtggagactgagacaggaatacccatacctcagctgtttatgagatgctatatttgccataagcccctgagctgggaggagaaggaggcattactagttggaaacaagcgtttccacaacatatcaggccggtggacgggacattgcatgaactgcgggtcatcatgcacggcaaccgacccagcctcaaggacattacactaa

SEQ ID NO: 9940 - DNA, 54 bp, unidentified; identical to SEQ ID NO: 75
  source 1..54: mol_type = other DNA
  misc_feature 1..54: note = Synthetic

SEQ ID NO: 9941 - DNA, 18 bp, unidentified
  source 1..18: mol_type = other DNA
  misc_feature 1..18: note = Synthetic
attgtaatggttacgtag

SEQ ID NO: 9942 - DNA, 45 bp, unidentified; identical to SEQ ID NO: 77
  misc_feature 1..45: note = Synthetic
  source 1..45: mol_type = other DNA

SEQ ID NO: 9943 - DNA, 753 bp, unidentified
  source 1..753: mol_type = other DNA
  misc_feature 1..753: note = Synthetic
atggaagacatcaactttgcgtctctggccccgcgacacggctcgcgcccgttcatgggaaactggcaagatatcggcaccagcaatatgagcggtggcgccttcagctggggctcgctgtggagcggcattaaaaatttcggttccaccattaagaactatggcagcaaggcctggaacagcagcacaggccagatgctgagggacaagttgaaagagcaaaatttccaacaaaaggtggtagatggcctggcctctggcattagcggggtggtggacctggccaaccaggcagtgcaaaataagattaacagtaagcttgatccccgccctcccgtagaggagcctccaccggccgtggagacagtgtctccagaggggcgtggcgaaaagcgtccgcggcccgacagggaagaaactctggtgacgcaaatagatgagcctccctcgtacgaggaggcactaaagcaaggcctgcccaccacccgtcccatcgcgcccatggctaccggagtgctgggccagcacacacctgtaacgctggacctgcctccccccgctgacacccagcagaaacctgtgctgccagggccgtccgccgttgttgtaacccgccctagccgcgcgtccctgcgccgtgccgccagcggtccgcgatcgatgcggcccgtagccagtggcaactggcaaagcacactgaacagcatcgtgggtctgggggtgcaatccctgaagcgccgacgatgcttctaa

SEQ ID NO: 9944 - DNA, 12 bp, unidentified
  misc_feature 1..12: note = Synthetic
  source 1..12: mol_type = other DNA
atgaaaaaataa

SEQ ID NO: 9945 - DNA, 48 bp, unidentified; identical to SEQ ID NO: 81
  source 1..48: mol_type = other DNA
  misc_feature 1..48: note = Synthetic

SEQ ID NO: 9946 - DNA, 411 bp, unidentified
  source 1..411: mol_type = other DNA
  misc_feature 1..411: note = Synthetic
atgactgacccaatcgccacatcatccaccgctgccaaggagctgctggacatggacggacgtgcctcagaacagcgactcatccaactacgcattcgtcagcagcaggaacgagcagtaaaagagctaagggatgccattgggattcaccagtgcaaaaaaggcatattctgcttagtaaaacaatccaaaatctcctacgagatcaccgctactgaccatcgtctctcatacgagctcggtccgcagcgacaaaaattcacctgcatggtgggaatcaaccccatagttatcacccagcagtctggagatactaagggttgtatccagtgttcctgtgattccaccgagtgcatctacacactgctgaagaccctctgcggccttcgagacctcctacccatgaactaa

SEQ ID NO: 9947 - DNA, 21 bp, unidentified
  misc_feature 1..21: note = Synthetic
  source 1..21: mol_type = other DNA
atgctgtaccactccggataa

SEQ ID NO: 9948 - DNA, 21 bp, unidentified
  misc_feature 1..21: note = Synthetic
  source 1..21: mol_type = other DNA
atgcacaaagaagaattctag

SEQ ID NO: 9949 - DNA, 21 bp, unidentified
  misc_feature 1..21: note = Synthetic
  source 1..21: mol_type = other DNA
atgcacaaagaagaattctag

SEQ ID NO: 9950 - DNA, 21 bp, unidentified
  source 1..21: mol_type = other DNA
  misc_feature 1..21: note = Synthetic
ttgcatcccttgctactgtag

SEQ ID NO: 9951 - DNA, 1272 bp, unidentified
  misc_feature 1..1272: note = Synthetic
  source 1..1272: mol_type = other DNA
atggagaaaacgccggcggagacgacggcggtttcagctggcaacgtgccacgtgactcaattccgtgtataactaacgtgtccgcggacacccgcggccgtacccgccccagcagaccagccaccgtccctcagcgacgtcccgcgcggatcggacactttaggcggcgcagcgccagccttagctttcttgactggccggacgacagcgtcacagagggcgttcggacgacctccgcgtcggtcgccgcctccgcggcccgtttcgacgaaatccggcggcgccgccagagcatcaacgacgagatgaaggaacgcacgctggaggacgcgctggctgtcgagctggtcaacgagaccttccgctgctctgtcacctccgacgcccgcaaggacttgcagaagctggttcgtcgcgtcagcggcacggtgctgcgtctcagctggccaaacggttggttcttcacctactgcgacctgttacgcgtcggctactttggacatctcaatattaaaggtttggagaagaccttcctgtgctgcgacaagttcttgctgccggtgggcactgtgagtcgttgcgaagccatcggccgcccaccgctacccgtactcatcggcgagggcggtcgcgtctacgtctactcgcctgtggtggaatcgctgtacctggtgtcgcggtccggtttccgcggcttcgtgcaggagggcctgcgcaactacgcgccgctgcgcgaagaactgggctatgtccgcttcgagaccggcggcgacgtgggtcgcgagttcatgttggcgcgcgacctgctggccctgtggcgcctgtgcatgaagcgcgagggttctatcttcagctggcgagacggtaacgaggcgctgacgacggtcgtcttgaacgggagccagacttacgaggatccggcccacggcaactggttaaaagagacgtgctcgctgaacgtgctgcaggtatttgtggtgcgggccgtgccggtggagtcgcagcagcgcctggacatctccatactggtgaacgagagcggcgccgtcttcggcgtgcatcccgatacgcggcaggcgcactttctggcgcgcggactcctgggcttctttcgcgtcgggttcttgcggttctgcaacaactactgcttcgcccgcgactgttttacccaccctgaaagcgtggcacccgcttaccgcgccaccggctgtcccagagaactgttttgtcgtcgtttgcgcaaaaagaaggggctctttgctcgaaggtga

SEQ ID NO: 9952 - DNA, 36 bp, unidentified; identical to SEQ ID NO: 100
  source 1..36: mol_type = other DNA
  misc_feature 1..36: note = Synthetic

SEQ ID NO: 9953 - DNA, 84 bp, unidentified; identical to SEQ ID NO: 101
  source 1..84: mol_type = other DNA
  misc_feature 1..84: note = Synthetic

SEQ ID NO: 9954 - DNA, 57 bp, unidentified; identical to SEQ ID NO: 102
  misc_feature 1..57: note = Synthetic
  source 1..57: mol_type = other DNA

SEQ ID NO: 9955 - DNA, 141 bp, unidentified; identical to SEQ ID NO: 103
  misc_feature 1..141: note = Synthetic
  source 1..141: mol_type = other DNA

SEQ ID NO: 9956 - DNA, 54 bp, unidentified
  source 1..54: mol_type = other DNA
  misc_feature 1..54: note = Synthetic
atggacgcattgggtgatattctatcatctattggggtattgagaacttgttga

SEQ ID NO: 9957 - DNA, 141 bp, unidentified; identical to SEQ ID NO: 105
  source 1..141: mol_type = other DNA
  misc_feature 1..141: note = Synthetic

SEQ ID NO: 9958 - DNA, 111 bp, unidentified
  source 1..111: mol_type = other DNA
  misc_feature 1..111: note = Synthetic
atcttttttgggaaaacttctatcggtggatatagcgacctgttggaaatagacaacatggacgcattgggtgatattctatcatctattggggtattgagaacttgttga

SEQ ID NO: 9959 - DNA, 51 bp, unidentified; identical to SEQ ID NO: 107
  source 1..51: mol_type = other DNA
  misc_feature 1..51: note = Synthetic

SEQ ID NO: 9960 - DNA, 27 bp, unidentified
  source 1..27: mol_type = other DNA
  misc_feature 1..27: note = Synthetic
atgtgcgctaccagaaccattaattag

SEQ ID NO: 9961 - DNA, 1221 bp, unidentified
  misc_feature 1..1221: note = Synthetic
  source 1..1221: mol_type = other DNA
atagcgcctcattttgtgggtcaccatattcttgggaacaagatctacagcatggggcagaatctttccaccagcaatcctctgggattctttcccgaccaccagttggatccagccttcagagcaaacaccgcaaatccagattgggacttcaatcccaacaaggacacctggccagacgccaacaaggtaggagctggagcattcgggctgggtttcaccccaccgcacggaggccttttggggtggagccctcaggctcagggcatactacaaactttgccagcaaatccgcctcctgcctccaccaatcgccagtcaggaaggcagcctaccccgctgtctccacctttgagaaacactcatcctcaggccatgcagtggaattccacaaccttccaccaaactctgcaagatcccagagtgagaggcctgtatttccctgctggtggctccagttcaggaacagtaaaccctgttctgactactgcctctcccttatcgtcaatcttctcgaggattggggaccctgcgctgaacatggagaacatcacatcaggattcctaggaccccttctcgtgttacaggcggggtttttcttgttgacaagaatcctcacaataccgcagagtctagactcgtggtggacttctctcaattttctagggggaactaccgtgtgtcttggccaaaattcgcagtccccaacctccaatcactcaccaacctcttgtcctccaacttgtcctggttatcgctggatgtgtctgcggcgttttatcatcttcctcttcatcctgctgctatgcctcatcttcttgttggttcttctggactatcaaggtatgttgcccgtttgtcctctaattccaggatcctcaacaaccagcacgggaccatgccggacctgcatgactactgctcaaggaacctctatgtatccctcctgttgctgtaccaaaccttcggacggaaattgcacctgtattcccatcccatcatcctgggctttcggaaaattcctatgggagtgggcctcagcccgtttctcctggctcagtttactagtgccatttgttcagtggttcgtagggctttcccccactgtttggctttcagttatatggatgatgtggtattgggggccaagtctgtacagcatcttgagtccctttttaccgctgttaccaattttcttttgtctttgggtatacatttaa

SEQ ID NO: 9962 - DNA, 6384 bp, unidentified
  misc_feature 1..6384: note = Synthetic
  source 1..6384: mol_type = other DNA
atgattgattcctcagaggtgtatgatgaccctattgaccctgccgaaccggagtgtgaatggagcgggaacccagtgatccccaacattttgaggaactccgattataatctgaattccccattgctggaagatccaacccatctgatgattcaatggcttctatctggaaacaggcctttgaggatgacagtcacagaaaacatggtgaggtctcataaggttttgaaggcatcatttaaacgggtggatattgctgtcattaaaatcgggggcacaagtgctcaagcaatgatgggaacatgggtacggggatcccacgcagagtcatcccggagtaggaagtgcctggctgatttgtcatctttctatcagaggtcttcaccaattgagtcgatcttgaactacactcttatgaatcgaggcttgcagactccgagagaaggggttttggccggcttgagcagggtcagttacgatcaatccttcggaagatatttgggaaatctgtactcatcttacttattgtttcataccattgttctttatatgaatgccctggattgggaagaagagaagaccattctggcactctggaaagacataacatcagtagacataaagaacgacaaagtcttgtttaaggatcccctgtgggggaagttcctggtcaccaaggactttgtttattcttatgactccaacagcctatttgacaggaactatacattgatgttgaaagatctgtttctttccagattcaattcattgctgattctaatatcccctccagaaccaaggtattccgatgaacttgtagccaacctatgtcgcctttatattgcgggggataagatcttgtctacatgcgggaatcctggatatgacataatcaagatgctagagccatatgtcgtgaaccttctggtacagaaagcagaaacgttccgacctctgatccatccccttggagagtttccaacctttataaaggacaagacggcccagctgattggaacttttggaccttgcgcctcacagttcttctctatgttgagccaatttgacaatatccatgatctggtattcgtttatggttgctacagacactggggacacccatacatcgactatagacgaggactaaccaagctatttgatcaggttcatatgagaaagaccatagatcagaaatatcaagaatgcttggctagcgatctggcgaagaaaattctcaggtggggtttcgacaaatattccaaatggtatctagacacaaattccctccctaaaaatcatccgttagctccctacattgcaactcagacctggcctcctaaacatattgtagacctcctaggagactcttggcatttattgcccatgacacaaatctttgaaattcccgaatccatggacccctcagagattctggatgacaagtcacactcattcactcgatctaagcttgcttattggctatcagaaaacaggggaggtccggttcctagcgaaaaggtcatcattacagccttgtcacgacccccagtcaatcctagagagtttttaagaacaatcgatcaaggagggctaccggaagatgacctgatcataggactaaaacccaaggagagggagttgaaaatagaggggaggttctttgccttgatgtcatggaatctaaggctatactttgtaatcacagagaagttgttggccaaccatattcttcctctgtttgatgctttgaccatgacggacaatttgaataaggtattcaagaagttgatagacagggttaccggtcaagggctgttggattactcaagagtcacttatgcctttcacctggactatgaaaagtggaataatcaccagcgactagagtctaccaaggatgttttctctgtcttagacaaagcttttggtttgtccagagtgttttctaggacacacgagttcttccagaagtcctgggtatattattcagacaggtctgacctgatagggatttggaaagaccagatatactgtctcgacatggctgaagggcccacatgctggaatggtcaagacggaggattagaaggcctcagacaaaaggggtggagtctggtcagccttcttatgattgagagggaatcacaaacccgaaatacgaggacaaagattctggcacagggggacaaccaagtgctctgccccacttacatgctttcatcaggcctcaacaatgaggggcttaggtatgagctggaaagtatatcgaagaatgccatgtccatctatagagcgatagaggagggagcctctaaactcggattgataataaagaaagaagaaacaatgtgtagctttgacttcctcatttacggaaaaactcccctatttcgtggaaacatcctggtcccagaatctaagaggtgggccagagtatcctgcatctcaaatgaccaaattgtaaatctagccaacattatgtctacagtctccaccaacgccttgactgttgctcaacactcacagtctctcatcaagcccatgagagacttcctcttgatgtcagttcaagcaatttatcattatcttttgttcagccctatcctgaaggaccgagtttacaaggttctgaactctaaaggagatgatttcctactggcgatgtctaggataatttatctagatccatcgttggggggagtatcaggaatgtccctgggaagattccacatcagacaattttctgatcccgtgtcggagggtctaaccttctggaaggagatatggctgagtgcctccgagacatggatccatcacctgtgtcaggaggcagggaatccagatctaggggatagaactttagaaagtttcacccgtcttttagaggaccccaccacactcaacataaggggaggagcaagtcctacaattctcctgaaagaagctattaggaaggctctgtatgatgaagtggacaaggtagagaattctgagttcagggaggcaataattttgtcgaagacacatcgagacaattttattctttttctcaaatctatagagcctttgtttcctaggttcctgagtgagctttttagctcttctttcttaggaataccagagtctattataggtctgattcagaactccagaacagtgaggagacagtttagaaagagcctttcaagggcactggaggagtctttcttccattcagaaattcacgggataaatcggatgacccaaacccctcaacgattggggagagtctggccctgttctgcagagcgggcagatcaactcagagagatctcatggggaaggaaggtggtgggaaccacagttcctcacccagcagagatgctggtccttgttcccaggtcatctgtagcttgtggatgcaatgttagagatgcatacaaccctcgattatcggtgtcggtcttaccttcttttgacaattcctttttctcaagaggtcctctcaaagggtacctagggtcttcaacttcagtctctactcaactgtttcatgcctgggagaaggtgaccaatgttcatgtcgtgaagagagcattgtctctcaaggagtcaatcaattggtttgtgtcaagagactcaaatctggcccaaactctcatcagaaatatcctttccttaacaggtccatcttttcctattgaagaggctcccgttttcaaacggacaggatcagccctgcataggtttaaatctgccaggtatagtgaaggaggttattcatctgtatgtcccaacttgttgtctcacatatctgtcagtacagatactatgtcagacctgactcaggatgggaccaattttgatttcatgttccaacctttgatgttatatgctcaaacctggacctctgagttggttcaaaaagatgttagactaaaggactcaacatttcactggcatttgaggtgtcagaaatgtataagaccaatagaagaggtctctttagaagccccccaaagctttatattccctgatatatcaacacggatttcaagaatggtgtcgggagccgtcccacaattcaggaaactgcctgacatcggcttaaaagcaggtgatttgacagtgttgaacaacaatgagcggtcttaccacatcggaacagctcagggtctcctgtattctatattggttgcagtccatgatccaggatataatgacaactctttgtttccagtaaacatctatggaagggtgtcggctagaagttatttaagaggattagcgcgaggagtcttgatagggtcttcgatatgctttctaaccagaatgacgaacatcaacataaacaggcctctcgaattaatatcaggagtgatttcatacattttattgaggctcgacaatcatccgtctctatatgtgatgttgaaagagccggatcttagagcagagatcttttcaatacctcaaaagattccagcagcttatcccaccacgatggaggagggaaacaggtctgtgttgtgctatcttcaacaggtattaaggtatgagagagacagcatgtgttcctcgccagaaagtgagctcctctggatattctctgattttagaagtatcaaaatgacatatctgacattgataacttaccaggcccatctatggctacaaaaggtagaaagaaatttgtcaaaacagatgagagccaagttacgccaattgaattccctgatgaggcaggtgttggggggccatggtgaggacaacgtagagtcagatgaggagatacactctctgctaaaagaggcgttgagaagaaccagatgggtggatcaggaggttcgtcatgcagctaagtcgatgagtccagacttgagtccaattccaagaatatcacgcaaaatcggatcctctgaatggatatgttctgcacagcagatcgcaatatccacctctttgaatccagcgttggcatcagacattgacctgagatctctgtcccgtcaatttcaaaacccgctcatgtcaggtctaaggatcgttcaatgggcgacaggtgctcactacaaggtaaagcccatactgaatgatctggatgtgtgcccttgtttgtcccttgttatcggtgacgggtccggcggaatttctcgagtcgttttgagtatgttcccagattccaaattggtcttcaacagcttgttggaggtgaatgacttaatggcttcaggcactcaccccttgcctccgtctgcactaatgagaggaggagaggaaataacatcaagagtcatcgatttcgactctatatgggagaagccttctgatctgagaaaccctctcacttggaagtattttcactccgtgcagtctaaactaaaaactcagttcgacttaattgtatgtgatgcagaggttacagacattgagtcagtaaataaaataacacttctattgtctgacttctctatgtctattcgagggcccttgtgcttgatttttaaaacctatgggaccatgctggtcaatccagattataaggcaattcaccacttgtccagagcgtttccgaacgtgacagggtttgtcacccagatgacatcttctttctcttcagaggtttatctgaagttttccaaaaagggtcacttctttagagatcatgagttgcttacggcttctactatccgagagatgagcctggttttgttcaactgcagcaacaccaaaagcgagatgttaagggctagaactttgaattatcaggacttggtgagaggcttccctgaggagattatatcaaacccttataatgagatgatcataacgttgatagacagtgaagtagaatcgttcttggttcataagatggtggatgagttggagttgaagagaggctacccatctaagatggctataatactcgcaataaccatagtattctccaacagggttttcaatgtgtctaaatctctcaaggagtctaagttcttccctccctctgacccaaagctattgagacattttaacatctgttctagcacacttctgtttctatcgacaacattgggagatttgcctaacttcactagaatccacgaactttacaacctccctgtcacttactacttcaagaagcagaccatcaggagcaaaaagtacttatcatggagctgggcaagtcctagcccgatattcaaaaaggtagcgtgcaattcatctctgagtttgtcagctcactggataagaatgatatacaagatagtaaaaactaccagactgagctgtcgtccgaaagacctaatcagggagacagaagcttgtctcaagaattataatagatggataaatatgagagatattagatcaaggacatctcttatggattattgttgtctatga

SEQ ID NO: 9963 - DNA, 36 bp, unidentified; identical to SEQ ID NO: 113
  misc_feature 1..36: note = Synthetic
  source 1..36: mol_type = other DNA

SEQ ID NO: 9964 - DNA, 48 bp, unidentified; identical to SEQ ID NO: 114
  misc_feature 1..48: note = Synthetic
  source 1..48: mol_type = other DNA

SEQ ID NO: 9965 - DNA, 72 bp, unidentified
  source 1..72: mol_type = other DNA
  misc_feature 1..72: note = Synthetic
atgaagatcatattcacacttctgataaatctttgtcatgtagtgtatgcaattcattgtcccaaattgtag

SEQ ID NO: 9966 - DNA, 48 bp, unidentified; identical to SEQ ID NO: 114
  source 1..48: mol_type = other DNA
  misc_feature 1..48: note = Synthetic

SEQ ID NO: 9967 - DNA, 48 bp, unidentified; identical to SEQ ID NO: 114
  source 1..48: mol_type = other DNA
  misc_feature 1..48: note = Synthetic

SEQ ID NO: 9968 - DNA, 72 bp, unidentified
  source 1..72: mol_type = other DNA
  misc_feature 1..72: note = Synthetic
atgaagatcatattcacacttctgataaatctttgtcttgtagtgtatgcaattcattatcccaaattgtag

SEQ ID NO: 9969 - DNA, 72 bp, unidentified
  source 1..72: mol_type = other DNA
  misc_feature 1..72: note = Synthetic
atgaagatcatattcacacttctgataaatctttgtcttgtagtgtatgcaattcattgtcccaaattgtag

SEQ ID NO: 9970 - DNA, 48 bp, unidentified; identical to SEQ ID NO: 114
  misc_feature 1..48: note = Synthetic
  source 1..48: mol_type = other DNA

SEQ ID NO: 9971 - DNA, 1392 bp, unidentified
  source 1..1392: mol_type = other DNA
  misc_feature 1..1392: note = Synthetic
atggctagacgatttcgccggcacagaggaaagttcggatactacagacggggaagatggcactggagacacagactgcgacgaagacgctattcccggaggcgtaaacttcgatatgcgcgtagacgacccagtgctcgcagcgttaaaaggaagatattcaacccacatccgggatcttacctggtaagactgccgaacccctataacgcgattaacctatactttcaagggctcgtattcatacctagagccacaagctacttaccagacacaactaaaggcaaaaacgttacaacaactaatgtggcactaattaacgttaacctaaaagagttcttctgggccacactgccactagacgcaaggtcaaagattggaggacccaaccccttcccacaacacatccagggatgtgactgggcgggcatagccacaacccacaaaggctgctggccatacagtacacaaatgtcatcatctagacagccaggagcatggccttcagaatggtggcgatgggcacttcttcttatgcatcctagatccaatgtacgattcttcggatccccgaagctgatgaccctgccgcaaataggacagttcctggggggctggcaactattcacccacagattcacaaaattccgtgtgcttgcaactaaatccagagaatcgttctccccggtcgcgagcctgcttgtacaagacaattactttgcaagaagagagggtgcagggccaccaatatcgggacaaccgccaatgtgcaccatgcaaagacttacgagagactatacaggcacagaaagcaatgctccagctaatgaaaccacaataccatccatgccaccagacccaccccaataccccgctcaaaccggctgcagcacggcagtagaccctggtgaatacctccttgcaggactcacacgtacagcagtatcctgctggtattcacgctcaacatacccaagctttgctacgctatcagcactaggggcaccatggtcattcccagcaggacagaagtcaatcagcaaaacatccttcaacaaacatgtcattagaggcatgggtgacccacaaggcaaaaaatggctcaccctggtaccgaaagaacaagaatggatcaattctgactcaatgacaaagtcagaactggacacagacatagctacattatacctagctcaaggaacaagcagagcaaacagctacaaattcaacacattccacgaggtaatggtacaagaccccatgaatgtagccccctgggcagtcgtcaaagtctccagcgtctggacactcggcaacaacagaagaccatacccatgggatgtcaactggtacaacgaattcactgcagaaggacgcgttcccgcggactag

SEQ ID NO: 9972 - DNA, 660 bp, unidentified
  misc_feature 1..660: note = Synthetic
  source 1..660: mol_type = other DNA
gtggatacctcagcatccaaaactctccttcccgaatggatcaggatgccttcttttttgagagggatcctgaagccgaaggagaggcaccacgaaaacaagaatcactctcagatgtcatcggactccttgacgtcgtcttatcctacaagcccacagaaattggagaagacagaagctggctccatggtatcatcgacaacccaaaagaaaacaagccatcatgcaaagccgacgataacaacaaagacagagcaatctcaacgtcgacccaagatcatagatcaagtgaggggagtggaatctctaggagaacaagtgagtcaaaaacagagacacatgctagaatccttgatcaacaaggtatacacagggcctctaggcgaggaactagtccaaaccctctacctgagaatatgggcaatgaaagaaacaccagaatcgacgaagattctccaaatgagagaagacatcagagatcagtacttacggatgaagacagaaagatggctgagaactctaataagagggaagaagaccaagttgagggatttccagaagaggtacgaagaagtacacccttatctgatgatggagagggtagaacaaataataatggaagaagcatggaaactagcagcacacatagtacaagaataa

SEQ ID NO: 9973 - DNA, 258 bp, unidentified
  source 1..258: mol_type = other DNA
  misc_feature 1..258: note = Synthetic
ctgtggacagttatttttatattaataactcagggaaaacatcaaaacatagaaatttgtaaagaaaaaatatacacgataatagataacttaccttgtcctgcgtgtaaaattcacgcaaaagaagctattaataaaaataatatcatgtccagcacagatttaaattatatttattttttctttattagtttgtttaataacttagcatcagatccagtgtataaaataaatatagataaagtattaccactttaa

SEQ ID NO: 9974 - DNA, 33 bp, unidentified; identical to SEQ ID NO: 120
  source 1..33: mol_type = other DNA
  misc_feature 1..33: note = Synthetic

SEQ ID NO: 9975 - DNA, 45 bp, unidentified; identical to SEQ ID NO: 126
  misc_feature 1..45: note = Synthetic
  source 1..45: mol_type = other DNA

SEQ ID NO: 9976 - DNA, 45 bp, unidentified; identical to SEQ ID NO: 126
  source 1..45: mol_type = other DNA
  misc_feature 1..45: note = Synthetic

SEQ ID NO: 9977 - DNA, 684 bp, unidentified
  source 1..684: mol_type = other DNA
  misc_feature 1..684: note = Synthetic
atgagcaaagagattcccacgccttacatgtggagctaccagccccagatgggcctggccgccggcgccgcccaggactactccacccgcatgaattggctcagcgccgggcccgcgatgatctcacgggtgaatgacatccgcgcccaccgaaaccagatactcctagaacagtcagcgctcaccgccacgccccgcaatcacctcaatccgcgtaattggcccgccgccctggtgtaccaggaaattccccagcccacgaccgtactacttccgcgagacgcccaggccgaagtccagctgactaactcaggtgtccagctggcgggcggcgccaccctgtgtcgtcaccgccccgctcagggtataaagcggctggtgatccggggcagaggcacacagctcaacgacgaggtggtgagctcttcgctgggtctgcgacctgacggagtcttccaactcgccggatcggggagatcttccttcacgcctcgtcaggcggtcctgactttggagagttcgtcctcgcagccccgctcgggcggcatcggcactctccagttcgtggaggagttcactccctcggtctacttcaaccccttctccggctcccccggccactacccggacgagttcatcccgaactttgacgccatcagcgagtcggtggacggctacgattga

SEQ ID NO: 9978 - DNA, 21 bp, unidentified
  source 1..21: mol_type = other DNA
  misc_feature 1..21: note = Synthetic
atggcagagactctctggtga

SEQ ID NO: 9979 - DNA, 663 bp, unidentified
  misc_feature 1..663: note = Synthetic
  source 1..663: mol_type = other DNA
ctggtgaatccgggcccggccatggcaagccacaaggacgatgaagaaaagttttttcctcagagcggggttctcatctttgggaagcaaggctcagagaaaacaaatgtggacattgaaaaggtcatgattacagacgaagaggaaatcaggacaaccaatcccgtggctacggagcagtatggttctgtatctaccaacctccagagaggcaacagacaagcagctaccgcagatgtcaacacacaaggcgttcttccaggcatggtctggcaggacagagatgtgtaccttcaggggcccatctgggcaaagattccacacacggacggacattttcacccctctcccctcatgggtggattcggacttaaacaccctcctccacagattctcatcaagaacaccccggtacctgcgaatccttcgaccaccttcagtgcggcaaagtttgcttccttcatcacacagtactccacgggacaggtcagcgtggagatcgagtgggagctgcagaaggaaaacagcaaacgctggaatcccgaaattcagtacacttccaactacaacaagtctgttaatgtggactttactgtggacactaatggcgtgtattcagagcctcgccccattggcaccagatacctgactcgtaatctgtaa

SEQ ID NO: 9980 - DNA, 123 bp, unidentified
  source 1..123: mol_type = other DNA
  misc_feature 1..123: note = Synthetic
atccgggcccggccatggcaagccacaaggacgatgaagaaaagttttttcctcagagcggggttctcatctttgggaagcaaggctcagagaaaacaaatgtggacattgaaaaggtcatga

SEQ ID NO: 9981 - DNA, 1413 bp, unidentified
  source 1..1413: mol_type = other DNA
  misc_feature 1..1413: note = Synthetic
atgttctacttaaaaaaactcctacgccagcttctggctccgttgtgtaaacatgggtcgtacacgcatttgcaattgtttgtgatgggtgaggcctgtgtgccaggaaagtgtgttcttacaatgtttttgacaaataaaaaattcttgaataaggaagtaacggaaaaattttataatgagtttttcgcaatttggttgcgttgcaggccggagacgcgattaatcactaagcgactttttaacaaaatggttatgacaaagggtctttttgttttgctcgcctatctgtatttcgtgtatcggcagtgtaaagttctcgaattgttgtctctttataaacttaaaacaatcaaatgggtggacgtcgagactagattcagggtttatcccccgtacaagcttaataagttgttggagatgccctcgttttccgaaatcaatgagttgcacatgttcctgttcgagcaacagttgttgcttccgattccgacgcacgtgaacttaccgtgtatgaggctattctgtttacgtgactatgagcagaccgagacggtgatgttgcgatataggcagagagagcacgttttgtcatttccctctatgttgcgaaagtatgctttgaaatctccggcggggaatttcatgtttactatggcaaaggctttggtggaaaacttctgttttagtgcagacagatatcttattccagtggagcataataatctagtacctatggtgccgagcaaacctgaacggggtgattttccaaagattctaacctttgcgttggcgacgtccttaaaggatggcttagctaccagtgttatttcgttacccgttatgtgctattgtaagactaaatgttctcgctttatactcgaagagagttacatttgcgttatttgcgcaaaatgtggtcactgcttaaactccggaaaagaaaagctgtgttcgccgcagggcttttcgctgagctccatgttctattttagagacaagcaggagaaaaatttgatatacagcatgcacacggatgtaatgtattgttcgctgtgtgggagtcagcagttggtgttcgagcggatatatgagatgtctgagcattgtgtattggggatgaaggtgaaaaccgtttcatggaaggcggtgatcggaacaaattctgcttgcactattttaaatgacaatgtgaagttcgatgttattgttccttgttcgtgtagatcctgttattctactgtgcatctctacaacgtgaccgtcaagaagttgttacggcttgtttcacacggttctgattttcagtgtcagcgctgtcagcattcgtttagagagacttgcttagatctggaagactgtgttaatatctgtcaaggttgccagatttcccaaaacgtgaggtgtatttga

SEQ ID NO: 9982 - DNA, 600 bp, unidentified
  source 1..600: mol_type = other DNA
  misc_feature 1..600: note = Synthetic
ttgtcatccggcttagagcaaaccgtccttttatcatcttccgtcgccatggctatgtacacatccgaatccgaacgcgactggcgtcgtgtaatccacgactcgcacggcctgtggtgcgattgcggcgactggcgagagcacctctattgtgtgtacgacagccattttcagcgacgacccacgacccgagccgaacggagggccgccaattggcggcgacagatgcggcggttacaccgtctgtggtgtttttgtcaggactggaagtgtcacgcgttatacgccgagtgggacggcaaagaatccgacgacgagtcgtcggcgtcttcctcgggcgaagcgccagagcaacaggtccccgcttggaagaccgtgcgagccttctcgcgggcctaccaccaccgcattaaccggggtctgcggggcacgcccccaccgcgcaacttgccgggatacgagcacgcttccgagggctggcggttttgcaatcgacgggaacggcgagaggacgatcttcgcacgcgggctgagccggaccgcgtggtgttccagttagggggagtacctcctcgccgtcaccgggaaacttacgtgtaa

SEQ ID NO: 9983 - DNA, 711 bp, unidentified
  source 1..711: mol_type = other DNA
  misc_feature 1..711: note = Synthetic
atcgccagcatgagcaaggagattcccaccccctacatgtggagctatcagccccagatgggcctggccgcgggggccgcccaggactactccagcaagatgaactggctcagcgccggcccccacatgatctcacgagttaacggcatccgagcccaccgaaaccagattctcttagaacaggcggcaatcaccgccacaccccggcgccaactcaacccgcctagttggcccgccgcccaggtgtatcaggaaaatccccgcccgaccacagtcctcctgccacgcgacgcggaggccgaagtcctcatgactaactctggggtacaattagcgggcgggtccaggtacgccaggtacagaggtcgggccgctccttactctcccgggagtataaagagggtgatcattcgaggccgaggtatccagctcaacgacgagacggtgagctcctcaaccggtctcagacctgacggagtcttccagctcggaggagcgggccgctcttccttcaccactcgccaggcctacctgaccctgcagagctcttcctcgcagccgcgctccgggggaatcggcactctccagttcgtggaagagttcgttccctccgtctacttcaaccccttctccggctcgcctggacgctacccggacgccttcattcccaactttgacgcagtgagtgaatccgtggacggctacgactga

SEQ ID NO: 9984 - DNA, 114 bp, unidentified; identical to SEQ ID NO: 139
  source 1..114: mol_type = other DNA
  misc_feature 1..114: note = Synthetic

SEQ ID NO: 9985 - DNA, 114 bp, unidentified; identical to SEQ ID NO: 140
  source 1..114: mol_type = other DNA
  misc_feature 1..114: note = Synthetic

SEQ ID NO: 9986 - DNA, 138 bp, unidentified
  source 1..138: mol_type = other DNA
  misc_feature 1..138: note = Synthetic
acggggctgtacctaacatttgagacatctgcgcccttggtgttggtggataaaaaatatggctggatatttaaagacctgtacgcccttctgtaccaccacctgcaattgagcaaccacaatgactcccaggtctag

SEQ ID NO: 9987 - DNA, 138 bp, unidentified; identical to SEQ ID NO: 9986
  misc_feature 1..138: note = Synthetic
  source 1..138: mol_type = other DNA

SEQ ID NO: 9988 - DNA, 39 bp, unidentified; identical to SEQ ID NO: 147
  source 1..39: mol_type = other DNA
  misc_feature 1..39: note = Synthetic

SEQ ID NO: 9989 - DNA, 234 bp, unidentified
  source 1..234: mol_type = other DNA
  misc_feature 1..234: note = Synthetic
atgaggtccctgattatagtccttctgttcccctctatcatctactccatgtctattagacaatgtgagaagactgaagaggaaacatggggattgaaaatagggttgtgtataattgccaaagatttctatcccgaaagaactgattgcagtgttcatctcccaactgcaagtgaaggattgataactgaaggcaatggattcagggatatacgaaacaccgataaattataa

SEQ ID NO: 9990 - DNA, 699 bp, unidentified
  source 1..699: mol_type = other DNA
  misc_feature 1..699: note = Synthetic
gtgtcgaggtcgggaatgtcttcgtggcgactcaaaatgagcaagtgttcgggttccagcagcgtccagactctcgaagatctgcgcaatcgtcttcgctccgaggccttgggcagcgattgccaagagccccgcgacgacctcttccccaacggcgaggagtgtctagacatcgacgggccctgctccccttgcgatgaggcagagcaggagctcgaccaggagcagttgcctgtgcccgaaaccgtgcccgaactgccagccaagactcctaagcgccgaccagcgaaaaaggataaggcagataagccggaaaagtcgaccaaaggcgcaaagaaactgtgccctccggacgacaaggatgacgagctcgaaagcaacgacgtcgacaacaacgaagagtccggcgacgcagagggcggcgcgagcgcccgaagccccagcgacatcgacaacgtggacgagatggacgactccgacctcatggtggcgttctccgccatcctcgcagacttcaaggaccttacccaacgagtgaaagctctttcgtccgtactcacggacgtacaggcgaccggcatacgcaggagcttctcgacgctcggcaaggctctgacggaggcggcccacatcgccaacaccggagccaagccagtcaccgctcctcgcaagaagaaggccgccacctgcaagaagtag

SEQ ID NO: 9991 - DNA, 78 bp, unidentified; identical to SEQ ID NO: 153
  source 1..78: mol_type = other DNA
  misc_feature 1..78: note = Synthetic

SEQ ID NO: 9992 - DNA, 78 bp, unidentified; identical to SEQ ID NO: 153
  source 1..78: mol_type = other DNA
  misc_feature 1..78: note = Synthetic

SEQ ID NO: 9993 - DNA, 198 bp, unidentified
  misc_feature 1..198: note = Synthetic
  source 1..198: mol_type = other DNA
atggctgagtttatgccgctggtggtagacacgaacagagctgagtgtctaaccgcctgggcgggtgccggagctcctgagagcggagtcaaggggcctatcgggcaggcggtaatccagcggaaccgggcccccctcgatggaagaaagatggctgacggtagcgtactgcgcacacggattattctgcagctgtaa

SEQ ID NO: 9994 - DNA, 198 bp, unidentified; identical to SEQ ID NO: 9993
  source 1..198: mol_type = other DNA
  misc_feature 1..198: note = Synthetic

SEQ ID NO: 9995 - DNA, 492 bp, unidentified
  misc_feature 1..492: note = Synthetic
  source 1..492: mol_type = other DNA
attgaagggatattcatggcctgtggattaaacgaacctgagtacctgtaccatcctttgctcagccctattaagctatacatcacaggcttaatgcgagacaaggagtctttattcgaggccatgttggctaatgtgagatttcacagcaccaccggtataaaccagcttgggttgagcatgctgcaggttagcggcgatggaaacatgaactgggggcgagccctggctatactgacctttggcagttttgtggcccagaagttatccaacgaacctcacctgcgagactttgctttggccgttttacctgtatatgcgtatgaagcaatcggaccccagtggtttcgcgctcgcggaggctggcgaggcctgaaggcgtattgtacacaggtgcttaccagaagaaggggacggagaatgacagcgctattgggaagcattgcattattggccactatattggcagcggtcgcgatgagcaggagataa

SEQ ID NO: 9996 - DNA, 492 bp, unidentified; identical to SEQ ID NO: 9995
  source 1..492: mol_type = other DNA
  misc_feature 1..492: note = Synthetic

SEQ ID NO: 9997 - DNA, 207 bp, unidentified
  misc_feature 1..207: note = Synthetic
  source 1..207: mol_type = other DNA
acggaaacaaaaattacattcgcgctcaagaaactaatcattgatagagaagtggtggctaacgttatcggactctctggagatagtgaacgcgtatcaatgactgaaaatgtagaagaagatctggttcgtaatctgggacttgtcgatattgatgatgaatatgatgaagatagcgataaagaaaagccaatattcaatgtataa

SEQ ID NO: 9998 - DNA, 171 bp, unidentified
  misc_feature 1..171: note = Synthetic
  source 1..171: mol_type = other DNA
atcattgatagagaagtggtggctaacgttatcggactctctggagatagtgaacgtgtatcaatgactgaaaatgtagaagaagatttggctcgtaatttgggacttgttgatatcgatgatgaatatgatgaagatagtgataaagaaaagccaatattcaatgtataa

SEQ ID NO: 9999 - DNA, 207 bp, unidentified
  misc_feature 1..207: note = Synthetic
  source 1..207: mol_type = other DNA
acggaaacaaaaattacattcgcactcaagaaactaatcattgatagagaagtggtggctaacgttatcggactctctggagatagtgaacgtgtatcaatgactgaaaatgtagaagaagatctggctcgtaatctgggacttgttgatattgatgatgaatatgatgaagatagcgataaagaaaagccaatattcaatgtataa

SEQ ID NO: 10000 - DNA, 207 bp, unidentified
  source 1..207: mol_type = other DNA
  misc_feature 1..207: note = Synthetic
acggaaacaaaaattacattcgcgctcaagaaactaatcattgatagagaagttgtggctaacgttatcggactctctggagatagtgaacgtgtatcaatgactgaaaatgtagaagaagatctggctcgtaatctgggacttgttgatattgaagatgaatatgatgaagatagcgataaagaaaagccaatattcaatgtataa

SEQ ID NO: 10001 - DNA, 219 bp, unidentified
  source 1..219: mol_type = other DNA
  misc_feature 1..219: note = Synthetic
atgaatgcacttagtccaggacctatcattgattaccacgtctggataggagattgtatctgtcaagttactgctgtggacgtacatggaaaggaaattatgagaatgagattcaaaaagggtgcggtgcttccgatcccaaatctggtaaaagttaaacttggggagaatgatacagaaaatctttcttctactatatcggcggcaccatcgaggtaa

SEQ ID NO: 10002 - DNA, 162 bp, unidentified; identical to SEQ ID NO: 162
  misc_feature 1..162: note = Synthetic
  source 1..162: mol_type = other DNA

SEQ ID NO: 10003 - DNA, 132 bp, unidentified; identical to SEQ ID NO: 164
  source 1..132: mol_type = other DNA
  misc_feature 1..132: note = Synthetic

SEQ ID NO: 10004 - DNA, 132 bp, unidentified; identical to SEQ ID NO: 164
  misc_feature 1..132: note = Synthetic
  source 1..132: mol_type = other DNA

SEQ ID NO: 10005 - DNA, 453 bp, unidentified
  source 1..453: mol_type = other DNA
  misc_feature 1..453: note = Synthetic
atgggtatacagcacgaattcgacatcattattaatggagatatcgcgttgagaaatttacagttacataaaggggataactacggatgcaaactaaaaattatttcgaatgattacaagaaattaaagtttagattcattatacgcccagattggtcggaaatcgacgaggtcaaaggattaaccgtatttgcaaacaactatgcggtgaaagttaataaggtagatgacacgttctattacgtaatatatgaggctgtaatacatctgtataacaaaaaaacagagatattgatttattctgatgatgagaacgaactctttaaacactattacccatacatcagtctaaatatgattagtaaaaagtataaagttaaagaagaaaactactcatccccgtatatagaacatccgttaatcccgtatagagattatgagtccatggattaa

SEQ ID NO: 10006 - DNA, 135 bp, unidentified
  misc_feature 1..135: note = Synthetic
  source 1..135: mol_type = other DNA
acgacgtcactgggctgtggttggagagtgatctcaccgcggatgaggaagcttttgtcagcttttatacaagccgtacgggcacactcactctcgtacccggtggcaccggaggctactatctgctatggataa

SEQ ID NO: 10007 - DNA, 2151 bp, unidentified
  source 1..2151: mol_type = other DNA
  misc_feature 1..2151: note = Synthetic
atggaagactttgtgcgacagtgcttcaatccaatgattgtcgagcttgcggaaaagacaatgaaggaatatggggaagacccgaaaattgaaacaaataagttcgctgcaatatgcacacacttagaagtctgcttcatgtattcagacttccatttcattgacgaacgaggcgaatcaataattgtggaatctggtgatccaaatgcattgttgaagcacaggtttgaaataattgaaggaagagaccgagcaatggcctggacagtggtgaatagcatctgcaacacaacaggagtcgataaacccaaatttcttccggatctatacgactacaaggaaaaccgattcactgaaattggtgtgacacggagggaagttcacatatattacttagaaaaagctaacaagataaaatccgagaaaacacatatccacatcttttcattcactggagaagaaatggccactaaagctgactacacccttgatgaagagagcagggcaagaataaaaaccagactattcaccataagacaggaaatggcaagcaggggtctatgggattcctttcgtcagtccgagagaggcgaagagacaattgaagaaagatttgaaatcacagggaccatgcgtaggcttgccgaccaaagtctcccacctaacttctccagccttgaaaactttagagcctatgtggatggattcaaaccgaacggctgcattgagggcaagctttctcaaatgtcgaaagaagtgaacgccagaattgagccatttctgaagacaacaccacgtcccctcagattgcctgatggacctccctgctcccagcggtcgaaattcttgctgatggatgctctgaaattaagcattgaggacccgagccatgagggggaggggataccgctatatgatgcgataaaatgcatgaaaacattcttcggctggagagagcccaacatcatcaagccacacgagaagggcataaatcccaattatcttctggcttggaagcaggtgctggcagaactccaggatattgaaaatgaggataaaatcccaaaaacaaagaacatgaagaaaacaagccaattaatgtgggcactcggggagaatatggcaccggaaaaattggactttgaggactgcaaagatattggcgatctgaaacagtatcaaagtgatgagccagagctcagatcgatagcaagctggatccagagtgagttcaacaaggcatgtgaattgaccgattcgagctggatagaactcgatgagataggggaagatgttgccccaattgagcacattgcaagcatgagaaggaactacttcacagcggaagtgtctcattgcagggccactgagtacataatgaagggggtttacataaatacagctttgctcaatgcatcttgtgcagccatggatgacttccaactgattccaatgataagcaaatgcagaacaaaagaaggaagaaggaagacaaacctgtatgggttcattataaaaggaaggtcccatttgagaaatgatactgacgtggtgaactttgtgagtatggaattctcccttactgacccaaggctggagccacacaaatgggaaaagtactgtgttcttgaagtaggggaaatgctcttgcggactgcaataggccaggtgtcaaggcccatgttcctgtatgtgagaactaacggaacctccaaaattaagatgaaatgggggatggaaatgagacgctgccttcttcaatctcttcaacagattgagagcatgatcgaggctgagtcttctatcaaagagaaagacatgaccaaagaattctttgaaaacagatcggagacatggccaattggagagtcacctaagggagtggaggaaggctcaatcgggaaggtgtgcagaaccttactagcaaaatctgtgttcaacagcctatattcatctccacaactcgaaggattttcagctgaatcgagaaaactactactcattgttcaagcacttagggacaacctggaacctggaacctttgatcttgaagggctatatggagcaattgaggagtgcctgattaatgatccctgggttttgcttaatgcatcttggttcaactccttcctcacacatgcactaaaatag

SEQ ID NO: 10008 - DNA, 3402 bp, unidentified
  source 1..3402: mol_type = other DNA
  misc_feature 1..3402: note = Synthetic
atgtggggtctactagctattgctgttttgatcagctcctgtttggccatcaaaaatgtatatgacatgaagatagagtgcccgcattctgttaacttcggagaaaccagtgtgtcaggccaggtagagttacctccactcccgattactgatgcagaacaattggtccctgagagttcttgtaacatggataaccaccaatctctcgctacaatcaataccctcacaaaggttatctggagaaaaaaatctgatcaagcatctgctaaccaaaattcatttgaggtagttgagtcagaagctagtttcaaaggattatgcatgctgaagcacaggatgatagaagaatcttacaaaaatagacggtcagtaatctgttatgatttatcttgtaattcgacattttgcaagccaacagtttatatggtagtcccagttcatgcctgtaacatgatgaaaagctgccttataggtctagggccttatagggttcaggttgtttatgaaaggacttattgcacagttgggatattaacagaaggaaagtgctttgttccagataaaacaatcttaagttcaaccaaaagaggaatgtttgttgtgactagtgtgcaggtaacatgcttttttatttttcaaaaaggtcatacttacaagatcctagaagaggcaaaaaaatcaattaacaataaatgcaatgacactgaaaacaaagtccaaggttattacatctgtatcttgggtggtaattctgctccagtttatgtcccttctttaaatgattttaggtcaatggagattttttcaaatatcctcctgtcccctttcggggaagatcatgacctccctggagaagaaatatctacttaccagattgcaggaccaactgaagccaagatacctcactctgttagttcaaaaaatcttgcactggtggcttattccggaaacccatcatattcatccattagtattgtcacctcatctcaaggtgggcggtttgtcttcagtcctggtttatttcctaacttgaaccaaacacattgtgaaaaaaatgctttaccagtggtttggagaggaatgattgacttgtcaggttactatgaagctgtccatccatgtaatgttttctgtgttctttcagggcctggtgcatcttgtgaagctttctcagaaggtgggatctttaacataacttccccaacttgcctcgtgtcaaagcaaaatcggtttaaatcagcagaacagcaaataaattttgtctgtcaacgggttgacatggatatcattgtatactgtaatggacaaaagaaaacaattctgactaaaacacttgttattggtcagtgtatctatactataacaagccttttttctttaatgccaggagtagcacattcaatcgcaatagaactctgtgtcccgggctttcatggatgggctacagctgcattgttgacaaccttttgttttggttggatcttaatccctactttgacatttgcagtccttgtggtcttaaagtttattgcaaatatactccacacaaactcgcaagaaaataggttcaagatgattttaagaaaaatcaaagatgaatttgagaagacaaagggttcaatggtttgtgaggtctgtaagtacgaatgtgaaacatcaaaagaactgaaagcgcataatctttcctgtccacaggctgaatgcccttattgttttacacattgtgaacctactgaagcaacctttcaagcacactataaaatatgtcaagcaactcatagatttagagaggatttaaaaaagacaatcacaccacaaacaatcggccctgggtgttaccgaacactcaatttgttcaggtataaaagtcgctgttatattctaaccatgtggctatttcttctgatagtagagtctgtaatgtgggctgcaagtgcagtagaaatcccattagtcccactctggacagacaatgcacatggtattggttcagtcccgatgcacactgatttagaactggatttttccctcccatcaagctcaaaatacacatacaagaggaagcttaccaatccaataaatgtcgaacagggagttcaggtacatattgagattgaagaacagggaataggtgctgatgttcacaatttgggtcattggtttgatgcccgattgaaccttaaaacctcattccattgttatggagcttgttcaaagtaccaatatccttggcatacagccaagtgccactttgaaaaagattatgaatatgaaaatagttgggcttgtaaccctgcagactgcccgggtgtggggacaggatgtacagcttgtggcctatacctcgatcagatgaaacctattggaacagcatataagctagtggcaatcagatatagtagaaaagtatgtgttcaatttggggaagagaatctatgtaaaacaattgatatgaatgattgcttcgttacaaggcatgtcaaagtctgtattattgggactgtgtctaaattcatccagggagacacactattatttctgggtccattggagggaggtggtttgattttcaaacactggtgcacatccacatgtcagtttggtgatccaggtgacattatgagtccaaaagataaaccctttttatgtcctgaatttccaggtcagtttagaaaaaaatgcaattttgccacaacacctgtgtgtgaatacagtggaaatcaaatttctggttataaaaaaatgatggcaactattgattcattccagtcatttaataccagcagtatacattttacagatgaacggattgaatggaaggatccagatggaatgcttcgtgaccatataaatatagttataactaaagatattgattttgaaaatcttgctgagaatccatgccagataggcctacaagtatcagccatagaaggagcctggggttctggtgtgggtttcacattgacatgtcaagtgtctcttacagagtgcccaacattcctaacatccataaaggcttgtgacatggctatctgttatggtgcagagagtgtgacactggttagagggcgaaatacagttaaaattagcggcaaaggtgggcatagtggctcttcctttaagcgttgtcatgggacagactgctctgctacagggctacaagcaactgcaccacaccttgatagggttgcaggtgtaagcgagcttagtaatgaaaaagtttatgatgatggtgctcctcaatgtgggattacatgtcggtttgtaaagtctggagagtgggttaagggtatttttaatggcaattggattgttctgattgttctatgtgtgttactcttaatctctctaattctcttaagtattttttgtcctgtccgtaaacacaaaaaatcataa

SEQ ID NO: 10009 - DNA, 141 bp, unidentified
  misc_feature 1..141: note = Synthetic
  source 1..141: mol_type = other DNA
ctgatgcagaacaattggtccctgagagttcttgtaacatggataaccaccaatctctcgctacaatcaataccctcacaaaggttatctggagaaaaaaatctgatcaagcatctgctaaccaaaattcatttgaggtag

SEQ ID NO: 10010 - DNA, 21 bp, unidentified
  misc_feature 1..21: note = Synthetic
  source 1..21: mol_type = other DNA
atgaagtttggggagatttaa

SEQ ID NO: 10011 - DNA, 72 bp, unidentified
  source 1..72: mol_type = other DNA
  misc_feature 1..72: note = Synthetic
atgtatagaatctgtaacactttcatcgtctcaatacccctcatgttctacaataattataaacttagttaa

SEQ ID NO: 10012 - DNA, 21 bp, unidentified
  misc_feature 1..21: note = Synthetic
  source 1..21: mol_type = other DNA
atgaatatcctggggtcgtaa

SEQ ID NO: 10013 - DNA, 162 bp, unidentified
  source 1..162: mol_type = other DNA
  misc_feature 1..162: note = Synthetic
atgtctggattatatcaaccatcacttacaagactgcggtgcgacatgcagcactgcaccagagatccttctctcgctggagtctcgatcactcactctagaaagatctccagttgggacaagtcccaatccatcattcgagaacaagccgcatttaaatga

SEQ ID NO: 10014 - DNA, 612 bp, unidentified
  source 1..612: mol_type = other DNA
  misc_feature 1..612: note = Synthetic
atggcgtggtcaattacaaataaagcggatactagtagcttcacaaagatggctgaaatcagagctcatctaaaaaatagcgctgaaaataaagataaaaacgaggatattttcccggaagatgtaataattccatctactaagcccaaaaccaaacgagccactactcctcgtaaaccagcggctactaaaagatcaaccaaaaaggaggaagtggaagaagaagtagttatagaggaatatcatcaaacaactgaaaaaaattctccatctcctggagtcagcgacattgtagaaagcgtggccgctgtagagctcgatgatagcgacggggatgatgaacctatggtacaagttgaagctggtaaagtaaatcatagtgctagaagcgatctctctgacctaaaggtggctaccgacaatatcgttaaagatcttaagaaaattattactagaatctctgcagtatcgacggttctagaggatgttcaagcagctggtatctctagacaatttacttctatgactaaagctattacaacactatctgatctagtcaccgagggaaaatctaaagttgttcgtaaaaaagttaaaacttgtaagaagtaa

SEQ ID NO: 10015 - DNA, 621 bp, unidentified
  misc_feature 1..621: note = Synthetic
  source 1..621: mol_type = other DNA
atggcgtggtcaattacgaataaagcggatactagtagtttcacaaagatggctgaaatcagagcccatctaagaaatagcgctgaaaataaagataaaaacgaggatattttcccggaagatgtaataattccgtctactaagcccaaaaccaaacgagccgctgctcctcgtaaaccagcggctactaaaagatcaaccaaaaaggaagaagtggaagaagaagtagttgtagaagaatatcatcaaacaactgaagaaaattcgccacctccgtcatcatctcctggagttggtgacattgtagaaagcgtggccgctgtagagctcgacgatagcgacggggatgatgaacctatggcacaagctggagctaaagtaaatcatagtgctagaagcgatgtctctgacctaaaggtggccactgacaatatcgttaaagatcttaagaaaattattactagaatcgctgcagtatcgactgttctagaggatgttcaagcagctggtatctctagacaatttacttctatgactaaagctattacaacactatctgatctagtcaccgagggaaaatctaaagttgttcgtaaaaaagttaaaacttgtaagaagtaa

SEQ ID NO: 10016 - DNA, 642 bp, unidentified
  source 1..642: mol_type = other DNA
  misc_feature 1..642: note = Synthetic
atggcgtggtcaattacgaataaagcggatactagtagtttcacaaagatggctgaaatcagagctcatctaagaaatagcgctgaaaataaagataaaaacgaggatattttcccggaagatgtaataattccatctactaagcccaaaaccaaacgaaccactactcctcgtaaaccagcggctactaaaagatcaaccaaaaaggataaagaaaaggaggaagtggaagaagtagaagaagtagttatagaggaatatcatcaaacaactgaagaaaattctccacctccgtcatcatctcctggagtcggcgacattgtagaaagcgtggccgctgtagagctcgatgatagcgacggggatgatgaacctatggtacaagttgaagctggtaaagtaaatcatagtgctagaagcgatctctctgacctaaaggtggctaccgacaatatcgttaaagatcttaagaaaattattactagaatctctgcagtatcgactgttctagaggatgttcaagcagctggtatctctagacaatttacttctatgactaaagctattacaacactatctgatctagtcaccgagggaaaatctaaagttgttcgtaaaaaagttaaaacttgtaagaagtaa

SEQ ID NO: 10017 - DNA, 666 bp, unidentified
  misc_feature 1..666: note = Synthetic
  source 1..666: mol_type = other DNA
atggcgtggtcaattacgaataaagcggatactagtagtttcacaaagatggctgaaattagagctcatctaagaaatagcgctgaaaataaagataaaaacgatgatattttcccggaagatgtaataattccatctactaagcccaaaaccaaacgagccactactcctcgtaaaccagcggctactaaacgatcaaccaaaaaggataaagaaaaggaggaagtggaagaagaagaagtagttatagaggaatatcatcaaacaactgaagaaaattctccacctccgtcatcatctcctggagtcggcaacattgtagaaagcgtgaccgctgtagagcttgatgatagcaacggggatgatgataatgataatgataatgacgataatgaacctatggtacaagttgaagctggtaaagtaaatcatagtgctagaagcgatctctctgacctaaaggtggctaccgacaatattgttaaagatcttaagaaaattattactagaatctctgcagtatcgactgttctagaggatgttcaagcagctggtatctctagacaatttacttctatgactaaatctattacaacactatctgatctagtcaccgagggaaaatctaaagttgttcgtaaaaaagttaaaacttgtaagaagtaa

SEQ ID NO: 10018 - DNA, 15 bp, unidentified
  misc_feature 1..15: note = Synthetic
  source 1..15: mol_type = other DNA
ctgggaccactatga

SEQ ID NO: 10019 - DNA, 18 bp, unidentified
  source 1..18: mol_type = other DNA
  misc_feature 1..18: note = Synthetic
atgaaaactgggcaataa

SEQ ID NO: 10020 - DNA, 225 bp, unidentified
  misc_feature 1..225: note = Synthetic
  source 1..225: mol_type = other DNA
atgcagatgccctccacccagacctccaaaccaccccaattgtcacagacaccagtatcagcagcagtggtggtgaaagctctgaagaactcagtgaaagcagcttttttaacctcatcaccccaggcgcctggaacactgaaaccccgcgctctagtacgcccatccccgggaccagttcaggagaatcatttgtcggaagcccagtttcctccgaagttgtag

SEQ ID NO: 10021 - DNA, 531 bp, unidentified
  source 1..531: mol_type = other DNA
  misc_feature 1..531: note = Synthetic
atgctgtcggtgatggtctcttcctctctggtcctgatcgtcttttttctaggcgcttccgaggaggcgaagccggcaacgacgacgacgataaagaatacaaagccgcagtgtcgtccagaggattacgcgaccagattgcaagatctccgcgtcacctttcatcgagtaaaacctacgttgcaacgtgaggacgactactccgtgtggctcgacggtacggtggtcaaaggctgttggggatgcagcgtcatggactggttgttgaggcggtatctggagatcgtgttccccgcaggcgaccacgtctatcctggacttaagacggaattgcatagtatgcgctcgacgctagaatccatctacaaagacatgcggcaatgccctctgttaggttgcggagataagtccgtgattagtcggctgtctcaggaggcggaaaggaaatcggataacggcacgcggaaaggtctcagcgagttggacacgttgtttagccgtctcgaagagtatctgcactcgagaaagtag

SEQ ID NO: 10022 - DNA, 33 bp, unidentified; identical to SEQ ID NO: 199
  source 1..33: mol_type = other DNA
  misc_feature 1..33: note = Synthetic

SEQ ID NO: 10023 - DNA, 39 bp, unidentified; identical to SEQ ID NO: 200
  source 1..39: mol_type = other DNA
  misc_feature 1..39: note = Synthetic

SEQ ID NO: 10024 - DNA, 111 bp, unidentified
  misc_feature 1..111: note = Synthetic
  source 1..111: mol_type = other DNA
ctggttcgattgaccgtcctcgcggatcacagcgccattagacagctggaggaactccttctgcgatctttgaacatcgtgtgcccactgtgcaccctacagcgacagtaa

SEQ ID NO: 10025 - DNA, 141 bp, unidentified; identical to SEQ ID NO: 203
  source 1..141: mol_type = other DNA
  misc_feature 1..141: note = Synthetic

SEQ ID NO: 10026 - DNA, 2217 bp, unidentified
  source 1..2217: mol_type = other DNA
  misc_feature 1..2217: note = Synthetic
atgcttcacatctcgcgactcggcctttttctggcccttttcgcgatagtcatgcactccgttaatctaataaaatacacatctgatcccttagaagctttcaaaaccgtcaaccgccacaattggagcgacgaacaaagagaacatttttacgacctccgaaacttgtatacaactttttgtcagagaaatctatccctcgactgcttcactcaaattttaactaacgttttctcttggaacattcgagatttacaatgcaagtctgcggttaacttgtctccattacagaatttaccgcgggcagaaaccaaaatagtgctatcctcaacagctgcaaacaaatctatcgtcgctagcagtttttctctattttatcttctgtttgccacactatctacatataccgcagatccaccatgcgtagagctactaccgtttaaaattctgggaacacagttatttgacataaaactgaccgacgaatccttgcagatggcaatcagtaaattttccaactcgaatctgacacggtcattgactccgttcactcctgaaatcttctttaattacaccagctttgtttacttcttgctctataacacaacatcatgcatccgttcaaatgatcaatatttcgaacattcgccaaaacctataaatgttaccacttcctttggacgagccatcgtaaactttcattcgatactgactacgacgccatcatcgacgccatcatcgacgtcagcgtctatcacatcaccacatatccctagtaccaacacaccaaccccagaaccttcccccgtaacaaaaaactttacagaattgcagacagacaccataaaagttacaccgaacacacccaccataacagcgcaaacaacggaaagcatcaaaaaagtagttaaacgttcagattttcctcgaccgatgtacaccccgactgacattccaactcttacaatccgtcgtaacgccactattaaaaccgaacaaaacaccgaaaaccctaccgaaaacccaaaaagtccaccaaaaccaacaaattttgaaaataccacaatcagaattcccgaaacgtttgagagcactacagtggcaacaaacacgactcaaaagctcgaaagcaccaccttcgcaacaacaataggaatcgaggaaattagcgacaatatctattcttcaccaaaaaactctatttatcttaagagcaaatcacagcagagcacgacaaaattcaccgacaccgaacacaccactccgattttaaagtttaccacttggcaagacgcggcgcgcacatacatgagccacaacacggaagtacaaaacatgaccgaaaattttattaaaatttctcttggagaaacgatgggaatcacgcctaaagaacccacaaatcctacccaacttctcaacgtaaaaaaccaaacagaatacgcaaacgaaacccatagcacagaagtgcagaccgtcaaaaccttcaaagaggacagattccagaggacaactttgaaatcctcaagcgagccacctaccgttcagacgttgtctgtcactccaaaaaaaaaactaccgtcaaatgtaactgccaaaactgaagtacaggtaactaacaatgctttaccatctagtaattcatcacactcaatcactaaagtcaccgaagaaccaaagcaaaatagaatgtcggcgtccactcacggagagatcaaccacacagaaataccacgaatgacaccaattcttaacgctcacacatgggaaaaatcgactacacctcaatggcccttcaccgctgaaacgtccttaacgacatcttcaaagtctgccattctaacctggtcaaacttactaacaacgccaaaggaaccattaacgaatacaagtctaaggtcgacaaatcatatcacaacacagctaacgactagcaacagaactcaatcagccaaactaacaaaagctcacgtctcgtcacaaacgactaacatctacccccaaacaatcacggaacgatctacggacgttaaaaaaaaaagttccacagaaagtcgggaagctaacaaaactctgcctggaaacgactaccgcgtcaccgataaaaactcacacaaccatccagataacctcactaccaaagcatactcaacccaaaatgcaacgcattacacatacaacgaacgacacgatttaaacaacacagatagcacataa

SEQ ID NO: 10027 - DNA, 21 bp, unidentified
  source 1..21: mol_type = other DNA
  misc_feature 1..21: note = Synthetic
atggcgttcaatctacaatag

SEQ ID NO: 10028 - DNA, 1656 bp, unidentified
  misc_feature 1..1656: note = Synthetic
  source 1..1656: mol_type = other DNA
gtgggaaataaaatttgcatgtcacgaggcagaagctggtcagacgcgtactccatgttgggttccacggggaggggaacacacgccccaagacacgacggcgcacatagggagcggagcaaacaattgattcaaatatttgactccgcagcgagccggtttgcagagtggtcacctgccctgctccacacccacccccgcgtctcttccaactctcaactcacgatccagggaaaccaccgtccagtggccatgtttgttccctggcaactcggtacaattacccgtcaccgagatgagctccaaaaactactggcagcctccctgctcccggagcacccggaggagagcctcggtaaccccataatgacacagattcaccagtcgctccaaccatcttccccctgcagggtctgtcagctcctattttctctggtccgcgattcgtccacccccatgggtttcttcgaggactatgcctgcctctgcttcttctgtctatacgccccacactgctggacctcgaccatggcggcagcggcagacctgtgcgagatcatgcatctgcactttccagaagaggaggcgacatacgggctattcggaccgggtcgccttatgggtatcgacttgcagctgcacttctttgttcaaaagtgctttaagaccaccgccgccgaaaaaatactgggaatatccaacctgcaatttttaaaatcagaattcatccggggcatgctcacaggcaccatcacctgcaacttctgcttcaaaacgtcctggcccaggacagacaaggaggaggccaccggccccaccccatgctgccagattacagacaccaccaccgcacccgcgagcggcataccggaactagcccgggccacattctgcggcgcaagtcgccccacaaagcccagcctacttcccgcgctaatagatatctggtccacgagctcagagctccttgacgagccgcgccctcgactgatcgcaagcgacatgagtgaactcaaatccgtggtcgcatcccacgatccgttcttctctcccccgcttcaggcagacacctcacagggtccatgtctgatgcacccaaccctggggctacgatacaaaaacgggactgcatccgtctgcctcctctgcgagtgccttgcggcacacccagaggcacccaaggcgctgcagacccttcagtgcgaggtaatgggccatatagaaaacaacgtaaagctggtagacagaattgcctttgtgttggacaacccattcgccatgccatatgtctcagatccgctacttagagagctgatccggggctgtaccccacaggaaattcacaagcacctgttctgcgacccgctgtgcgccctcaatgctaaggtggtgtcagaggacgtactattccgcctgcccagggagcaggagtataaaaagctcagggcatccgcggccgccggacagctcctcgatgccaacaccctgttcgactgcgaggtcgtgcagactttggtctttctctttaagggtctccaaaacgccagggtggggaaaaccacctcactagacattattcgggagctaaccgcacaactaaaaagacaccgcctagacctggcccacccctcacagacgtcacacttgtacgcttga

SEQ ID NO: 10029 - DNA, 48 bp, unidentified; identical to SEQ ID NO: 208
  misc_feature 1..48: note = Synthetic
  source 1..48: mol_type = other DNA

SEQ ID NO: 10030 - DNA, 21 bp, unidentified
  source 1..21: mol_type = other DNA
  misc_feature 1..21: note = Synthetic
atgtccaggctgaaagcataa

SEQ ID NO: 10031 - DNA, 102 bp, unidentified; identical to SEQ ID NO: 210
  source 1..102: mol_type = other DNA
  misc_feature 1..102: note = Synthetic

SEQ ID NO: 10032 - DNA, 18 bp, unidentified
  misc_feature 1..18: note = Synthetic
  source 1..18: mol_type = other DNA
ataaagtcaccattctag

SEQ ID NO: 10033 - DNA, 1413 bp, unidentified
  source 1..1413: mol_type = other DNA
  misc_feature 1..1413: note = Synthetic
atgttctacttaaaaaaactcctacgccagcttctggccccgttgtgtaaacatgggccgtacactcatttgcaattgtttgtgatgggtgacgcctgtgtgccaggaaaatgtgttcttacaatgttcttgacaaataaaaaattcctgaataaggaagtaacggaaaaattttacaatgagttttttgcaatttggctgcgttgcaggccggagacacgatttatcactaagcgactttttaacaaaatggttatgacaaagggtctttttgttttgctcgcctatctgtatttcgtgtatcggcagtgcaaagttctcgaattgttgtctctttataaacttaaaagaatcaaatggatggacgtcgagactagatttagggtttatccctcgtacaagcttaataagttgctggagatgccctcgttttccgaaatcaatgagttgcacatgtttctgttcgagcaacagttgttgcttccgattccgacgcacgtcaacttaccgtgtatgaggctattctgtttacgtgactatgagcagaccgagacggtgatgttgcgatataggcagagagagcacgttttgtcatttccctccatgttgcaaaagtatgctttgaaatctccggcggggaatttcatgtttactatggcgaaggctttggtggaaaacttctgttttagcgcagacagatatcttattccagtggagcataataatctagtacctatggtgccgagcaaacctgaacggggtgattttccaaagattctaacctttgccctggcaacgtccttaaaggatggcttagctaccagtgttatttcgttacccgtcatgtgctattgtaagactaaatgttctcggtttatacttgaagagagttacatttgcgttatttgtgcaaaatgtggtcactgtttaaactccggaaaagaaaagttgtgttcgccgcagggcttttcgttgagctccatgttctattttagagacaagcaggagaaaaatttgatatacagcatgcatacggatgtaatgtattgttcgctgtgtgggagtcagcagttggtgttcgagcggatatatgaaatgtctgagcattgtgtattggggatgaaggtggaaactgtttcatggaaggcggtgatcggaacaaattctgcttgcactattttaaatgacaatgtgaagttcgatgttattgttccttgttcgtgtagatcctgttattctactgtgcatctctacaacgtgaccgtcaagaagttgttacggcttgtttcacacggttctgattttcagtgtcagcattgtcagcattcgtttagagagacttgcttagatctggaagactgtgttaatatctgtcaaggttgtcagatttcccaaaacgtgaggtgtatttga

SEQ ID NO: 10034 - DNA, 45 bp, unidentified; identical to SEQ ID NO: 213
  misc_feature 1..45: note = Synthetic
  source 1..45: mol_type = other DNA

SEQ ID NO: 10035 - DNA, 114 bp, unidentified
  source 1..114: mol_type = other DNA
  misc_feature 1..114: note = Synthetic
atgattatgctctatatattgatctttttgactatcctcactctgcagctatcttggcagagagtgttcagatgcatatggatagatattttaaatatagggataaacttgtag

SEQ ID NO: 10036 - DNA, 393 bp, unidentified
  misc_feature 1..393: note = Synthetic
  source 1..393: mol_type = other DNA
atgcttcagcgacgcggtgtaagctaccacattgtggtccctggggtcctagtgacttatttagaggacttttctattacgcaaatgattaaagaaaaactaccacgctttatcactcacattttggaaggcatcaccggagacacaaagagagcttattccagcatgcagtttttgggtgctagctttggagcattaaagttttcccttacgcttgccagtcccacgcttagccctggctctgaattgtcagctgtagtggcccaggacttaagtgactttttgcagctgacattgaggcgcgagctcagggcggagggcagaaccttattgaatcttgttgttttgaacacgctgcaggtggtggagcagcaggatctgtttctattatga

SEQ ID NO: 10037 - DNA, 393 bp, unidentified
  misc_feature 1..393: note = Synthetic
  source 1..393: mol_type = other DNA
atgcttcagcgacgcggtgtaagctaccacattgtggtccctggggtcctagtgacgtatttacaggatttttctattactaaaatgattaaagaaaaactacctggctttatcacttacattttggaaggcattaccggagacacaaagagagcttattccagcatgcagtttttaggtgctagctttggagcattaaagtactccctcacgcttgccagtcccacgcttagccctggctctgaattgtcagctgtagtggcccaggacttaagtgactttttgcagctgacacttagacgccagctaagggctgagggcagaaccttattaaattttgttgttttaaacacgctgcaggtggtggagcagcaggatctgtttctattatga

SEQ ID NO: 10038 - DNA, 1032 bp, unidentified
  source 1..1032: mol_type = other DNA
  misc_feature 1..1032: note = Synthetic
atgagcgagccagagaatgggaagcgcagactactcaaacagcttcgcatcaagcgcatcccgccattgagtataggcgatcagcagatcacatttataaatacatatggatttatccgtgcgaatcgcaccttcactgagttcatctctgaattgcaccgcccaggattgcagcccatagttactgcctgcatgttgccattcggtgccggaccattgctggacagcccagagaaaatcctggaagggttagatctgtgtgaaatcaaagtacggaaaagtgccgcagttaaggaagagattttattcgaagttacggcactgccaaaaatattccaagggttccagattagtgcacagccactgattaaggtctcctcagagaagtatgttaaagcaccaggaaagatcaatgcaggtgttgaatacaagttctatccaaccttcgtatcacttacctactgtcctaccacactcaaaattcaaggtcgccagactctggccactgtgcgggcaaagttcatgaggagtatccacctagagatcttgctcatcttcgaatgcaaggatgatgcgcccatggccaaagcgctgatcaagagagacgagagggatgggtaccaggcctctgtttgggtgcatatgtgcaacataaccaaaagtacacagaaattcaagacatatgatgattcctattttggtcaaaaggtattagccatgaagcctgtaattgggctcgtagatatgtggggaccgactatcaccgtacacatctcagggaagatgccgaagactgctgcaccctacttcaatagtagagggaggtcttgccatcctctctcagaggtagcacccagcatagccaagatggcatggtctaacggatgccgaatccatcaagttaatgcgatcctccaggaatctgacttatccctcattccgggtagtgatgacatcctatttaggaaagtccctgtggaccctgagaatattaactttaaatcaacctactggaaccctttccgtaagtag

SEQ ID NO: 10039 - DNA, 96 bp, unidentified; identical to SEQ ID NO: 223
  source 1..96: mol_type = other DNA
  misc_feature 1..96: note = Synthetic

SEQ ID NO: 10040 - DNA, 408 bp, unidentified
  misc_feature 1..408: note = Synthetic
  source 1..408: mol_type = other DNA
atgactgaaacactcaccacctccaattccgccgaggatctgctcgatatggacggccgcgtctcagaacagcgactcgcccaactacgcatccgccagcagcaggaacgcgcggccaaagagctcagagatgtcatccaaattcaccaatgcaaaaaaggcatattctgtttggtaaaacaagccaagatatcctacgagatcaccgctactgaccatcgcctctcttacgaacttggcccccaacgacaaaaatttacctgcatggtgggaatcaaccccatagttatcacccagcaaagtggagatactaagggttgcattcactgctcctgcgattccatcgagtgcacctacaccctgctgaagaccctatacggcctaagagacctgctaccaatgaattaa

SEQ ID NO: 10041 - DNA, 102 bp, unidentified; identical to SEQ ID NO: 228
  source 1..102: mol_type = other DNA
  misc_feature 1..102: note = Synthetic

SEQ ID NO: 10042 - DNA, 1134 bp, unidentified
  misc_feature 1..1134: note = Synthetic
  source 1..1134: mol_type = other DNA
atgggggcagccgttactcttaatagaatcaacatagcatcaggaatagcagatatacgagacaaatatatggaattaggttttaattatcctaaatataatagaactgttaagtttgccgaagaaagttatatgtattattatgaaacgtctccaggagaaattaaacccaaattttgtttgatagatggtatgtcgatagatcattgtagtagttttatagttcctgagtttgctaaacaatatgtattaattcatggagaaccatgtagttctttcaaatttcgtcctggaacattaatctattatcagaacgaggtaactcctgaatatattaaggatttaaaacacgctactgattatatagcatccgggcaacgatgtcattttataaaaaaggattatctcctgggagatagtgatagcgtagcaaaatgttgttcaaagacaaataccaaacactgtccaaaaatatttaataataattacaagacagaacattgtgacgattttatgactggattttgtagaaacgatcctggaaaccccaattgtttagaatggttacgtgtaaaacggaaaccggctatgtctacttattccgatatttgctccaaacatatggatgcgagatattgttctgagtttattagaattattcgtcctgattattttacttttggggatacggcattatacgtcttttgtaacgatcataaaggaaatagaaattgttggtgtgcgaattatccaaaatctaattccggagataaatatttaggacctagggtatgttggttacatgagtgcactgacgaatctagagatagaaaatggttatattataatcaagatgttcaaagaactagatgtaaatacgttgggtgtacgattaacgttaactctttagcgttaaaaaattcccaagcggaacttacgtctaattgtactagaactacgtctacagttggtgacatacatccaggagaacctgtagtaaaagataaaataaaactgcctacctggttgggtgcggccataacactggttgtaatatctgttattttctattttatatctatttattcgcgtcctaaaattaaaacaaatgatataaatgttcgtagacgatga

SEQ ID NO: 10043 - DNA, 1134 bp, unidentified
  source 1..1134: mol_type = other DNA
  misc_feature 1..1134: note = Synthetic
atgggggcagccgttactcttaatagaatcaagatagctccaggaatagcagatatacgagacaaatatatggaattaggttttaattatcctgaatataatagagctgttaagtttgctgaagaaagttatatgtattattatgaaacgtctccaggagaaattaaacccaaattttgtttgatagatggtatgtcgatagatcattgtagtagttttatagttcctgaatttgctaaacaatatgtattaattcgtggagaaccatgtagttctttcaaatttcgtcctggatcattaatctattatcagaacgaggtaactcctgaatatattaaggatttaaaacacgctactgattatatagcatccgggcaacgatgtcattttataaaaaaggattatctcctgggcgatagtgatagcgtggcaaaatgttgttctaagacaaataccaaacactgtccaaaaatatttaataataattacaagaccgaacattgtgacgattttatgactggattttgcagaaacgatcctggaaaccccaattgtttagaatggttacgagcaaaacgaaaaccggctatgtctacttattccgatatttgttccaaacatatggatgagagatattgttccgagtttattagaattattcgccctgattattttacttttggggatacggcattatacgtcttttgtaacgatcataaaggaaatagaaattgttggtgtgcgaattatccaaaatctaattccggagataaatatttaggacctagggtatgttggttacatgagtgcaccgacgaatctagagatagaaaatggttatattataatcaagatgttcaaagaactagatgtaaatacgttgggtgtacgattaatgttaactctttagcgttaaaaaattcccaagcagaacttacgtctaattgtactagaactacgtccgccgttggtgacgtacatccaggagaacctatagtaaaagataaaataaaactgcctacctggttgggcgcggccataacactggttgtaatatctgttattttctattttatatctatttattcacgtcctaaaattaaaacaaatgatataaatgttcgtagacgataa

SEQ ID NO: 10044 - DNA, 1134 bp, unidentified
  source 1..1134: mol_type = other DNA
  misc_feature 1..1134: note = Synthetic
atgggggcagctgttactcttaatagaatcaaaatagcaccaggaatagcagatatacgagacaaatatatggaattaggttttaattatcctgaatataatagagctgttaagtttgcagaagaaagttatacgtactattatgaaacatctccgggagaaattaaacccaagttttgtttgatagatggtatgtcgatagatcattgtagtagttttatagttcctgaatttgctaaacaatatgtattaattcatggagaaccatgtagttctttcaaatttcgtcctggatcattaatctattatcagaacgaggtaactcctgaatatattaaggatttaaaacacgctactgattatatagcatccgggcaacgatgtcattttataaaaaaggattatctcctgggcgatagtgatagcgtggcaaaatgttgttctaagacaaataccaaacactgtccaaaaatatttaataataattacaagacagaacattgtgacgatttcatgactggattttgtagaaacgatcctggaaaccccaattgtttagaatggttacgtgcaaaacggaaaccggctatgtctacttattccgatatttgctccaaacatatggatgcgagatattgttctgagtttattagaattattcgtcctgattattttacttttggggatacggcattatacgtcttttgtaacgatcataaaggaaatagaaattgttggtgcgcgaattatccaaaatctaattccggagataaatatttaggacctagggtatgttggttacatgagtgcaccgacgaatctagagatagaaaatggttatattataatcaagatgttcaaagaactagatgtaaatacgttgggtgcacgattaacgttaactctttagcgttaaaaaattcccaagcggaacttacgtctaattgtactagaactacgtccgccgttggtgacgtacatccaggagaacctgtagtaaaagataaaataaaactgcctacctggttgggcgcggccataacactggttgtaatatctgttattttctattttatatctatttattcgcgtcctaaaattaaaacaaatgatataaatgttcgtagacgataa

SEQ ID NO: 10045 - DNA, 3726 bp, unidentified
  source 1..3726: mol_type = other DNA
  misc_feature 1..3726: note = Synthetic
atgttcccataccctacacttaactacccgcctatggcgccgattaacccgatggcttaccgggatcctaatccgcctaggcgcaggtggcggccctttaggccaccacttgcagctcaaattgaggacctgagacgttccatcgctaacctgactttgaaacaacgagcacctaaccctccagcaggaccgcccgccaaacgcaagaagcctgcgccaagcctaagcctgcgcaggaaaaagaagcgaccaccaccacctgccaagaaacaaaaacgtaaacctaaaccaggcaaacgacagcgaatgtgtatgaagctagagtcagataaaacgtttccaatcatgttgaacggacaggtgaatggttacgcgtgcgtcgtgggtggacgagtgttcaaaccgctgcacgtagaaggcagaatagacaatgagcaactggccgccatcaagctgaagaaggccagcatatatgaccttgagtatggtgatgtgccacaatgcatgaaatcagataccctccagtacaccagtgacaagcctcctggcttttataactggcaccatggagctgtacagtatgagaacaataggttcaccgtaccacggggggtcggtggaaagggtgacagcgggagacctattcttgacaacaaaggtagagtcgtcgcaattgtcctgggtggagtcaacgaaggatccaggacggctctatcagtggtgacatggaaccaaaaaggggttacagtcaaagatacaccagaggggtcagagccatggtcgcttgccactgtcatgtgcgtcctggccaatatcacgtttccatgtgatcaaccaccctgcatgccatgctgttatgaaaagaatccacacgaaacactcaccatgttggaacagaattacgacagccgagcctatgatcagctgctcgatgccgctgtgaaatgtaatgctaggagaaccaggagagatttggacactcatttcacccagtataagctggcacgcccgtatattgctgattgccctaactgtgggcatagtcggtgcgacagccctatagctatagaagaagtcagaggggatgcgcacgcaggagtcatccgcatccagacatcagctatgttcggtctgaagacggatggagttgatttggcctacatgagtttcatgaacggcaaaacgcagaaatcaataaagatcgacaacctgcatgtgcgcacctcagccccttgttccctcgtgtcgcaccacggctattacatcctggctcaatgcccaccaggggacacggttacagttgggtttcacgacgggcctaaccgccatacgtgcacagttgcccataaggtagaattcaggccagtgggtagagagaaataccgtcacccacctgaacatggagttgaattaccatgcaaccgttacacccacaagcgtgcagaccaaggacactacgttgagatgcatcaacccgggctagttgccgaccactctctccttagcatccacagtgccaaggtgaaaattacggtaccgagcggcgcccaagtgaaatactactgcaagtgcccagacgtacgagagggaactaccagcagcgactatacaaccacctgcacggatgtcaaacaatgcagggcttacctgattgacaacaaaaaatgggtgtacaactctggaagactgcctcgaggagagggcgacacttttaaaggaaaacttcatgtgccctttgtgcctgttaaggccaagtgcatcgccacgctggcaccagagcctctagttgagcacaaacaccgcaccctgattttacacctgtacccggaccacccgaccttgctgacgaccaggtcacttggaagtgatgcaaatccaactcgacaatggattgagcgaccaacaactgtcaatttcacagtcaccggagaagggttggagtatacctggggaaaccatccaccaaaaagagtatgggctcaagagtcaggagaagggaatccacatggatggccgcacgaagtggtagtctattactacaacagatacccattaaccacaattatcgggttatgcacctgtgtggctatcatcatggtctcttgtgtcacatccgtgtggctcctttgcaggactcgcaatctttgcataaccccgtataaactagccccgaacgctcaagtcccaatactcctggcgttactttgctgcattaagccgacgagggcagatgacaccttgcaagtgctgaattacctgtggaacaacaatcaaaactttttctggatgcagacgcttatcccacttgcagcgcttattgtatgcatgcgcatgctgcgctgcttattttgctgtgggccggcttttttacttgtctgcggcgccttgggcgccgcagcgtacgaacacacagcagtgatgccgaacaaggtggggatcccgtacaaagctttagtcgaacgcccaggttatgcacccgttcacctacagatacagctggttaataccaggataattccatcaactaacctggagtacatcacctgcaagtataagacaaaagtgccttctccagtagtgaaatgctgcggtgccactcaatgtacctccaaaccccatcctgactatcagtgtcaggtgtttacaggtgtttacccattcatgtggggaggagcctactgcttctgcgacactgaaaacacccagatgagcgaggcgtatgtagagcgctcggaagagtgctctattgaccacgcaaaagcttataaagtacacacaggcactgttcaggcaatggtgaacataacttatgggagcgtcagctggagatctgcagatgtttacgtcaatggtgaaactcccgcgaaaataggagatgccaaactcatcataggtccactgtcatctgcgtggtccccattcgataacaaggtggtggttcatgggcatgaagtgtataattacgactttcctgagtacggcaccggcaaagcaggctcttttggagacctgcaatcacgcacatcaaccagcaacgatctgtacgcaaacaccaacttgaagctacaacgaccccaggctggtatcgtgcacacacctttcacccaggcgccctccggcttcgaacgatggaaaagggacaaaggggcaccgttgaacgacgtagccccgtttggctgttcgattgccctggagccgctccgtgcagaaaattgtgcagtgggaagcatccctatatctatagatatacccgatgcggcttttaccagaatatctgaaacaccgacagtctcagacctggaatgcaaaattacggagtgtacttatgcctccgatttcggtggtatagccaccgttgcctacaaatccagtaaagcaggaaactgtccaattcattctccatcaggtgttgcagttattaaagagaatgacgtcactcttgctgagagcggatcatttacattccacttctccactgcaaacatccatcctgcttttaagctgcaggtctgcactagtgcagttacctgcaaaggagattgtaagccaccgaaagaccacatcgtcgattatccagcacaacatactgaatcctttacgtcggcgatatccgccactgcgtggtcgtggctaaaagtgctggtaggaggaacatcagcatttatcgttctggggcttattgctacagcagtggttgccctagttctgttcttccatagacattaa

SEQ ID NO: 10046 - DNA, 2505 bp, unidentified
  source 1..2505: mol_type = other DNA
  misc_feature 1..2505: note = Synthetic
atgttcccataccctacacttaactacccgcctatggcgccgattaacccgatggcttaccgggatcctaatccgcctaggcgcaggtggcggccctttaggccaccacttgcagctcaaattgaggacctgagacgttccatcgctaacctgactttgaaacaacgagcacctaaccctccagcaggaccgcccgccaaacgcaagaagcctgcgccaagcctaagcctgcgcaggaaaaagaagcgaccaccaccacctgccaagaaacaaaaacgtaaacctaaaccaggcaaacgacagcgaatgtgtatgaagctagagtcagataaaacgtttccaatcatgttgaacggacaggtgaatggttacgcgtgcgtcgtgggtggacgagtgttcaaaccgctgcacgtagaaggcagaatagacaatgagcaactggccgccatcaagctgaagaaggccagcatatatgaccttgagtatggtgatgtgccacaatgcatgaaatcagataccctccagtacaccagtgacaagcctcctggcttttataactggcaccatggagctgtacagtatgagaacaataggttcaccgtaccacggggggtcggtggaaagggtgacagcgggagacctattcttgacaacaaaggtagagtcgtcgcaattgtcctgggtggagtcaacgaaggatccaggacggctctatcagtggtgacatggaaccaaaaaggggttacagtcaaagatacaccagaggggtcagagccatggtcgcttgccactgtcatgtgcgtcctggccaatatcacgtttccatgtgatcaaccaccctgcatgccatgctgttatgaaaagaatccacacgaaacactcaccatgttggaacagaattacgacagccgagcctatgatcagctgctcgatgccgctgtgaaatgtaatgctaggagaaccaggagagatttggacactcatttcacccagtataagctggcacgcccgtatattgctgattgccctaactgtgggcatagtcggtgcgacagccctatagctatagaagaagtcagaggggatgcgcacgcaggagtcatccgcatccagacatcagctatgttcggtctgaagacggatggagttgatttggcctacatgagtttcatgaacggcaaaacgcagaaatcaataaagatcgacaacctgcatgtgcgcacctcagccccttgttccctcgtgtcgcaccacggctattacatcctggctcaatgcccaccaggggacacggttacagttgggtttcacgacgggcctaaccgccatacgtgcacagttgcccataaggtagaattcaggccagtgggtagagagaaataccgtcacccacctgaacatggagttgaattaccatgcaaccgttacacccacaagcgtgcagaccaaggacactacgttgagatgcatcaacccgggctagttgccgaccactctctccttagcatccacagtgccaaggtgaaaattacggtaccgagcggcgcccaagtgaaatactactgcaagtgcccagacgtacgagagggaactaccagcagcgactatacaaccacctgcacggatgtcaaacaatgcagggcttacctgattgacaacaaaaaatgggtgtacaactctggaagactgcctcgaggagagggcgacacttttaaaggaaaacttcatgtgccctttgtgcctgttaaggccaagtgcatcgccacgctggcaccagagcctctagttgagcacaaacaccgcaccctgattttacacctgtacccggaccacccgaccttgctgacgaccaggtcacttggaagtgatgcaaatccaactcgacaatggattgagcgaccaacaactgtcaatttcacagtcaccggagaagggttggagtatacctggggaaaccatccaccaaaaagagtatgggctcaagagtcaggagaagggaatccacatggatggccgcacgaagtggtagtctattactacaacagatacccattaaccacaattatcgggttatgcacctgtgtggctatcatcatggtctcttgtgtcacatccgtgtggctcctttgcaggactcgcaatctttgcataaccccgtataaactagccccgaacgctcaagtcccaatactcctggcgttactttgctgcattaagccgacgagggcagatgacaccttgcaagtgctgaattacctgtggaacaacaatcaaaactttttctggatgcagacgcttatcccacttgcagcgcttattgtatgcatgcgcatgctgcgctgcttattttgctgtgggccggcttttttaacttgtctgcggcgccttgggcgccgcagcgtacgaacacacagcagtgatgccgaacaaggtggggatcccgtacaaagctttagtcgaacgcccaggttatgcacccgttcacctacagatacagctggttaa

SEQ ID NO: 10047 - DNA, 1572 bp, unidentified
  source 1..1572: mol_type = other DNA
  misc_feature 1..1572: note = Synthetic
aggtattccacaatgtctagtctattgaggtcacttgctgcatttaagagacatagggagcaaccaacagcaccgtcaggttcgggtggtgcaattaaaggattgaaaaatacaattattgttccagttccaggggatacagtaattactacaaggtctaatttgttatttagattagtttatataataggcaatccggatacacctttaagcacctcgacgggagcaataatatcattgttgaccttatttgtcgaatctccaggtcaattaattcaaagaattgctgatgaccctgatgcagtttttaaattggtagaggtcattcctgaagctggtaatcctggagaattaacttttgcatctcgagggattaatttagacaagcaagctcaacaatactttaaattggctgagaaaaatgatcaggggtattatgttagcttaggatttgagaacccaccaaatgatgacgatataacatctagtcctgagatattcaattatatcctggcatctgtacttgcacaagtttggattcttctggcaaaagctgtgactgctccagatacggctgctgaagccgaaaatcgtagatggattaaattaatgcaacaacgtagggtggatggtgaactgagattgagcaagggatggctagatttggtgagaaacaagattgcgtcagatattacaataaggcgattcatggtagcattagttcttgacatcaaacgttctcctgggacaagacccaggatagctgaaatgatttgtgatattgataattatattgtagaggcagggcttgcaagtttcttgttaactattaaatttggcatagagacacgttatccagcactggcactacatgagttttctggagaactagccactattgaggggcttatgaaattgtaccaatctatgggggaaatggcaccatacatggtaattctggaaaattcaatccaaaccaggtttagtgcagggtcttatcctctgctatggagttatgccatgggtgtcggggtggagcttgaaagatcaatgggtggactcaatttcactagaagcttctttgaccctacatatttcagacttggtcaagagatggtgaggagatcttcagggatggttaatagttcatttgcgagagaacttggcctatctgatcatgaaacacaactggtcagccagattgtcaattcgggaggtgaatctgggatacctaaatttgatggattcagagcaaatccaacaacttttctaggaaccaaagataacataaatgatagaggtgaagatcagtcaaattcgatatcagggttacctggtccactattacccagccgtgacctaaatctttcaggtgattcatatggaattaatagtggtgtgaaaaatgtcagtgacaaactgaatgaaggagtaggtccagaccatgatgtgtccagttctgccatggaagaattgagaagattggttgagtccaccaacagaatagacaccaaacagccagaagcttcaggtgtcaccaaccattataatgatactgaccttctaaaataa

SEQ ID NO: 10048 - DNA, 21 bp, unidentified
  source 1..21: mol_type = other DNA
  misc_feature 1..21: note = Synthetic
atggtctcacaaaaatattaa

SEQ ID NO: 10049 - DNA, 21 bp, unidentified
  misc_feature 1..21: note = Synthetic
  source 1..21: mol_type = other DNA
atggtctcacaaaaatattaa

SEQ ID NO: 10050 - DNA, 33 bp, unidentified; identical to SEQ ID NO: 241
  source 1..33: mol_type = other DNA
  misc_feature 1..33: note = Synthetic

SEQ ID NO: 10051 - DNA, 165 bp, unidentified
  misc_feature 1..165: note = Synthetic
  source 1..165: mol_type = other DNA
atggcccttaaggatctcatgtcgagtgttgaaaaagatatgcgccaacttcaggccgaaacaaacgatctggtgacgaacgtatatgatgcaagggagtatacgcgtagggcaatagatcaaattctacaactagtcaaaggttttgaacgattccaaaagtaa

SEQ ID NO: 10052 - DNA, 1908 bp, unidentified
  source 1..1908: mol_type = other DNA
  misc_feature 1..1908: note = Synthetic
atgttaaacaggatacaaaccttgatgaaaacagctaacaattatgaaactattgagatattgcgtaattatttaagactgtatatcattttggcacgaaatgaagaaggtcgtggtatactaatatacgatgataacatagatagtgttatgtcgatgatgaatattacaatattagaagttataggattgacccattgcacaaaattaagatcatcgcctccaattcctatgtctagattgtttatggacgaaatagatcatgaatcatattattctccaaaaacttcatattatccattgatcgatattatacgaaagcgttcccacgaacagggagatatagcactggctttagaacgatacggtattgagattacagattccatatcagaaattaatgaatggctgtcgtcaaaaggtttagcatgttatagatttgtaaaatttaacgattacaggaaacagcagatgtatcgaaagttctctaggtatactatagttgacagtatgataatagggcatataggtcatcattatatttggattaagaatttagaaacatatacgcgtcccgagattgatgtgttaccgttcgatattaaatacatatctagagatgaattgtgggcgcgaatttcgtcctcattagatcaaacacatataaaaaccatcgccgtatcagtttatggagccattactgataatggaccaataccatatatgatatccacgtacccgggtaatacctttgttaactttaatagtgtaaaagatctaattttagatttcttagattggattaaagatattatgactagtacacgaactatcattctagtaggttacatgagtaatctattcgatataccgttgctaacagtatactggcccaataactgtggatggaaaatctataataatacattaatatcatccgacggtgctagggttatttggatggatgcgtataaattttcttgcggtttatctttacaagactattgttatcattggggtagtaaaccagagagccgaccatttgatttaataaaaaaatcagatgctaaacgcaattctaaatcgttggtcaaagaatctatggcatccttgaaatccttgtacgaggcattcgaaacacaatcaggagcgttagaagttttaatgagtccatgtaggatgttttcgttttctagaatagaagacatgttcttaactagtgtcatcaatagagtatccgagaatactggaatggggatgtattatcctaccaacgatataccttctctatttatcgaatcatctatctgtctagattatattatagtgaataatcaggaatccaacaaatatcgtatcaaatctgttctcgatatcatttcttcaaaacaataccctgcaggacgtcccaactacgttaaaaatggtacaaaaggaaagttatatatcgcgttgtgtaaagtcacggtacctactaacgaccatattcccgtagtttatcacgatgatgacaatactaccacctttattacagtattgacgtccgtcgatattgaaactgctatcagagcaggatattcgatagtcgaactaggggctttacaatgggatgataatattccagaacttaaagactgtttactggatagtatcaagataatttatgacttgaacgcagtcacaacaaataatttattggaacaactcatagaaaatattaactttaacaactctagtataatttcgttgttctatacatttgccattagttattgccgagcattcatttactcaattatggaaaccatagatccggtgtatatatctcagttcagttataaagaattatacgttagtagctcttataaagatattaatgaatccatgagtcagatggtaaaattataa

SEQ ID NO: 10053 - DNA, 24 bp, unidentified
  source 1..24: mol_type = other DNA
  misc_feature 1..24: note = Synthetic
atgaagaaggtcgtggtatactaa

SEQ ID NO: 10054 - DNA, 666 bp, unidentified
  source 1..666: mol_type = other DNA
  misc_feature 1..666: note = Synthetic
atgaggtccctgattatagtccttctgttcccctctatcatctactccatgtctattagacgatgcgagaagactgaagaggaaacatggggattaaaaatagggttgtgtataattgccaaagatttctatcccgaaagaactgattgcagtgttcatcgcccaactgcaagtggaggattgataactgaaggcaatggattcagagtagttatatatgatcaatgtacagaaccacatgactttattatcaccgatactcaacaaacacgtcttggatcatctcatacatatattaaattcagtaacatgaatacaggtgtcccatctagtattccaaaatgttccagaactctctctatttctgtatattgtgatcaagaggcgggagacataaaatttgaggagtatactcaagaatcaagtgatatcagtattagagttaagtatgattcatcatgtattgattatctgggtattaatcaaagtttcatgaatgaatgtattcgaagaattacaacatgggatagagaatcatgtgtcagaattgatacacagactataaataaatatcttaagtcttgcaccaacacaaaattcgaccgtaatgtctacaaaaggtacatactgaagagtaaagcactccatgctaaaacagagttgtaa

SEQ ID NO: 10055 - DNA, 15 bp, unidentified
  misc_feature 1..15: note = Synthetic
  source 1..15: mol_type = other DNA
atgaatataaaataa

SEQ ID NO: 10056 - DNA, 63 bp, unidentified; identical to SEQ ID NO: 251
  misc_feature 1..63: note = Synthetic
  source 1..63: mol_type = other DNA

SEQ ID NO: 10057 - DNA, 312 bp, unidentified
  misc_feature 1..312: note = Synthetic
  source 1..312: mol_type = other DNA
attaactggatggggatggcctacagagtcctggctgatgtgttgaggggaattcgcatggacgggctttttgtttcatcagatacagaggaacttcttcacaacctttgggaatggatgtacttcagttggatggttgagcggcaacagcgaaaggacggtcggaggagaggtatctgctgttccagggccactttctgctggcagaagtacaacgaggtacgcaagagggtgcactacaatgagcaccgaggaacaatcgaccttgctccgccatcatccatatcgcagggcccgtttatcacgatatga

SEQ ID NO: 10058 - DNA, 36 bp, unidentified; identical to SEQ ID NO: 253
  source 1..36: mol_type = other DNA
  misc_feature 1..36: note = Synthetic

SEQ ID NO: 10059 - DNA, 165 bp, unidentified
  misc_feature 1..165: note = Synthetic
  source 1..165: mol_type = other DNA
atgacccttaaggatctcatgtcgagtgttgaaaaagatatgcgtcaacttcaggccgaaacaaacgatctggtgacgaacgtatatgatgcaagggagtatacgcgtagggcaatagatcaaattatacaactagtcaaaggttttgaacgattccaaaagtaa

SEQ ID NO: 10060 - DNA, 36 bp, unidentified; identical to SEQ ID NO: 253
  source 1..36: mol_type = other DNA
  misc_feature 1..36: note = Synthetic

SEQ ID NO: 10061 - DNA, 165 bp, unidentified
  misc_feature 1..165: note = Synthetic
  source 1..165: mol_type = other DNA
atggcccttaaggatctcatgtcgaatgttgaaagagatatgcaccaacttcaggccgaaacaaacgatctggtgacgaacgtatatgatgcaagggagtatacgcgtagggcaatagatcaaattctacaactagtcaaaggttttgaacgattccaaaagtaa

SEQ ID NO: 10062 - DNA, 36 bp, unidentified; identical to SEQ ID NO: 253
  misc_feature 1..36: note = Synthetic
  source 1..36: mol_type = other DNA

SEQ ID NO: 10063 - DNA, 165 bp, unidentified
  source 1..165: mol_type = other DNA
  misc_feature 1..165: note = Synthetic
atgtcccttaaggatctcatgtcgagtgttgaaaaagatatgcaccaacttcaggcagaaacaaacgatctggtgacgaatgtaaatgatgcaagggaatatacacgtagggcaatagatcaaattttacaactagtcaaaggttttgaacgattccaaaagtaa

SEQ ID NO: 10064 - DNA, 12 bp, unidentified
  misc_feature 1..12: note = Synthetic
  source 1..12: mol_type = other DNA
atgcggaagtga

SEQ ID NO: 10065 - DNA, 39 bp, unidentified; identical to SEQ ID NO: 258
  source 1..39: mol_type = other DNA
  misc_feature 1..39: note = Synthetic

SEQ ID NO: 10066 - DNA, 255 bp, unidentified
  misc_feature 1..255: note = Synthetic
  source 1..255: mol_type = other DNA
atggccaaggttgtgctcgcgcccatagtgctctaccggggctccggagagtacaaggtgacgttcgcgctcaagcgcattagcatggagagcatggtacacgccactgtggtggatgccagcggagagcacgtgcggctggtcatgaccgagagcgccgacgacgacgagcgcctggccgcgctgggggtaatggacaccgctctcgagctcgaggacgagctcgcggaccaagaccccttatttaacgtctag

SEQ ID NO: 10067 - DNA, 63 bp, unidentified; identical to SEQ ID NO: 260
  misc_feature 1..63: note = Synthetic
  source 1..63: mol_type = other DNA

SEQ ID NO: 10068 - DNA, 222 bp, unidentified
  misc_feature 1..222: note = Synthetic
  source 1..222: mol_type = other DNA
atggccatcgtgtgcacgatcatgtccatcgtcaccatcatcgtgacgcacgtgaccgggtccgtgggcgccaccactttcatgtacatcgtgctcggcctgctgttcgccatctacgccttccgcctcactggccgcggtatcgtgcgcactcgctccgccgcgcccgcctgcccggtgtacgcgggcgccaagtcggaggacctgttcttcgccgagtag

SEQ ID NO: 10069 - DNA, 57 bp, unidentified; identical to SEQ ID NO: 267
  misc_feature 1..57: note = Synthetic
  source 1..57: mol_type = other DNA

SEQ ID NO: 10070 - DNA, 24 bp, unidentified
  misc_feature 1..24: note = Synthetic
  source 1..24: mol_type = other DNA
atagaatcctggggtagtgactga

SEQ ID NO: 10071 - DNA, 972 bp, unidentified
  misc_feature 1..972: note = Synthetic
  source 1..972: mol_type = other DNA
gtggacgctgtcattatgaacaaccgccgaggctccaagccgtctatccaacgttccgcgttcgcctcttatatacactctgcaatgcagtccgactctgcccctctacccagggtggaatatgtgttcgaaacaagcaaatttagaatgacgtcgagagcaaatgaagccagactcagactgacaaatgagtgtccgatactggtgagaccccacgagccgttcatcatgcccaccggaatacacttcacgcgaacccctagctgcgctttcatcctgaccggagagaccgacaaggatgtattttgccacacgggcctaatcgacggaggctaccgcggggagatacaggttattttactcaacaagaggaagtaccctgtgacgctgtatcgcggggagctcaacatctgcctgtctgctttcaattacgtgctacctccgttgagggacgtatcattcttaaccccccctatgtatgcaaacgacgccggatttgacgtgatggtgatgcactctatggttatccctcctactactgaccaaccgttcatgatatacctaggagtggagaccccaggcccccctgaaccccacgtggctctagcattggggcgatccggtctagcatctaggggtatagttatagacgttagtgagtggggaccgcgaggattgcagctgaagttttataactactcggggcagccgtggctggcgcagcccggtagccgcatatgccagattgtgtttgtggaacgcagacacatcctcaagggcttcaaaaagtgcttgcgccataggaagctagctcctggcgtccgtttccgggaggctcgagtgcattttcgcgaggatacaaatagcgtccgaaaacatacccacgaagacaaccccgtccacgaacccaacgtagccaccgcttccgctgacattcgtggaaccaaggggctggggtcgtctgggttttag

SEQ ID NO: 10072 - DNA, 663 bp, unidentified
  source 1..663: mol_type = other DNA
  misc_feature 1..663: note = Synthetic
atgcctttactaacctccgctcacccaacaggtggtgaaaatataacacaggtgacaccagcctctatcagcacacatcatgtgtccaccagttcgccagcgccccgcccaggcaccaccagccaagcgtcaggccctggaaacagttccacatccacaaaaccgggggaggttaatgtcaccaaaggcacgccccccaaaaatgcaacgtcgccccaggcccccagtggccaaaagacggcggttcccacggtcacctcaacaggtggaaaggccaattctaccaccggtggaaagcacaccacaggacatggagcccggacaagtacagagcccaccacagattacggcgatgattcaactacgccaagaccgagatacaatgcgaccacctatctacctcccagcacttctagcaaactgcggccccgctggacttttacgagcccaccggttaccacagcccaagccaccgtgcctgtcccgccaacgtcccagcccagattctcaaacctctccatgctagtactgcagtgggcatctctggctgtgctgacccttctgctgctgctggtcatggcggactgcgccttcaggcgtaacttgtcgacatcccatacctacaccaccccaccatatgatgacgccgagacctatgtataa

SEQ ID NO: 10073 - DNA, 39 bp, unidentified; identical to SEQ ID NO: 271
  source 1..39: mol_type = other DNA
  misc_feature 1..39: note = Synthetic

SEQ ID NO: 10074 - DNA, 39 bp, unidentified; identical to SEQ ID NO: 271
  misc_feature 1..39: note = Synthetic
  source 1..39: mol_type = other DNA

SEQ ID NO: 10075 - DNA, 69 bp, unidentified; identical to SEQ ID NO: 272
  source 1..69: mol_type = other DNA
  misc_feature 1..69: note = Synthetic

SEQ ID NO: 10076 - DNA, 69 bp, unidentified; identical to SEQ ID NO: 272
  source 1..69: mol_type = other DNA
  misc_feature 1..69: note = Synthetic

SEQ ID NO: 10077 - DNA, 27 bp, unidentified
  misc_feature 1..27: note = Synthetic
  source 1..27: mol_type = other DNA
ctggaacacaagattctgacattttaa

SEQ ID NO: 10078 - DNA, 12 bp, unidentified
  source 1..12: mol_type = other DNA
  misc_feature 1..12: note = Synthetic
atagtaatttaa

SEQ ID NO: 10079 - DNA, 45 bp, unidentified
  misc_feature 1..45: note = Synthetic
  source 1..45: mol_type = other DNA
atgatgtgcagaaacacatcaataagttatgtggcatgttattaa

SEQ ID NO: 10080 - DNA, 45 bp, unidentified; identical to SEQ ID NO: 10079
  source 1..45: mol_type = other DNA
  misc_feature 1..45: note = Synthetic

SEQ ID NO: 10081 - DNA, 21 bp, unidentified
  source 1..21: mol_type = other DNA
  misc_feature 1..21: note = Synthetic
ttggatctgggtttgggataa

SEQ ID NO: 10082 - DNA, 1569 bp, unidentified
  source 1..1569: mol_type = other DNA
  misc_feature 1..1569: note = Synthetic
atgtcccgacttggacctgcgttggatgagtttcgctcctttaagaataatccccctaggagaggtgcactcacaacagcaatccaagggatcaagaagaatgttattgtcttggttcctaccatgaaacaaccagcaaagagattccaatttatgacattaatacttcagattgcttggtctgccaaatcctctgctgcatttatcactggtgcttttttctcactgctctcgatgtttgctgacaatcctggagctatgttaaggaaccttgtcaatgaccctgacattgatgtgcagattgccgaagtgtcagacgtcaatgattcaaggataacacttgccacaagaggtcgcggtatggagcgttatgaggaagagatagtgcagatggtggaaacaccaccgaaaggaagggacaaggcgtatccatatgcagagagtgattatgtcaaaataattcctcgctctacggaggaccttcagattgctattcagaccgtgactgcgcaactttggatcctactgacaaaggcagtaactgccattgacacagcacgtgactctgagaacaggcgctggattaagtacgaacagcagagaagagcagatgctgattacaggttggatgagggttggctgaattttgccagagtgaggattgcagctgatcttgctgtgagaaggtatatggttgagattctcattgacgcaaacagagccccttccccgaaagcaagagtccttgagctgatttgcgatatcgggaactatataagtgaagcagggttggccggtttccacttgacaatcaagtatgggattgagactcgttatcctgccttggcattgaatgagttgcaagctgatctagggactatcctggctctgatgaaatgttatgttgaactaggagagagagcaccctttatggttattcttgaagattcagttcagaccaagttttctccgggttcgtacccgttgctctggagctacgccatgggggttgggtcaatgctagatcgagctgtcaacaacctgaactatgcaagaaattaccttgagcagcctttttataaccttggtgttgggatggtagaaaagatggaggggtcggttaacaggcatgtggctgaagaacttggactgacaggtgagcaaattgcccagatcaaagacctggtaaagcaggaggcggaccactctggtgctgttccaaaacatacatccagaactggagtcggcagcgccaaattcaatcctgcgagcgtagatgaacttatccctagtgatgaggacaaccaagacgatgatgatgctacaacgtcctatgggaaaccatacagaccccagattgagcttgcagagaaaccagacagtgtgccaatcaatgaacaccttgctcgaaagtatgcagacgcggacacagatgccatgagagggcaagtagctgggatcctgaggaaagaaaggaagaaaaagaaacacagcaaggaaaatgcacctggtgtggtgctccccgactcgcagagcacaggtggggacctatctgtcatagactcataa

SEQ ID NO: 10083 - DNA, 18 bp, unidentified
  source 1..18: mol_type = other DNA
  misc_feature 1..18: note = Synthetic
ctgacttcctggtcctga

SEQ ID NO: 10084 - DNA, 834 bp, unidentified
  source 1..834: mol_type = other DNA
  misc_feature 1..834: note = Synthetic
ctggtcctgactattttatgcagacaagacatggaagacatcaattttgcgtcgctggctccgcggcacggctcgcggccgtttatgggcacctggaacgagatcggcaccagccagctcaacgggggcgctttcagttggagcagcctgtggagtggcattaaaaactttgggtcctccattaagtcatttggtaacaaggcctggaacagtaacacaggtcaaatgctccgggataagctaaaggaccaaaactttcaacaaaaagtcgtggacgggctggcttccggcattaacggcgtggtggatatagccaaccaggccttgcaaaaccaaatcaatcagcggctggaaaatagccgccagcctccggtggctctgcagcagcgcccgcctcccaaagtcgaggaggtagaagtggaggaaaaactaccgcctttggaggtggcaccccccctgcctagtaaaggcgaaaagcggccgcgaccggatctggaggaaaccctagttgtggaatcccgcgagcccccctcgtacgagcaggctttgaaagagggcgcttcaccttatcccatgaccaaacctattggttccatggcccgacctgtatacgggaaggaaagcaaacccgtgaccttagaactacctccacccgtgcccaccgttccgcccatgccggctccgacgcttggcaccgccgtttctcgccccaccgcccccactgttgccgtggctacccccgcccgccgccctcgcggggctaactggcagagcactcttaacagcattgtgggtctgggagtaaaaagcctgaaacgccgccggtgctattaa

SEQ ID NO: 10085 - DNA, 57 bp, unidentified; identical to SEQ ID NO: 282
  misc_feature 1..57: note = Synthetic
  source 1..57: mol_type = other DNA

SEQ ID NO: 10086 - DNA, 57 bp, unidentified; identical to SEQ ID NO: 282
  misc_feature 1..57: note = Synthetic
  source 1..57: mol_type = other DNA

SEQ ID NO: 10087 - DNA, 642 bp, unidentified
  source 1..642: mol_type = other DNA
  misc_feature 1..642: note = Synthetic
atggcgcagcgccaaaagccaatggctctgaggccagcggccaggatcttgttcctgccgccgttgaacaggccgtccccattcaacccgtggctggcgcggctcttgccgcccccgccgccgggcaaattaaccaaattgacccctggatcttccaaaattttgtccagtgcccccttggtgagttttccatctcgcctcgaaacaccccaggtgaaatactgtttgatttggccctcgggccagggcttaacccctaccttgcccacctctcagccatgtacaccggctgggttgggaacatggaggttcagctggtcctcgccggcaatgcctttactgctggcaaggtggttgttgcccttgtaccaccctattttcccaaggggtcactcactactgcccagatcacatgcttcccacatgtcatgtgtgatgtgcgcaccctggagcccattcaactccctcttcttgatgtgcgtcgagtcctttggcatgctacccaggatcaagaggaatctatgcgcctggtttgcatgctgtacacgccactccgcacaaacagcccgggtgatgagtcttttgtggtctctggccgccttctttctaagccggcggctgatttcaattttgtctacctaa

SEQ ID NO: 10088 - DNA, 642 bp, unidentified; identical to SEQ ID NO: 10087
  source 1..642: mol_type = other DNA
  misc_feature 1..642: note = Synthetic

SEQ ID NO: 10089 - DNA, 1287 bp, unidentified
  misc_feature 1..1287: note = Synthetic
  source 1..1287: mol_type = other DNA
atgggccaaatcttttcccgtagcgctagccctattccgcgaccgccccgggggctggctgctcatcactggcttaacttcctccaggcggcatatcgcctagaacccggtccctccagttacgatttccaccagttaaaaaaatttcttaaaatggctttagaaacaccggcttggatctgtcccattaactactcccgcctagccagcctactcccaaaagggtaccccggccgggtaaatgaaattttacacatactcatccaaacccaagcccagatcccgtgccaccccgcgccaccgccgccgtcatcccccactctcgaccccccggattctgatccacaaatcccccctccttatgttgagcctacggcccctcaagtccttccagtcatgcatccacatggggctcctcccagccatcgcccatggcaaatgaaagacctacaggccattaagcaagaagtctcccaggcagcccccgggagcccccagtttatgcagaccatccggcttgcagtgcagcagtttgaccccactgccaaagacctccaagacctcctacagtacctttgctcctccctcgtggcctccctccatcaccagcagctagatagccttatatcagaggccgaaactcgaggtattacaggttataaccccttagccggtcccctccgtgttcaagccaacaatccacagcaacaaggattaaggcgagaataccagcaactctggctcgccgccttcgccgccctaccagggagtgccaaagacccttcctgggcctctatcctccaaggcctggaggagccttaccacaccttcgtagaacgtctcaacgtagcccttgacaatggactgccggaaggcacgcccaaagaccccattttacgatccttagcctactccaacgcaaacaaagaatgccagaaactactacaggcccgaggacacactaatagccctctaggagatatgttgcgggcttgtcaggcctggacccccaaagacaaaaccaaagtgttagttgtccagcctaaaaaaccccccccaaatcagccgtgcttccggtgcgggaaagcaggtcactggagccgagactgcactcagcctcgtcctccccccggccatgccctatgtcaagacccaactcactggaagcgagactgccctcgcctgaagcccgctatctcggacccagagccagaggaggatgccctcctattagacctccccactgacatcccacacccaaaaaactccatagggggggaggtctaa

SEQ ID NO: 10090 - DNA, 4389 bp, unidentified
  source 1..4389: mol_type = other DNA
  misc_feature 1..4389: note = Synthetic
atgggccaaatcttttcccgtagcgctagccctattccgcggccgccccgggggctggccgctcatcactggcttaacttcctccaggcggcatatcgcctagaacccggtccctccagttacgatttccaccagttaaaaaaatttcttaaaatagctttagaaacaccggtctggatctgccccattaactactccctcctagccagcctactcccaaaaggataccccggccgggtgaatgaaattttacacatactcatccaaacccaagcccagatcccgtcccgccccgcgccgccgccgccgtcatcctccacccacgaccccccggattctgacccacaaatcccccctccctatgttgagcctacagccccccaagtccttccagtcatgcacccacatggtgcccctcccaaccaccgcccatggcaaatgaaagacctacaggccattaagcaagaagtctcccaagcggcccctggaagcccccagtttatgcagaccatccggcttgcggtgcagcagtttgaccccactgccaaagacctccaagacctcctgcagtacctttgctcctccctcgtggcttccctccatcaccagcagctagatagccttatatcagaggccgaaactcgaggtattacaggttataaccccttagccggtcccctccgtgtccaagccaacaatccacaacaacaaggattaaggcgagaataccagcaactctggctcgccgccttcgccgccctgccagggagtgccaaagacccttcctgggcctctatcctccaaggcctggaggagccttaccacgccttcgtagaacgcctcaacatagctcttgacaatgggctgccagaaggcacgcccaaagaccccattttacgttccttagcctactctaatgcaaacaaagaatgccaaaaattactacaggcccgagggcacactaatagccctctaggagatatgttgcgggcttgtcaggcctggacccccaaagacaaaaccaaagtgttagttgtccagcctaaaaaaccccccccaaatcagccgtgcttccggtgcgggaaagcaggccactggagtcgggactgcactcagcctcgtcctccccctgggccatgccccctatgtcaagatccaactcactggaagcgagactgcccccgcctaaagcccactatcccagaaccagagccagaggaggatgccctcctattagatctccccgccgacatcccacacccaaaaaacctccatagggggggaggtttaacctccccccccacattacagcaagtccttcctaaccaagacccaacatctattctgccagttataccgttagatcccgcccgtcggcccgtaattaaagcccagattgacacccagaccagccacccaaagactatcgaagctctactagatacaggagcagacatgacagtccttccgatagccttgttctcaagtaatactcccctcaaaaacacatccgtgttaggggcagggggccaaacccaagatcactttaagctcacctcccttcctgtgctaatacgcctccctttccggacgacgcctattgttttaacatcttgcctagttgataccaaaaacaactgggccatcataggtcgtgatgccttacaacaatgccaaggcgtcctgtacctccctgaggcaaaaaggccgcctgtaatcttgccaatacaggcgccagctgtccttgggctagaacacctcccaaggccccccgaaatcagccagttccctttaaacccagaacgcctccaggccttgcaacacttggtccggaaggccctggaggcaggccatatcgaaccctacaccgggccaggaaataacccagtattcccagttaaaaaagccaatggaacctggcgattcatccacgacctgcgggccactaactctctaaccatagatctctcatcatcttcccccgggccccctgacttgtccagcctgccaactacactagcccacttacaaactatagaccttaaagacgcctttttccaaatccccctacctaaacagttccagccctactttgctttcactgtcccacagcagtgtaactacggccccggcactagatacgcctggagagtactaccccaagggtttaaaaatagtcccaccctgttcgaaatgcagctggcccatatcctgcagcccattcggcaagccttcccccaatgcactattcttcagtacatggatgacattctcctggcaagcccctcccatgcggacctgcaactactctcagaggccacaatggcttccctaatctcccatgggttgcctgtgtccgaaaacaaaacccagcaaacccctggaacaattaagttcctagggcaaataatttcacctaatcacctcacttatgatgcagtccccaaggtacctatacggtcccgctgggcgctacctgaacttcaagccctacttggcgagattcagtgggtctccaaaggaactcctaccttacgccagccccttcacagtctctactgtgccttacaaaggcatactgatccccgagaccaaatatatttaaatccttctcaagttcaatcattagtgcagctgcggcaggccctgtcacagaactgccgcagtagactagtccaaaccctgcccctcctaggggctattatgctgaccctcactggcaccaccactgtggtgttccagtccaagcagcagtggccacttgtctggctacatgcccccctaccccacactagccagtgcccctgggggcagctacttgcctcagctgtgttattactcgacaaatacaccttgcaatcctatggactactctgccaaaccatacatcataacatctccacccaaaccttcaaccaattcattcaaacatctgaccaccccagtgttcctatcttactccaccacagtcaccgattcaaaaatttaggtgcccagactggagaactttggaacacttttcttaaaacaactgccccattggctcctgtgaaagcccttatgccagtgtttactctttcccctgtgatcataaacaccgccccttgcctgttttcagacggatccacctcccaggcagcctatattctctgggacaagcatatattgtcacaaagatcattcccccttccgccaccgcacaagtcggcccaacgggccgaacttctcggacttttgcatggcctctccagcgcccgttcgtggcgctgtctcaacatatttctagactccaagtatctttatcattaccttcggacccttgccctaggcaccttccaaggcaggtcctctcaggccccctttcaggccctcctgccccgcttactatcgcgtaaggtcgtctatttgcaccacgttcgcagccataccaatctacctgatcccatctccaggctcaacgctctcacagatgccctactaatcacccctgtcctgcagctctctcctgcagacctacacagtttcacccattgcggacagacggccctcacactgcaaggggcaaccacaactgaggcctccaatatcctgcgctcttgccacgcctgccgcaaaaataacccacaacatcagatgcctcaaggacacatccgccgtggcctactccctaaccacatctggcaaggcgacattacccatttcaaatataaaaatacactgtatcgccttcatgtatgggtagacaccttttcaggagccatctcagctacccaaaagagaaaagaaacaagctcagaagctatttcctctttgctccaggccattgcctatctaggcaagcctagctacataaacacagacaatggccctgcctatatttcccaagacttcctcaatatgtgtacctcccttgctattcgccatactacccatgtcccctacaatccaaccagctccggacttgtagaacgctctaatggcattcttaaaaccctattatataagtactttactgacaaacccgacctacctatggataatgctctatccatagccctatggacaatcaaccacctaaatgtattaaccaactgccacaaaacccgatggcagcttcaccactccccccgactccagccgatcccagagacacattccctcagcaataaacaaacccattggtattatttcaagcttcctggtcttaatagccgccagtggaaaggaccacaggaggctcttcaagaagctgccggcgctgctctcatcccggtaagcgctagttctgcccagtggatcccgtggaggctcctcaagcgagctgcatgcccaagacccgtcggaggccccgccgatcccaaagaaaaagaccaccaacaccatgggtaa

SEQ ID NO: 10091 - DNA, 1956 bp, unidentified
  source 1..1956: mol_type = other DNA
  misc_feature 1..1956: note = Synthetic
atgggccaaatcttttcccgtagcgctagccctattccgcggccgccccgggggctggccgctcatcactggcttaacttcctccaggcggcatatcgcctagaacccggtccctccagttacgatttccaccagttaaaaaaatttcttaaaatagctttagaaacaccggtctggatctgccccattaactactccctcctagccagcctactcccaaaaggataccccggccgggtgaatgaaattttacacatactcatccaaacccaagcccagatcccgtcccgccccgcgccgccgccgccgtcatcctccacccacgaccccccggattctgacccacaaatcccccctccctatgttgagcctacagccccccaagtccttccagtcatgcacccacatggtgcccctcccaaccaccgcccatggcaaatgaaagacctacaggccattaagcaagaagtctcccaagcggcccctggaagcccccagtttatgcagaccatccggcttgcggtgcagcagtttgaccccactgccaaagacctccaagacctcctgcagtacctttgctcctccctcgtggcttccctccatcaccagcagctagatagccttatatcagaggccgaaactcgaggtattacaggttataaccccttagccggtcccctccgtgtccaagccaacaatccacaacaacaaggattaaggcgagaataccagcaactctggctcgccgccttcgccgccctgccagggagtgccaaagacccttcctgggcctctatcctccaaggcctggaggagccttaccacgccttcgtagaacgcctcaacatagctcttgacaatgggctgccagaaggcacgcccaaagaccccattttacgttccttagcctactctaatgcaaacaaagaatgccaaaaattactacaggcccgagggcacactaatagccctctaggagatatgttgcgggcttgtcaggcctggacccccaaagacaaaaccaaagtgttagttgtccagcctaaaaaaccccccccaaatcagccgtgcttccggtgcgggaaagcaggccactggagtcgggactgcactcagcctcgtcctccccctgggccatgccccctatgtcaagatccaactcactggaagcgagactgcccccgcctaaagcccactatcccagaaccagagccagaggaggatgccctcctattagatctccccgccgacatcccacacccaaaaaacctccatagggggggaggtttaacctccccccccacattacagcaagtccttcctaaccaagacccaacatctattctgccagttataccgttagatcccgcccgtcggcccgtaattaaagcccagattgacacccagaccagccacccaaagactatcgaagctctactagatacaggagcagacatgacagtccttccgatagccttgttctcaagtaatactcccctcaaaaacacatccgtgttaggggcagggggccaaacccaagatcactttaagctcacctcccttcctgtgctaatacgcctccctttccggacgacgcctattgttttaacatcttgcctagttgataccaaaaacaactgggccatcataggtcgtgatgccttacaacaatgccaaggcgtcctgtacctccctgaggcaaaaaggccgcctgtaatcttgccaatacaggcgccagctgtccttgggctagaacacctcccaaggccccccgaaatcagccagttccctttaaaccagaacgcctccaggccttgcaacacttggtccggaaggccctggaggcaggccatatcgaaccctacaccgggccaggaaataacccagtattcccagttaaaaaagccaatggaacctggcgattcatccacgacctgcgggccactaactctctaa

SEQ ID NO: 10092 - DNA, 1290 bp, unidentified
  source 1..1290: mol_type = other DNA
  misc_feature 1..1290: note = Synthetic
atgggccaaatcttttcccgtagcgctagccctattccgcggccgccccgggggctggccgctcatcactggcttaacttcctccaggcggcatatcgcctagaacccggtccctccagttacgatttccaccagttaaaaaaatttcttaaaatagctttagaaacaccggtctggatctgccccattaactactccctcctagccagcctactcccaaaaggataccccggccgggtgaatgaaattttacacatactcatccaaacccaagcccagatcccgtcccgccccgcgccgccgccgccgtcatcctccacccacgaccccccggattctgacccacaaatcccccctccctatgttgagcctacagccccccaagtccttccagtcatgcacccacatggtgcccctcccaaccaccgcccatggcaaatgaaagacctacaggccattaagcaagaagtctcccaagcggcccctggaagcccccagtttatgcagaccatccggcttgcggtgcagcagtttgaccccactgccaaagacctccaagacctcctgcagtacctttgctcctccctcgtggcttccctccatcaccagcagctagatagccttatatcagaggccgaaactcgaggtattacaggttataaccccttagccggtcccctccgtgtccaagccaacaatccacaacaacaaggattaaggcgagaataccagcaactctggctcgccgccttcgccgccctgccagggagtgccaaagacccttcctgggcctctatcctccaaggcctggaggagccttaccacgccttcgtagaacgcctcaacatagctcttgacaatgggctgccagaaggcacgcccaaagaccccattttacgttccttagcctactctaatgcaaacaaagaatgccaaaaattactacaggcccgagggcacactaatagccctctaggagatatgttgcgggcttgtcaggcctggacccccaaagacaaaaccaaagtgttagttgtccagcctaaaaaaccccccccaaatcagccgtgcttccggtgcgggaaagcaggccactggagtcgggactgcactcagcctcgtcctccccctgggccatgccccctatgtcaagatccaactcactggaagcgagactgcccccgcctaaagcccactatcccagaaccagagccagaggaggatgccctcctattagatctccccgccgacatcccacacccaaaaaactccatagggggggaggtttaa

SEQ ID NO: 10093 - DNA, 864 bp, unidentified
  source 1..864: mol_type = other DNA
  misc_feature 1..864: note = Synthetic
atagataagaagaggacaaagtttcagaatagagccaaaatggtaaaagaaataaatcagacaataagagcagcacaaactcattacgagacattgaaacaaggatacctaaaatttaagagaatgattagaactgctactctaaaagatatagcaccatctattccaaaaattcagaaattttataaactattctcggacatttcagccatcagcaaagcatcacagaatccgagtaagatggtatatgctctactgctttacatgtttcccaatttgtttggagatgaccatagattcattcgttatagaatgcatccaatgagcaaaatcaaacacaagatcttctccccgttcaaacttaatcttattagaatattagtggaagaaagattctataataatgaatgcagagattataaatggagaataattggaacacaagttgataaaatattgatagctgaatctgctaaatatacaatagatgcaaggtatcgcctaagacctatatatagaatcaagggagaatctgaagaagataccctcttcatcaaacagatggtagagaaatgtgtaacgtctcaggaattggtggagaaagtgttgaagatactgtttaaagatttgttcaagagtggagaatacaaagattacagatacgatgatgatgtagacaatggattcattggattggacaaactaaaattaaacattgttcacgatatagttgaaccatgtatgcctgttcgtaggccagtggctaaggtactgtgtaaagaaatggtaaataaatactttgagaatcctctacatatcattggtaagaatctccaagagtgcattgactttgttagtgagtag

SEQ ID NO: 10094 - DNA, 18 bp, unidentified
  source 1..18: mol_type = other DNA
  misc_feature 1..18: note = Synthetic
atttttgtgtccgtgtag

SEQ ID NO: 10095 - DNA, 21 bp, unidentified
  misc_feature 1..21: note = Synthetic
  source 1..21: mol_type = other DNA
attatctgctcagagggataa

SEQ ID NO: 10096 - DNA, 2469 bp, unidentified
  source 1..2469: mol_type = other DNA
  misc_feature 1..2469: note = Synthetic
atctcttcgttgttcggaggtagatacgataataagtttttgcttaacatgtcttcggctcccaaaatagagttgattgtagataaggtggcttcgttatcagaaagacgcttggaggggcgtctgccagaagattggtttcgccacatcatggatcctgaaaccgagttcaacggcgaatttgctgatgctctgtgcatcggtattgatgaattcgctcaacctctgccttttttgccgtttaaggccttgttagtaaccggtacggccggggcagggaaaacgaacagcattcagaccttagcggccaacttagattgtatcgttactgcaacgacatctatcgccgctcagaatttgagcgttgttttaaacagaagtaaatccgcgcaagttaaaacaatttttaagacttttgggtttaatagttcacatgtatctatgagcgaacgtcaaagttatattgcaaatgacgagaggtcgattcaaattcaacaaaagcaagacctgtctatctattggaatgttatctccgacatagcggagagggcgttgggtgctgtcgcgtgcaaaactaaagagttacctgatttgtgtgagagtagtgttatagttatcgacgaggcaggcgtaatattacgacatattctgcacactgttgtttttttctattggttttataacgcgttgtataaaacccctttgtatgagaacggaattgttccgtgcatcgtgtgtgtggggtcgcccacgcagagtaacgctttggtgacttcatttaatccgctgactcaaaacaaggacgtgaagagaggaatagatgtactttcagccttgatctgcgacgacgtgctctctaaatattgcgaagtcgataataactggataatctttgtaaacaacaaaagatgtgcggatcatgcgttcggagactttttaaagcacatagaatttggcttgccgttaaagccggagcttatagagtatgtcgatcagtttgtgaagcccgcttcgtacataagaaatcccatgaacgaaatagaaacgacccgcttgtttttatcgcataacgaggtaaagaactatttccgctcattgcatgagcaggttgaagttaccaacagaaataacttgtttgtgtttccggtttattttctaataaaaaacaagactttcgaagactacaaaagtgaaattggtaatttctccttagaaattgaaccgtggtttaaatctaatattcatcggctgaatacttattctcagttcgcggatcaggatttatcgaaaactgttcaattggaggagattgttttggaagatgggtcggtggaagagactttgataacctgtcatctgaaacatatcagaaacagttcaataggtgtgacgtccaagatcaaggcttcgaccgtggggttttccggaacttatgaaaaatttgtagaactgttacagagcgatttgtttatcgaaaaaacgtcatgtgagcagactattcacgcatattcttttttatccggtcttatgttcggagggatgtattctttctgctgttcggaattcaccacccctgaagtgttaatggagatcaaaaacataaagatgcccagtattgaattcttagaaagtgaaatgtcgaggatgtctcgagacgtgcaaaccgtagagacagatgaaaggtatgatttcggattagtcgatgatgggttatcagatatggacctattagaaattgatccttgcggagatccattttttactaggtatagtaagttgcctttaactaattctctgtcgttcgaggaaattagtttgctttatacgacgtttaaggatatctttatatctaggtttgccattctgcagaagcatacaaaagggaagttcggaaagactctcctagtgacttataacagaaacaacgtttctagaaaacagtgcggtgagatatattcccatttaaagagtttttatggtatgctcacctacgctatccctgccaataattatactctggagggttatacaaatgataatgtagttcatttaggaacggataaacaattaccgcagatcttatataaaaaaggattacctagattagttataaaagatgaaatggggttcatttctgttttagataataacgtgtcgaaatttgtcgatgtcgtaaatggtcagagttttcatctatgtacaacggtcgattacgccactgtttctaaagtttctatgaccatcacgaaaagtcaagggctttccatacaaaaggtcgcaatagatttcgggagtgatccaaaaaatttaaaattgagttctatttatgttgggatgtcacgagtaaccgacccgaataatttaataatgaatgttaatcccttgagactgaattatgagaatgataattttattgctccgcatattgtaaaagcgttaaagaacgaaaataccatgttaatattttag

SEQ ID NO: 10097 - DNA, 18 bp, unidentified
  source 1..18: mol_type = other DNA
  misc_feature 1..18: note = Synthetic
atttttgtgtccgtgtag

SEQ ID NO: 10098 - DNA, 30 bp, unidentified; identical to SEQ ID NO: 295
  misc_feature 1..30: note = Synthetic
  source 1..30: mol_type = other DNA

SEQ ID NO: 10099 - DNA, 2469 bp, unidentified
  source 1..2469: mol_type = other DNA
  misc_feature 1..2469: note = Synthetic
atctcttcgttgttcggaggtagatacgataataagtttttgcttaacatgtcttcggctcccaaaatagagttgattgtagataaggtggcttcgttatcagaaagacgcttggaggggcgtctgccggaagattggtttcgccacatcatggatcccgaaaccgagttcaacagcgaatttgctgatgctctgtgcataggtattgatgaattcgctcaacctctgccttttttgccgtttaaggccttgttagtaaccggtacggccggggcggggaaaacgaacagcattcagaccttagcggccaacttagattgcatcgttactgcaacgacatctatcgccgctcagaatttgagcgttgttttaaatagaagtaaatccgcgcaagttaaaacaatttttaagacttttgggtttaatagttcacatgtatctatgagcgaacgtcaaagttatattgcaaatgacgagaggtcgattcaaattcaacagaagcaagacctgtccatctattggaatgttatctccgacatagcggatagggcgttgggtgctgtcgcatgcaaaactaaagagttacctgatttgtgtgagagtagtgttatagttatcgacgaggcgggtgtaatattacgacatattctgcacactgttgtttttttttattggttttataacgcgttgtataaaacccctttgtatgaggacggaattgttccgtgtatcgtgtgtgtgggttcgcccacgcagagtaatgctttggtgacttcatttaatccgctgactcaaaataaggacgtgaagagaggaatagacgtactttcggccttgatttgcgacgacgtgctgtctaaatattgcgaagtcgataacaactggataatctttgtaaacaacaaaaggtgtgcggatcatgcgttcggagattttttaaagcacatagaatttggtttgccgttgaagccggagcttatagagtatgtcgatcagtttgtgaagcccgcttcgtacatcagaaatcccatgaacgaaatagaaacgacccgcttgtttttatcgcataacgaggtaaagaactatttccgttcactgcatgagcaggttgaagttaccaacagaaataacttgtttgtgtttccggtttattttctgataaaaaacaagactttcgaggactacaaaagtgaaattggcaatttctccttagaaattgaaccgtggtttaaatctaatattcatcggctgaatacttattctcagttcgcggatcaggatttatcgaaaacggttcaattggaggagattgttttggaagatgggtcggtggaagagactttgataacctgtcatctgaaacatatcagaaacagttcaataggtgtaacgtccaagatcaaggcttcgaccgtgggtttttccggaacttatgaaaaatttgtagaactgttacagagcgatttatttatcgaaaaaacgtcatgtgatcagactatccacgcatattcttttttatccggtcttatgttcggagggatgtattctttttgctgttcgaaattcaccacccctgaagtgttaatggaaatcaaaaacataaagatgcccagtattgaattcttagaaagtgaaatgtcgaggatgtctccggacgtacaaaccgtagagacagatgaaaggtatgatttcggattagtcaatgatgggttatcggatgtggatctattagagatcgatccttgcggagatccattttttactaggtatagtaagttgcctttaactaattctctgtcgttcgaggaaatcagtttgctttatacgacgtttaaggatatctttatatctaggtttgctattctgcagaagcatacaaaagggaagttcggaaagactctcctagttacttataacagaaacaacgtttctagaaaacagtgcggtgagatctattcccatttaaagagtttttatggtatgctcacttacgctatccctgccaataattatactctggagggctatacgaatgataacgtagttcatttaggaacggataaacaattaccgcagatcttatataaaaaaggattacctagattagttataaaagatgaaatggggttcatttctgttttagataataacgtgtcgaaatttatcgacgtcgtaaatggtcagagttttcatctatgtacaacggtggattacgccactgtttctaaagtttctatgaccatcacgaaaagtcaagggctttccatacaaaaggtcgcaatagatttcgggagtgatccgaaaaatttaaaattgagttctatttatgttgggatgtcacgagtaaccgacccgaataatttaataatgaatgttaatcctttaagactgaattatgagaatgataactttattgctccgcatattgtaaaagcgttaaagaacgaaaataccatgttaatattttag

SEQ ID NO: 10100 - DNA, 390 bp, unidentified
  source 1..390: mol_type = other DNA
  misc_feature 1..390: note = Synthetic
gtgaacatacgcactcgtggcaacaacatgaaggaaagtctttctcggccgccgtcaccctggcttttcgctctcttgctcttcttttctgcgtctttcctgcatgcgggcagggattgtccggagccccctgccgtttctgtcaatgtcatggtggtcgcgacgtgtactggctgtggccaccacccaatgtccattctctcatggatcgtgaacgggacacattggccgaatcaaggcccaatgcgggttcatcgcacgcctaacggaacgcaattgcgacgccgggcctttttcggaggcggcgacttccacaagaacctgacctgtcgcttactggacggctacggaagctcgtctcaaaaattcatgttgagaaacctgtggtag

SEQ ID NO: 10101 - DNA, 48 bp, unidentified; identical to SEQ ID NO: 301
  misc_feature 1..48: note = Synthetic
  source 1..48: mol_type = other DNA

SEQ ID NO: 10102 - DNA, 15 bp, unidentified
  misc_feature 1..15: note = Synthetic
  source 1..15: mol_type = other DNA
atgatgggttcttag

SEQ ID NO: 10103 - DNA, 39 bp, unidentified; identical to SEQ ID NO: 303
  misc_feature 1..39: note = Synthetic
  source 1..39: mol_type = other DNA

SEQ ID NO: 10104 - DNA, 72 bp, unidentified; identical to SEQ ID NO: 304
  source 1..72: mol_type = other DNA
  misc_feature 1..72: note = Synthetic

SEQ ID NO: 10105 - DNA, 21 bp, unidentified
  source 1..21: mol_type = other DNA
  misc_feature 1..21: note = Synthetic
atgttttcggctccacggtag

SEQ ID NO: 10106 - DNA, 210 bp, unidentified
  misc_feature 1..210: note = Synthetic
  source 1..210: mol_type = other DNA
atgtttacagatccgcccaaggcggcaaaaatatacattaactcatccgtcgagtctacatttatagacacttcttcactgaactctgaaaaatatgccacaatttggcgcagtttatcgatttttatacggatgctcattttaaatttttgtaaattatttaaagttaaatggctgcagaacagcgtcgttctacaatttttgacatag

SEQ ID NO: 10107 - DNA, 51 bp, unidentified
  misc_feature 1..51: note = Synthetic
  source 1..51: mol_type = other DNA
atgccacaatttggcgcagtttatcgatttttatacggatgctcattttaa

SEQ ID NO: 10108 - DNA, 21 bp, unidentified
  misc_feature 1..21: note = Synthetic
  source 1..21: mol_type = other DNA
aagtggagcagactactgtag

SEQ ID NO: 10109 - DNA, 51 bp, unidentified; identical to SEQ ID NO: 316
  source 1..51: mol_type = other DNA
  misc_feature 1..51: note = Synthetic

SEQ ID NO: 10110 - DNA, 51 bp, unidentified; identical to SEQ ID NO: 317
  misc_feature 1..51: note = Synthetic
  source 1..51: mol_type = other DNA

SEQ ID NO: 10111 - DNA, 63 bp, unidentified; identical to SEQ ID NO: 319
  misc_feature 1..63: note = Synthetic
  source 1..63: mol_type = other DNA

SEQ ID NO: 10112 - DNA, 63 bp, unidentified; identical to SEQ ID NO: 319
  source 1..63: mol_type = other DNA
  misc_feature 1..63: note = Synthetic

SEQ ID NO: 10113 - DNA, 141 bp, unidentified
  source 1..141: mol_type = other DNA
  misc_feature 1..141: note = Synthetic
ttggaaaaagcagtatattcaaggtatgaagtacaaggaataacagccgtaataacatcaatggctacctttgcgaatagcaaagaaaactttaagaaactaagagggcccgtcgtaaccttgtacggcggacctaaatag

SEQ ID NO: 10114 - DNA, 141 bp, unidentified; identical to SEQ ID NO: 10113
  source 1..141: mol_type = other DNA
  misc_feature 1..141: note = Synthetic

SEQ ID NO: 10115 - DNA, 207 bp, unidentified
  misc_feature 1..207: note = Synthetic
  source 1..207: mol_type = other DNA
gtgagcccgcaggtgcggcatatggacccgtccgaggcgcccaggcgcgggtccttcaccgtgcccaggtcctcgtcgttcttcaactggctgatgaccacgtccgtggcgcttatctcgctctgcgagtacaggctgtacgacacgcgcgccaccaccgacatgattctccgagtcgtattaatagtatttttatctttgaaataa

SEQ ID NO: 10116 - DNA, 60 bp, unidentified; identical to SEQ ID NO: 322
  misc_feature 1..60: note = Synthetic
  source 1..60: mol_type = other DNA

SEQ ID NO: 10117 - DNA, 39 bp, unidentified; identical to SEQ ID NO: 323
  source 1..39: mol_type = other DNA
  misc_feature 1..39: note = Synthetic

SEQ ID NO: 10118 - DNA, 42 bp, unidentified
  misc_feature 1..42: note = Synthetic
  source 1..42: mol_type = other DNA
atgaaccaccagaagatgatgaataaaaaaatgataaaatag

SEQ ID NO: 10119 - DNA, 39 bp, unidentified; identical to SEQ ID NO: 325
  misc_feature 1..39: note = Synthetic
  source 1..39: mol_type = other DNA

SEQ ID NO: 10120 - DNA, 45 bp, unidentified; identical to SEQ ID NO: 326
  source 1..45: mol_type = other DNA
  misc_feature 1..45: note = Synthetic

SEQ ID NO: 10121 - DNA, 78 bp, unidentified; identical to SEQ ID NO: 327
  misc_feature 1..78: note = Synthetic
  source 1..78: mol_type = other DNA

SEQ ID NO: 10122 - DNA, 78 bp, unidentified; identical to SEQ ID NO: 327
  source 1..78: mol_type = other DNA
  misc_feature 1..78: note = Synthetic

SEQ ID NO: 10123 - DNA, 2787 bp, unidentified
  source 1..2787: mol_type = other DNA
  misc_feature 1..2787: note = Synthetic
atggacggcacagacgctcttgaaaagcttaccaaaggcctgagtgggggaggcgggagccttcaccagacaaagctgttgatggaatttcaactccgaggactgccggtgcctgccctcttaaacagcagcacaacagagcagtttttaaatactgttgcccaactgccgacggacctatcaaaatttatacgcgactatcgcgtgttcgcactggttcgcgcggcgtattttttagaacccccttctagcatcgacccccttgaggcagcgcgcgctcttggacgcctggttgatatattatcatcacaaccaccgcagaacaccgcaccggcgcagccacccacctccgacgacaccctgaataactgtacattgctcaaactactagcccactacgcggatcagatagcaggtttcaaaacccccgctctccctcccgtgccacctggaatcatcggcctgttcacatgcgtggaacagatgtaccacgcatgttttcagaaatactgggcagctgcactacccccaatgtggatactgacatacgaccctcccacttctccgttacaggactggcttatagtcgcctatggtaacaaggaaggactgctactcccctctggcataccctcggaggaggtgttagccaaaacattagtaacagaacaccacgagttgttcgtatcgcggtcgaattcgaccgagaccgccgtcaccatgcccgtatccaaagaacgcgccctcgccatctaccgggtgttcgccaagggtgaggtggtggcggaaaatactcccattcttgccttcaccgacgtggaactatccacactcaaaccccactatctgttcatctatgattttatcatagaggcattatgcaagagctacacatactcatgcacccaggcccgcctggaatcctttttgagccgaggtatagacttcatgactgacctaggtcagtacctagataccgctactagcggcaagcagcagctgacgcacagccaaataaaggaaatcaaatacaggctgctaagctgcggtctctcggcttccgcgtgtgatgttttcagaactgtgatcatgaccctcccatatcgaccgacccccaacctcgctaacctgtccacgtttatggggatggttcaccaactgaccatgttcggacactatttctaccggtgcctgggcagctacagtcccaccggcttggccttcacagaattgcaaaagatactgacacgcgccagcgcggagcaaacggaacgtaacccgtggagacatccgggtatctcggacattccactgcgttggaaaatatcgcgtgctctagcattcttcgtccctccggcccccataaacactttgcagcgcgtgtacgccgcgctgccctcgcaactcatgcgggccatcttcgagatctcggtcaagaccacatggggaggcgccgtaccggcaaacctggcgcgcgacattgacacaggaccgaacacacaacatatctcctccacaccaccgcccaccctcaaggatgttgagacatactgtcaaggtctgcgggtgggagacacggagtacgatgaggacattgtgagaagcccgctctttgcagacgcgtttaccaagagtcacttgttgcctatactgcgcgaggttctggaaaaccgcctgcagaaaaacagagctctgtttcagataagatggctgataatatttgctgccgaggcggcaaccgggctcatccctgccaggcgcccgctagccagagcctacttccacatcatggacattctggaggagagacattcccaagacgccctatacaaccttttggactgtatccaggagctcttcacccacatcaggcaggctgttccagacgcacagtgtccgcacgcctttctacagtccctgttcgtctttcaattccgccctttcgtactcaaacaccagcagggtgtaaccttgtttctagatggcttgcagacatccctccccccggtgataagtctggccaaccttggagacaagctgtgtcgtctcgagttcgagtacgacagcgagggcgacttcgtgcgcgtgccagttgcaccgccagaacaaccaccgcacgtacatctgtcgcatttcaagaagacaatacagaccatcgaacaggccaccagggaggccaccgtagccatgacaacaatcgcaaagccaatataccccgcctacatccggttactgcagcggctagaatatcttaacagactcaaccaccacattctcaggattcccttcccacaggacgccctttctgaactccaggaaacctacctggcggcgtttgcacggttgacaaaattggcagcggacgcagcaaacacttgtagctactccctcaccaagtactttggagttttattccaacaccagctggtccccacggccatcgttaaaaaactgctacatttcgacgaggctaaagataccacagaagcctttttacagagcctggcacaacccgtagtgcagggacaacggcagggggcggctggcgggtcgggtgtcctgacgcagaaagaacttgagctcttgaacaaaataaacccacagtttacagacgctcaggctaacattcctccatctattaaacgttcatattcaaataaatatgacgtccctgaggtctcagtcgactgggaaacgtactcccggtctgccttcgaggcaccggacgacgaactccgttttgtcccactgacgctggcaggcctccggaaactgtttgtcgaatag

SEQ ID NO: 10124 - DNA, 2787 bp, unidentified
  misc_feature 1..2787: note = Synthetic
  source 1..2787: mol_type = other DNA
atggacggcacagacgctcttgaaaagcttaccaaaggcctgagtgggggaggcgggagccttcaccagacaaagctgttgatggaatttcaactccgaggactgccggtgcctgccctcttaaacagcagcacaacagagcagtttttaaatactgttgcccaactgccgacggacctatcaaaatttatacgcgactatcgcgtgttcgcactggttcgcgcggcgtattttttagaacccccttctagcatcgacccccttgaggcagcgcgcgctcttggacgcctggttgatatattatcatcacaaccaccgcagaacaccgcaccggcgcagccacccacctccgacgacaccctgaataactgtacattgctcaaactactagcccactacgcggatcagatagcaggtttcaaaacccccgctctccctcccgtgccacctggaatcatcggcctgttcacatgcgtggaacagatgtaccacgcatgttttcagaaatactgggcagctgcactacccccaatgtggatactgacatacgaccctcccacttctccgttacaggactggcttatagtcgcctatggtaacaaggaaggactgctactcccctctggcataccctcggaggaggtgttagccaaaacattagtaacagaacaccacgagttgttcgtatcgcggtcgaattcgaccgagaccgccgtcaccatgcccgtatccaaagaacgcgccctcgccatctaccgggtgttcgccaagggtgaggtggtggcggaaaatactcccattcttgccttcaccgacgtggaactatccacactcaaaccccactatctgttcatctatgattttatcatagaggcattatgcaagagctacacatactcatgcacgcaggcccgcctggaatcctttttgagccgaggtatagacttcatgactgacctaggtcagtacctagataccgctactagcggcaagcagcagctgacgcacagccaaataaaggaaatcaaatacaggctgctaagctgcggtctctcggcttccgcgtgtgatgttttcagaactgtgatcatgaccctcccatatcgaccgacccccaacctcgctaacctgtccacgtttatggggatggttcaccaactgaccatgttcggacactatttctaccggtgcctgggcagctacagtcccaccggcttggccttcacagaattgcaaaagatactgacacgcgccagcgcggagcaaacggaacgtaacccgtggagacatccgggtatctcggacattccactgcgttggaaaatatcgcgtgctctagcattcttcgtcactccggcccccataaacactttgcagcgcgtgtacgccgcgctgccctcgcaactcatgcgggccatcttcgagatctcggtcaagaccacatggggaggcgccgtaccggcaaacctggcgcgcgacattgacacaggaccgaacacacaacatatctcctccacaccaccgcccaccctcaaggatgttgagacatactgtcaaggtctgcgggtgggagacacggagtacgatgaggacattgtgagaagcccgctctttgcagacgcgtttaccaagagtcacttgttgcctatactgcgcgaggttctggaaaaccgcctgcagaaaaacagagctctgtttcagataagatggctgataatatttgctgccgaggcggcaaccgggctcatccctgccaggcgcccgctagccagagcctacttccacatcatggacattctggaggagagacattcccaagacgccctatacaaccttttggactgtatccaggagctcttcacccacatcaggcaggctgttccagacgcacagtgtccgcacgcctttctacagtccctgttcgtctttcaattccgccctttcgtactcaaacaccagcagggtgtaaccttgtttctagatggcttgcagacatccctccccccggtgataagtctggccaaccttggagacaagctgtgtcgtctcgagttcgagtacgacagcgagggcgacttcgtgcgcgtgccagttgcaccgccagaacaaccaccgcacgtacatctgtcgcatttcaagaagacaatacagaccatcgaacaggccaccagggaggccaccgtagccatgacaacaatcgcaaagccaatataccccgcctacatccggttactgcagcggctagaatatcttaacagactcaaccaccacattctcaggattcccttcccacaggacgccctttctgaactccaggaaacctacctggcggcgtttgcacggttgacaaaattggcagcggacgcagcaaacacttgtagctactccctcaccaagtactttggagttttattccaacaccagctggtccccacggccatcgttaaaaaactgctacatttcgacgaggctaaagataccacagaagcctttttacagagcctggcacaacccgtagtgcagggacaacggcagggggcggctggcgggtcgggtgtcctgacgcagaaagaacttgagctcttgaacaaaataaacccacagtttacagacgctcaggctaacattcctccatctattaaacgttcatattcaaataaatatgacgtccctgaggtctcagtcgactgggaaacgtactcccggtctgccttcgaggcaccggacgacgaactccgttttgtcccactgacgctggcaggcctccggaaactgtttgtcgaatag

SEQ ID NO: 10125 - DNA, 66 bp, unidentified; identical to SEQ ID NO: 330
  source 1..66: mol_type = other DNA
  misc_feature 1..66: note = Synthetic

SEQ ID NO: 10126 - DNA, 252 bp, unidentified
  source 1..252: mol_type = other DNA
  misc_feature 1..252: note = Synthetic
ctgatgacatctcaaagacttgcagaagggaattacagcctcccaccagactctttagctgtctatagaattactgattcttcctcacaatggttcgacattgggattaaccatgatggcttttcctatgttggacttcctgatctgccagctgacctaacctttcctcttacctcgaccttcatgggagtgcagctagcacgtgtcaagctagcgtctaaggtcaaagtcacaagaaattcaataaaatga

SEQ ID NO: 10127 - DNA, 81 bp, unidentified
  misc_feature 1..81: note = Synthetic
  source 1..81: mol_type = other DNA
aagacagatataacgatagttttatcactagtccagaatactatagcgcggaaaaatacatgtgtagatatactacactaa

SEQ ID NO: 10128 - DNA, 9420 bp, unidentified
  misc_feature 1..9420: note = Synthetic
  source 1..9420: mol_type = other DNA
atgatcgcgggcaccccaccgcactccacgatggaacgcgggggggatcgcgacatcgtggtcaccggtgctcggaaccagttcgcgcccgacctggagccgggggggtcggtatcgtgcatgcgctcgtcgctgtcctttctcagcctcatatttgatgtgggccctcgcgacgtcctgtccgcggaggccatcgagggatgtttggtcgaggggggcgagtggacgcgcgcgaccgcgggccctgggccgccgcgcatgtgttcgatcgtcgagctccccaacttcctcgagtacccaggggcgcgcggcggactgcgctgtgtcttctcgcgcgtatacggcgaggtgggcttcttcggggagcccgcggcgggcctgctggagacacaatgccccgcacacacgttcttcgccggcccgtgggccctgcgccccctgtcgtacacgctcctaaccattggccccctagggatggggctgttcagggacggcgacaccgcatacctttttgacccgcacggccttccggagggcacccccgcgttcatcgccaaagtgcgggcgggggacatgtatccatacctgacgtattacacccgcgatcgcccggacgtacggtgggcgggagccatggtgtttttcgtgccgtcgggcccggaacccgcggctcctgcggacttgacggccgcggctctgcatctttacggggccagcgagacttacctgcaggacgaagcgttcagcgaacggcgcgtggccatcacgcaccccctgcggggcgagatcgcgggcctgggggagccctgcgtcggcgtgggcccccgggagggggtagggggcccggggccacacccgcccacagccgcccagtcgccgccaccgacccgggcccgtcgcgacgacagggcctccgagacatcccgggggacggccggtccgtcggcaaaaccagaggccaagcgcccgaatcgggcgcccgacgatgtatgggcggtggccctgaagggtaccccacccacggatcccccctccgccgacccaccctccgccgacccaccctccgcgatcccaccaccgcctccctccgcccccaagacccccgccgcagaggcggccgaagaagatgacgacgacatgcgggtcctggagatgggcgtcgtcccggttggtcggcaccgggcacgctactcggccggccttcccaagcgccgccgacccacctggactccgccttccagcgtcgaagacctgacttcgggggagaaaacgaaacgctcggccccccctgccaaaaccaagaagaaatccacccccaaaggcaaaacccccgtcggggccgcggtccccgcctccgttccggagcctgtcctcgcctcggcaccccccgacccggccgggccgccggtcgccgaggcgggcgaggacgacgggcccacggttccggcgtcctcacaggccctcgaggcgctgaagactcgccgctcgcccgagcccccgggcgcagacctcgcccagctgttcgaggcccacccaaacgtggccgccacggcggttaagttcaccgcgtgctccgccgccctggcccgcgaggtcgccgcgtgttcgcggctcaccatcagcgccttacggtcgccgtatccggcctctccggggctgctggagctctgtgttatttttttctttgaacgcgtcctcgcctttctcatcgagaacggggcccggacgcacacccaggccggggtggccggcccggccgccgccctgctggagtttaccctgaacatgctgccctggaaaacggccgtgggggactttctggcctccacgcgcctgagcctggccgacgtggccgcccatctgcccctcgtccagcacgtgctggacgaaaactctctgatcggtcgcctggcgctggcgaagctgatccttgtggctagggatgtcattcgggagacggacgccttttacggggaactcgcggacctggagctgcagcttcgcgcggccccgccggccaatctgtatacacgcctcggcgagtggcttctggagcgctcgcaggcccacccggacaccctttttgcccccgccaccccgacgcacccagaaccgcttctgtatagagtccaggctctggccaaatttgcccgtggcgaagagattagggtggaggcggaggatcgccagatgcgcgaggccctcgacgccctcgctcgcggggtcgacgcggtctcacagcacgccgggcccctcggcgtaatgcccgccccggccggggcggccccgcagggggctccgcgcccaccccccctgggccccgaggccgttcaggttcggctggaggaggtgcggacccaggcccgtcgggcgatcgagggcgcggttaaggagtacttttaccggggggccgtatacagcgccaaggctctacaggccagcgacaacaacgaccgccggtttcacgtggcttcggccgccgtcgtgcccgtggtccagctgctcgagtccctgcctgtcttcgaccagcacacgcgggacatcgcgcagcgcgccgccattcccgccccgcccccgatcgcgaccagccccacggccatcctgttgcgggatctgatccagcggggccagacgctggacgcccccgaggacctggcggcctggctctccgtcctgacggacgccgccaaccaagggctgatagaacgcaagccactggacgagctggcgcgcagcatccgcgacattaacgaccaacaggcgcgccgcagctcgggtctggccgagctgcggcgcttcgacgccctagatgcggccctgggccagcagctggacagcgacgcggcctttgttcctgcgcccggcgcgtcgccctaccccgacgacggcgggctgtcgccagaggccacgcgcatggccgaggaagcgctgcggcaggcgcgggccatggatgccgccaagctgacggcagagctcgcccccgatgcgcgtgcccgtttgcgggagcgcgcgcgctccctggaggcaatgctcgagggagcgcgggagcgggcgaaggtggcccgcgacgcccgggagaagttcttgcacaaactccagggggtcctgcgccccctccctgactttgtggggctaaaggcctgtccggccgtcctggcgaccctgcgggcctccctgccggcgggctggtcggacctccccgaggccgttcggggggcgccccctgaggttacggcggcgctgcgggcggacatgtgggggctgctggggcagtaccgagatgccctggagcacccgactccggacacggcgacggctctgtctggcttgcatcccagcttcgtggtggtgctgaagaacctgttcgccgacgccccagagactccgtttctcttgcagttcttcgccgatcacgccccgatcatagcccacgccgtctcgaacgccatcaacgccggcagcgccgccgtcgcaacggcagaccctgcgtcgacggtggatgcggccgtgcgggcgcaccgcgtcctggtcgacgcggtgacggccctgggcgcggccgccagcgacccggcctcccccctggccttcctagcggccatggccgacagcgccgcgggatacgtcaaggcgactcggttggccctggacgcgcgggtggccatcgcccagctcacgaccttagggtcggctgccgccgaccttgtcgtccaggtgcgccgggccgccaaccaaccggagggagagcatgcctccctgatccaggccgcgacgcgcgcgaccaccggcgcgcgggaaagcctcgcgggccacgagggcaggttcgggggcctgttgcacgccgaagggacggccggggaccactcccccagcgggcgcgccctgcaggagctgggaaaggtcatcggcgccacgcgacgccgcgccgacgaacttgaggccgccaccgccgacctcagagagaagatggcggcccagcgcgcccgcagtagccacgagcgctgggccgccgacgtggaggccgtgctggaccgcgtggaaagcggtgccgagtttgacgtggtcgagctccgtcgcctgcaggcgctggcgggcacgcacggctacaacccccgggacttccgaaagcgggccgaacaggcgctgggaaccaacgccaaggcggtgacccttgccctggagacggcccttgcgtttaacccatacacccccgagaaccagcgccaccccatgctccccccgctcgcagccattcaccgcatcgactggagcgcggccttcggggccgcggccgacacgtacgccgacatgtttcgggtggacaccgagcccctggcgcggcttctgcggctggcgggggggctgctggagcgggcccaggcgaacgacgggtttatcgactaccacgaggccgtcctacacctgtcggaagacttggggggcgtgccggccctgcgccagtacgtgccgttttttcaaaagggctacgccgagtacgtggatatccgcgatcgcctggacgccctccgggccgacgcgcggcgcgcgatcggaagcgtggcgctggacctggccgccgccgcggaggagatatccgcggtgcgcaacgacccggcggcggccgccgagcttgtccgggcaggggtcaccctgccctgcccgagcgaggacgcgctggtggcgtgcgtggcggcgctggagcgcgtggaccagagccccgtgaaggacacggcgtacgccgactacgtcgcattcgtgacccgacaggacctggccgataccaaggacgccgtggtgcgcgccaaacagcagcgcgccgaagccaccgagcgggtcacggcggggctgcgggaggtgctggccgcgcgcgagcgccgggcccagctcgaggccgagggtctggccaatctgaagaccctgctgaaggtggtcgccgtcccggcgaccgtggccaagacgctggaccaggcgcgctcggcggaggagatcgcggatcaggtcgaaattctggtggaccagacggagaaggcgcgcgagctcgacgtgcaggcggtcgcctggttggaacatgcccagcgtacctttgagacgcacccgctaagcgcggccagcggcgacggcccgggcctcctgacgcgacagggcgcgcgcctgcaggcgctcttcgacacccgtcgccgcgtcgaggccctgcggaggtctctcgaggaggccgaggcggagtgggacgaggtatggggtcgcttcggccgcgttcgcgggggggcctggaaatcgcccgagggatttcgcgcggcatgcgagcagcttcgcgccctgcaggacaccaccaacactgtgtcggggctgcgagcccagcgggactacgagcgccttcccgccaagtaccagggcgtcctgggcgccaagagcgccgagcgggccggggccgtggaggagctcggggggcgcgtggcccaacacgccgacctgagcgcccggctgcgggacgaggtggtgccaagggtggcctgggagatgaactttgacaccctggggggcctgttggcggaattcgacgcggtggccggggacctggccccatgggcggtggaggagttccggggcgcgcgggagctcatccaacgccgcatgggcttatatagcgcgtacgccaaggccacaggccagacgggcgcgggcgcggcggccgcgcccgcgcccctgctcgtggatcttcgcgccctagacgcccgcgcccgggcgtccgccccacccggccaagaggccgacccgcagatgctgcgccgccggggcgaggcgtacctgcgagtgagcggaggcccggggcccctggtgctgcgcgaggccaccagtacgctggatcggccgttcgcccccagctttttggtcccggatggaacgccactgcagtacgcgctctgcttcccggccgtgaccgacaagctcggcgcgctgctgatgtgtcccgaggcggcatgcattcgccccccgcttccgacggacaccctggagtcggcctcgaccgtcacggccatgtacgtcctcaccgtcatcaaccggcttcagctggccctcagcgacgcccaggccgccaactttcagctcttcggacgctttgtgcgccaccgccaggcgagatggggggcctcgatggatgcggcggccgagctctacgtcgccctcgtcgcgaccactctcacgcgcgagtttgggtgtcgctgggcccagctggaatgggggggtgacgcggcggccccggggccgccgctcggaccccagagctccactaggcaccgcgtttcctttaacgagaacgacgtgctggtggcgctggtggccagctccccggaacacatttacaccttttggcgcctggatctggttcgccaacacgagtacatgcatctcaccctcccccgtgcgtttcagaacgcagcagattccatgctattcgtgcagcgcctgaccccgcatccagacgcccgcatccgcgtgctgccagcgttttcggccggaggccctccgacccggggcctcatgttcggcacgcggctggcagactggcgccgcggcaagttgtccgaaaccgaccccctggcgccctggcgctcggtccccgagctgggaaccgagcgcggcgccgcgctgggaaagctgagtcccgcccaggcgctggcggcggtgagcgtcctcgggcgcatgtgtctcccaagcaccgctctggtcgctctttggacctgcatgtttccggacgactacacagagtatgacagtttcgacgcccttctgaccgcgcgtctggaatctgggcagacgctgagcccctcgggggggcgcgaggcgtcaccccccgctccccccaacgccctctaccggcccacgggccagcacgtcgccgtgccggccgccgccacccaccgcacccccgcggcgcgcgttacggccatggacctggtgctggcggcagtgctcctgggcgcgcccgtcgtcgtggcgctccgcaacaccacggccttttcccgcgagtcggagctggagctgtgtctcacgctgtttgactcacgcgctcgcgggccggacgccgccttgcgcgatgccgtgtcgtccgacatcgagacgtgggccgtccgcctcctgcacgccgacctgaacccgatcgaaaacgcgtgtctggcggcacagctcccgcgcctgtccgcgctcatcgccgagcggcccctcgcccggggcccgccgtgtctggtgctcgtggacatctccatgaccccggtcgcggtgttgtgggaaaacccggacccccccggcccccccgacgtgcggtttgttggcagcgaggccaccgaggagctcccgtttgtggcgggcggcgaggacgtcctcgccgccagcgccaccgacgaggaccccttcctcgcgcgagctatcctcgggcggccgttcgacgcctccctcctgtcgggggagctattcccggggcatccggtgtaccagcgcgcccccgacgaccagagcccctcggtcccgaacccgacccccggccctgtggaccttgttggggcggagggctcgttggggcccggaagcctggcccccacgctattcaccgacgccacccccggcgagcccgtcccccctcgcatgtgggcatggattcacggcctggaggagctcgcgtctgacgactccggcggccccgcgcccctccttgccccggaccccctttcgcccaccgccgatcagtccgtccccacgtcccagtgtgcaccgcggccccctgggccggcagtcacggctcgcgaagcacgaccgggcgtcccggccgaaagcacgcggccggcgcccgtgggcccccgcgacgacttccggcgcttgccgtccccccaaagttccccggcgccccccgatgccaccgccccccgcccccccgcctcctcccgcgcttctgccgcttcttcgtccgggtcgcgcgcgcgccgacaccgccgggcacgctccctggcgcgcgccacccaggcttccgcgaccacccagggttggcggccgcctgccctccccgacacggtcgccccggttaccgatttcgcgcgccccccggcccctcccaaacccccagagccagcgccccacgctttggtgtctggtgtgcccctcccgctcgggccccaggccgccggccaggcttctcccgctctccctatcgatcccgttccgcccccggtcgcaaccggcacggttttgcccgggggcgaaaaccgccgccccccgctaacctcgggtcccgcgccaaccccccccagggttcccgtaggcgggccgcagcggcgccttacgcgccccgctgtcgcgtcgctgtccgaatcgcgggaatccctcccttcaccctgggaccccgccgaccccacggcccctgttttaggccgcaacccggccgagccgacctcatcctctcccgcaggtccctctcccccgcctcccgcggtccaacccgtcgccccgcccccgacgtcaggcccgccccccacatacttgacgctggagggcggtgttgcgcccggaggcccggtttcccgccgccccactacacggcagccggtggccacgcccaccacatctgcgcgcccccgggggcatttgaccgtcagccgcctgtccgcgccccaaccccagccccagccccagccccagccccagccccagccccagccccagccccagccccagccccagccccagccccagccccagccccagccccagccccaaccccaaccccagccccaaccccaaccccaaccccagccccaaccccagccccaaccccagccccaaccccagccccaaccccagccccaaccccagccccaaaacgggcatgtagcacccggggagtatccggcggttcggttccgggcaccgcaaaaccgcccatccgtcccggcttccgcgtcttccacaaatccacgcacgggcagctccttgtctggggtgtcttcgtgggcatcctccctcgcgctacacatcgacgctacccccccgcccgtgtcgctgcttcagaccctgtatgtctctgacgacgaagactccgacgccacctcgttgttcctctcggattccgaggccgaggcgctcgacccactccctggggaaccacactcccccataaccaacgaaccattcagtgcgttatccgccgatgactcccaagaggtgacgcgcttacaattcggccccccgcccgtatcggcaaacgcagttctgtcgcgacgctacgtgcaacgcaccggtcgtagcgccctggcggtactgatccgcgcctgttaccgcctacaacagcagttacagcggacccgccgggcgctgcttcatcacagcgacgccgtgctgaccagcctacatcacgtgcgcatgttactgggctag

SEQ ID NO: 10129 - DNA, 21 bp, unidentified
  misc_feature 1..21: note = Synthetic
  source 1..21: mol_type = other DNA
acgaactcgaaacaccactaa

SEQ ID NO: 10130 - DNA, 1512 bp, unidentified
  source 1..1512: mol_type = other DNA
  misc_feature 1..1512: note = Synthetic
atggaaatagtcacatacaagacggtttcagcgagatctccgaccgtcacctggtcatcgggattcggacgagctatagcttcgattcaaaaacggaatcaagataatatcaggaaacccctacgcttctacaccggtctcctacactgccttataaaacaatatgagcattgcctcgtcccgccaaataaatcaatacgtttcgacaaagggaagattgaagtcgctgccctaattctagatctcggacaccaggtacttggtcgtcagatacacgtacgacaacgtatctacagctggactagcatcacactccctaaactctttacccccaaagaactttactttttaatcgcctctccagaagaagaaaacatcgcatttaatccaactataacaaagggaggttggatctcggggagtttttcgtatcccgttgattacagatcaaacttttcgctaaccggaatgtctgcgaacatattaatggtgccgttcgtgccgtacaaatacccactaaactatgctcgcttcatatcatcaatcgacctgatgatactaaacgaacaatttccggaacacgaatgcggagatatacagattttaaaacagagaaactacctctacctgggagtcatcaaaaatcttacgtggaaaaaaagcgtcaccggcacaggtcagacggctccacatagaatcctaaaagcttcgttcataggaagttggccggacacctccctacctgacagagtggcactgcgtttctttaataacactaggtttacaatacactgccacgaattctcgattaacattgaaaatctcggtctcgtcaaaaacaaagaaaaagtttttggaacactagccactgtatgctgcgagcaaatcccttctttactaacaacggaaaatctaccgaaatatttaatagttcagtttgaagtggtaacgcaaatcgaagagcccgaaccgctgttattttccagtaacccgaaattatattttacaggagacgtactaaacgcaacgatacaactgcaacacaacccaaattattacgagctacttgtacacgcaccatatgacatccatttctatccaagccgatgccacatagtaattctacctatccgatatttcacaaagcccgacaagcaaatcctcatatccggctaccagaacgaaggattcttcgaaacccaggtgatgctgtgggccccgggaacacctttgcacattacgctgcgttcattttctccaaatctgatcctgcctcaaagcacacctatcgcgaccctgttttatgtagaaagaatgacaagccagaacaatgaacaaaaagacgtaatcgcaaagctgtctgagaatgggcattttattggcaacctgaaactccccagagaaaattttttacatcacgacgcgatcgctgactcgcctttggcttctatatccaaagactcagcgactcccggcccagagacggtgttttcatcagtttccccgtcttga

SEQ ID NO: 10131 - DNA, 1380 bp, unidentified
  source 1..1380: mol_type = other DNA
  misc_feature 1..1380: note = Synthetic
attcacttctattcagtcaaaatgtttaactatctggaaaatgaggaggtagctctcgatgaacttaaacagatgttgaaagacagagatcctaatgataccaggaaccaattcaagaataatgctttacatgcatacctttttaatgagcattgtaataatgtcgaggtcgtcaaactactactagacagtggcactaatccattgcacaaaaattggagacattttaccccattagaagaatacacaaatagtagacatgttaaagttaataaggatatagcgatggctctactagaagccactggatttagcaacataaataactttaatatattcaactatatgaaatccaaaaatgtaaacgttgacttaataaaggtgttggtagaacatggatttgacttgagtgttaaatgtgaaaaccatcgttcagttatagaaaattatgtaatgacagatgatcctgttcctgaaattattgatttgttcatagaaaatggctgcaatgttctttatgaggatgacgagtatggatacacgtatgatgattatcaaccacaaaattgcggtaccgtattgcatttgtatattatctctcatctgtattcagagtcggatacgagagcatatgtgcgtccggaagttgttaaatgtctaattaatcacggaatcaagccgtcttctatagataaaaactattgtacagctcttcaatattatattaagtcatctcatatagatatagacatcgttaaattgttaatgaaaggaatagataacactgcttattcatatatagacgatctaacacgttgcactcgagtaattatggctgattatctgaatagtgattatagatacaatgaagatgtgaatttagatttggtcaaattgtttttggaaaatggaaagccacacggaataatgtgtagtattgtaccactatggagaaatgataaggaaaccatctctttgatattgaaaacaatgaactcgaatatcctccaacatatactaattgagtatatgacattcgacgatatcgatatccatctagtggaatgcatgttggcatatggagctgtggtaaataaagaggctatacacggatactttagaaatattaatattgattcttacacgatgaaatatctactaaaaaagaaagggggagatgtcatcaattatctcgatgatggtgagatcccaattggacacctatgtaaatccaactatggatgttataatttctacacttatatatacaaaaagggtctttgtgtcatgtcttatgcttgcccaattcttaatactataaacatttgcctgccttatcttaaagacattaacatgattgacaaacgaggacaacaataa

SEQ ID NO: 10132 - DNA, 10212 bp, unidentified
  source 1..10212: mol_type = other DNA
  misc_feature 1..10212: note = Synthetic
atgtcaagtaaggaagcactgaagaagaagggaatttccctgggaggaggaggaaaacggggctttgagatgaaaaaggccccacaacataacaacagtaatagacaacttcggcggtcactgttcaggatggatgtcggacgagcccttgagctaatgttggcatcaattgtcaacgcgatcaggggtctcattcagcgagtgtctcgtcttgagacgcgcgttggactcctagaacggaaaaagacacgatcgatctactacagcttgccaatgttcacactattgtcattggcttgttgtctgaccctgactttctctcccggaaagagtggaaatcaactcatcgggggaggacggaactacactggactgatgaacttgttcaagctgccagaggacatgtgcccacgaggaatccatgtggagaaacggtgccccaaagtagaggacttgagcaccgttgatggcattgactgtgcctcaacgtacattgagttcacactcgcgtacacacgatgcgaagagagggtgcgacgtaggcgggacactccaaaggccacggaaaccgtgaaggataggctgaaagagaacatggctgaccttgaggcctccgccttcacctggttgaagaaaaacacgttcacaacaatggttttcatcatcgttgtcggaattgcactgaaatggcccctctggatcgtcgccctgctggtggcagcgtgttggagtaccgtgttggctgaccatactgaaccattcatgacaatggatgggagggtccagacgttgatcaaaacccaagtgtacccccatggttcggtttccatcatgacgcgagcgggacttcttgatatcagagccggtgcattctttgtctccgagggacagggagtgaaatcattgctctctgattgtcacgtgaacgcgtcgtattcaacggactgctgccctatgggatgtgacattgacatggatgcgctgaatgccgttggaagagtgtgtgttgaacgcacgcttcaacgtggctgggcatctggatgcctggaatttggaatgggagctgtggctacatgtatcgaagtatcatgctctcgtgaactccgagtatcgagctttggcgagaagaacatcaaggttaacgtgactggaagctttcacagtgaaaccacgaacttgaccctgattccagccgcagttcgaaccctctcttttggagacctcggatacgccacaatttcttgtggacttggattgtctgatgctctcaacatgtacatcgtggctggagagaagcataaagttcttctcccgaaaggcactattgacgtgtggactggtttgttcaaggttggtgccgtcatacacggggctgacacggctgttctctgggggaagaccactcccactgaagtcaaggttaaggcgatcattgacccgtctgtggcctgggaagaaggcataaacatcgagaaggggttgtcagatggaatgttccttaaatgcgacatcgtggtggacaaactcttggttgagacaactcgcaattgtgataaagttggtgagctgatcttcacccaagaccagattggaactagtggacgcgtgcaagtcacgctgtctgcccctgctggggcagattgcgtggtcgttctcacatgcgagggttgtagcctgccggctgcaagtgtgttctttgccaagggaacgcagatctcgtccacctcagttgtttgtgacgaaacgtctgcaaagatttcggctggaaaaaaggtcgtttacgtgaaatgtaaggtctccagaatgatttcggcttggaacatcgtgctgaacactgctgatcgttatcaacgccatggtgttgaaggcatcaaacattcgttctttgatctaactggcggttggggactccacctattttcagggtggtgggtccaaatcgccattgtcttaatcggcttgacgctgctcgttgacaaacgcgtgcttgttctgttggttctcgttggatacatcgtgtatgtcaaggctgactacggatgcggcgtcgacacccagcgcaagacgtttacctgtggtgatgggttgtttgtcttccgcagtttgttcaactggcccacggccgaagagcaggtcgagatcgataactacggattgttcgaaggttatgtcgataacatgttcaaaaagtacaacaaagtgtgcgtcttgtgcgaggatgttctgcaatgtgcagccgctcgagccgccgctgagtactacgtgtacaaccatgctggcgtccattacaacttgtccttgtcgcaccataggcactttccaagcgtggagaagtcgattgtgagggtaaaaattggtgatgttgagacccaattggccgttagagaacaagatcgtgaggtggatgcggaacagctagggttcttgaagaaaccgctgtggcaatacggacataaaccagagaatgtctctgacaaggtaatccgtgttgtgtccagcggaaaggcacgaaccaaggtttgtcagaaatcagtggcttttcagtacgacttcaccggctttagacgccgcctttgggggtcttcgctaggagtgtcgatttcgtccaccatgagacggacttgccccatgtatttggcaggcttggtcgtgaagaacaaccaaaccatctacacggatggaagcatgtggatgcgtagcgagttcaacaaaacgtacaccattactgagttgagcatgcagcaatcccactcatgcatctggccaccaaggttcacggctgaaccgctcgactggactgacaagcgcttgtttgttccaccagcgtggggatcacccctatcagccgccaaccacgttcctgggtaccttacccaaacggacttcccgtgggacaaatatcccatcgagatgatcaaaggagctgtgcctggcaccacggttgagatgacgagcaaatgcaaaggccgcgggaaggcgttgaaagtggaggctaacgccttcagcaagtggtgctgcaagacttgcctggaggaaggaaacgtgttccacttcagaatcggaactgatttgtactatccaatggagatccggacctatgaccagccagaaagcgcaaagacagaaaagaaaactgtattggtcgaggaggaggtcgtagctactgtgagtcaggatgacatccaaacggagttgccaaagacctgggacgctggtttctctcagacgtatgctgaagccagccctctgaaaatgtcaaaccaggattttcggcttggccgcgtcgatcatataagccgcatgttagtgttgtcaatagcgctcatgtgcatcacggcacgcacgagacggaagtggctcttccgagctgtcggtacatggttggctttccttttaattggtatgcctttgctatcggattggcaatcatggggttggctcatcttgtcacaagggattgcgggacacaaagggtacaccatgtggatgtgccacctttggatggccattcacaccgggaccggtcacatatggtttctcgcgatgatgtggagacgccagatgtgggctccgctggatgtcaaatgcttcgtgttgattctccaatgggcgtatgcgataatagcacacaaacttggtcaatttggctccctcttggatgctgggctcatgattgcggccgggatgggtctatcgacggcagccgcgaacatgggatttcacgaatggctgatctcgtccactctcttggttgcatcttggcaaaccgcgatcttttctgtagcaatcatattggcagtgatcacagtgagagcgttaaaagtctcctatcaagcgcactcatccgcgtggagaaatggactgaggagtgccacgaccctatgtgggctgctgcgggccctgcaacgcaatacccgcatgctcctgctgaatggcccttggctagtacttggatgcttgttggtgctgtcacgggactggtcactagcggcgaacggtttgatgactcaacgctatgttcccactttcgcaatgacatgcttggccttcttggcgagaccactgtcgtgttgcgttcgtgggtcgatcgattggatatatcaatgcaaattcgtcgcaggatctggaatcgttatagccgccgtttggctgctagaagaagctcagcgccctgaactcgccatggctattcttgttctggccactgctgtctggttttattttagcatgactgccaaggtaagcctggagctggtgcaaatacccggagattcttgtaccatcggtgaaacgaaacaattttctcccgaaagacgattgacaggaacacgaggacaccatggggttgaggtccacagtgagcaagagaagaacggcgttataatgaacatctgcgttggcgtcgtgcttttgctcgtgttttgcttcaactggcaggttggaatagtgggagccctttggtatgtgttcagtggatccaacaagtttattcccgcgctggcaaacgcggtgttccggtggaatttgagatctgaggatttctttctctcgaactcgtttgaagaagaacagttgcaggtgcacaccacgtttgactatctgccccaaggagcatactacatcaagagtgtgactcctttttcatcggtcatctgcgggtccggttttgccaaagaaggagtgtttcacacactctttcacgtcacaaagggcaatcctgtgaaatggcgtgggaggtatgttagtttgtcgggtggatcagtcacacgtgacacggcttgttatggtggaccttggaaactcaagtttgaggagtccgatgtttacaccatcaaggcgtgcctgacggatgggactgtccaatttgacacttacgaaaggcaaacaatcaacatcgacggggaagaagtaccattgattcctactgactatggcaatggatcgtctggatcaccggttttttctcggagtggagaggcagttgggctgtatggtttcggattctatgtctcaggacagtactactcgcttgtctcaacggaccaggttcttcgagacgatgaaatgccacaaatactggactcaacgagcagggtgttcattgattggcatcctggaaaggggaaaacccgtggtgtggttgttgatgaagcaaagaaggctgtgcttggcaatcataggatcctcgttctcacgcccacacgggtggtaaagaacgaggtcatcaaagtgctcaaagaaaggcttccagatctcaaagttggcgatgtgattgggcatccgatgaacattgtaaccgttgcttgccatgccacttttgcacaacatgccttctcggatggactgaagaagtttaagtattcaaccataatcatggacgaatgtcacttcctggaccccatgtcaatagctgcaagaggaatcatggaatcgttgttgcaacgaaacacacgcttagtttacatgagtgctacgattcctggacgttcaccagcaattggcaataactacgcgattgatgtcgaccatgtgaacttcccccgtgagatgacctcgcagttcgtcatggagcacgctggagcaaaaacggttgtttttgttcccacaaggaaggattgtgacagattgcaccatgccactccgaacagcatctcgctacacagcgactccttcgaggagaacgctccgaaagcagtgaacgacgatgtgaaagtcatctacacaacggacatcagcgagatgggagcaaacttcaacgttgacactgtcattgacacacgaaccaccatcaaaccggtcctggcccgaatcaactttgttgatctcgaaaaagtcggagcacccctatcttctcgtattcaacgacgtgggcgcactggtcgccgtgacaaaggtaggtatgtgattccgatcgatgatccggtgccgtcagattgtttgaagtggatctgctggactgaggcacaaatgatcctagatcaggttggctgcgggccaatgccggaggaggctacctattttaatgtgccgggatcatacacgttgccagaaaaacaacgacgtttgtttctggagctttccgagaagcctgtcacgtactggctcgcttggcactgggtaagcaacctgcatgacctcgatggaatactcttccaaggagacactgatggagtgttgaaaatacccacgagccacggaatccagcggtaccgacccaagtttgttgacaggcggttcgaggatgctccagatgacatgaagattgcatccataacaaaactgttgaaatgccgtagtgtgacagtcgtggactttgtcatggccgtgcagcacttcatagtctctggggctttcaagcaaaagttttttgaggttcttgagagtgcgtacatcgcaacaaggctaggagatgatgacattccaactatgaaaaaagacaaaatgatctcggccctcatggcgatctggatgggtgggattttcgccgtgatcctgtatttggtcatccttttgtttctgtctcttggaaagtacataacacgcgacaagaatccgcaagtgatcaaccagtacgacgaaattcctaaggcatggggcacttgttgggctctcttaagctaccacatgggtgtcccctttgccatgattttcgttattggcggagcaatcactctgataaagatcatagctggaaacaatacaacgagaagtattgagtacgttgtgataactaggttcatcgtgacgggaatgatcgtgattctaggattgatctgctgggagaaagaactgaccccaaatatcaaacgagatctcacccacatgctggctaccgtttctggaggctcgttgccgataagcccgaccgctaaaccagcatggaatctccctacctggagtcacgagtttttgatcaacgtgtatgccgttgttgttggactaaaccaagtggtgatcactctcacggagcacgatgtggcgaaaaagtacattgctgatgctgcacgctcagctgctgtgggtggaatgcggttatccaacataccattctatgcggttgtccctctgcttccggctgtgttctacggaaccactttgatctctcaggttgtcggatgggtaacgggattttttgttcttgccctcttctcggccgagcacaagtacaacttgactgacaaggtgctgaacaactttaatgccgaaaaacaaaagcgtgaggttgaggccttaatcggccgtgatcagcgtgacaggcgacggaacatgtttgccgctgtgatggcaggcctagcagtcatttgggcattcttggttcaggacctggcttctctttttgtttgcattgccgtttgcattcactccttgtgggtcgttcttgatcccaggaatcccaaccacccggacatggaactaggtcacatcctgctgttctttggagtcataaggatggagcaaaccaccttgtacgtggcttgccttctcctccgaattctcctcggtggattggaaaagagcatgaggactggaggcggtttgaactccattaacaaagctcctgttggtggtatgggatacaggtggaaaagagaattgaacaagaagagcttgtctgagttcaatgactaccgatcacgaggcgttaatgagacagaaagaggcgattacgtttcccgaggcggcttgaaaatggatgagctgataacgaaatttgggtgggaacccaaaggacgtgtcgttgatctagggtgtggacgaggaggctgggcgcaacgtttggtagccgatcggcgagtcacgaaagtcaatgcttacactcttgggggagcggaacgtgagaacccacaaaagttcacgacgactggatacaacttggcgaccttcaagaccggagtcaacgtctatgcgatgaatccacagagtgcgaacaccatagtgtgcgacatcggagaaagtgatcccaaaccagaagttgagttcagtcggaccatgaaagttctgaacctgctggaagactggttggacaagaaccctcaagcggcgtttgtgtgcaaggtactggcgccatatcatcttgatgtgttgcggaagattgagggcttgcagcacaagtttgacggccgtttggttaggttgtcacacagtcgaaattcgaccgctgagatgtactatatctctggaacccgccaaaatcccgttgccgccgtctacgctgtgttggcagttctgtgtcgacgattcacgatcaacgaccctgaatttcgcattgacccaccgaaattgtcccaaggaacacgttgtgatccttcgtcaaaagtcaaggaactcgatgaggacaaagtgagcactcgcatccgacggcttaaagacgagaatgctcggacctggttttacgacgaggaacatccctacaatagcttcaagtactatggatcattcgctgcggacacgcggtcaggtggtggacagacggtaaatcccatgatccgacgtgtcatgtggccatgggaagaacagaaaagaacgacctcctatatgatgacagatgtctccacgtacgcccagcagaagatcctccgtgagaaggttgacacgttgacggaagaacccccggcgaacataaaacgggttaacagactcatcatgaagtattttgtgcgcatgttcaaggaccgcggtttgaaaccacgtatcctcacagccgcagactatgccagaaacgtgcaaagccatgccgccattggggcgtggagcaaggaaattccgtggaccagcgtgaatgaagcgttggctgatagtgaattctggaacatggtggatcgcgaacgggccaaacatctggcgggggattgcgaaatgtgcatctataacacaatgggaaagaaggaaaagaaacccactgtggccggattggcaaaaggatctcgcacgatttggtacatgtggctcggcagtcgtttccttgagtatgaggcattgggattcttgaatgaggaccactgggttgcccgtgaaaactttcctggtggagttggaggtgagggagtcaactacttcggatactaccttgaggagattgctaagaaagggaagtatctcgtggcggatgatgtcgctggatgggacacgcggataacccaggccgacttggatgacgaggagtacttcatactcgaacagataaccgatccataccaccggaaattggtgaaggcgctgttcatgttcgcatacaagcacatcgtcgccctgtttccgagagaccatccccgctttgctagcaacacagtcatggacgttgtggttcgcacagaccagagaggctcaggtcaggtggtcacctattcgatgaacaccataacaaacggaaaaaccctggtgggccgtgagcttgaagcttgtgggcttctggaagcaagcgatgaggagatctggcgatggctgttgttgtattgtgttgcgttcttgagccgatccgttgtggctggcgacgatgcagttgtcgcgacagacaatccacagttcatgtcatccctcaagtacatcacactggcaggaaaaattcggaaggacatcgacttggaaaccccgtctaggttctcaaccaattgggaagaggttgagttctgctcgcaccactaccaccggctgcacatgaaggatggaagggaaataatagcgccttgtcgtgatcaattcgaaatcatcggaagaagcagaatccagaaaggaggcgttgtttcccttggagacagcgggtgtctcgccaaagcgtatgcgcaaatgtgggctttgtatttcttccatcgtcgtgatctgcggttaggctttgctgccataacatcatgcgtgcccaaggattgggttccaaccggacgcaccacgtggtctgtacaccacgggagtgagtggatgacgactgaggacatgctatccgtttggaacagagtttggatcgaaaacaacaagtggatgtcagacaagactccggtgtgccactggggtgaggttccgtacctgcacaagaaacaggacatagcttgtggaagccagatcgggtctcatgcacgctctgtctggtctcgggacatggagtcgcatgttgaaagggttagaaaaacggtggtgctagagaagggacaccaggagtttccgaacgctcttggaatgttcgcgcgatacgcaaagccggaagtgtcattgttcagatga

SEQ ID NO: 10133 - DNA, 4176 bp, unidentified
  source 1..4176: mol_type = other DNA
  misc_feature 1..4176: note = Synthetic
atgtcaagtaaggaagcactgaagaagaagggaatttccctgggaggaggaggaaaacggggctttgagatgaaaaaggccccacaacataacaacagtaatagacaacttcggcggtcactgttcaggatggatgtcggacgagcccttgagctaatgttggcatcaattgtcaacgcgatcaggggtctcattcagcgagtgtctcgtcttgagacgcgcgttggactcctagaacggaaaaagacacgatcgatctactacagcttgccaatgttcacactattgtcattggcttgttgtctgaccctgactttctctcccggaaagagtggaaatcaactcatcgggggaggacggaactacactggactgatgaacttgttcaagctgccagaggacatgtgcccacgaggaatccatgtggagaaacggtgccccaaagtagaggacttgagcaccgttgatggcattgactgtgcctcaacgtacattgagttcacactcgcgtacacacgatgcgaagagagggtgcgacgtaggcgggacactccaaaggccacggaaaccgtgaaggataggctgaaagagaacatggctgaccttgaggcctccgccttcacctggttgaagaaaaacacgttcacaacaatggttttcatcatcgttgtcggaattgcactgaaatggcccctctggatcgtcgccctgctggtggcagcgtgttggagtaccgtgttggctgaccatactgaaccattcatgacaatggatgggagggtccagacgttgatcaaaacccaagtgtacccccatggttcggtttccatcatgacgcgagcgggacttcttgatatcagagccggtgcattctttgtctccgagggacagggagtgaaatcattgctctctgattgtcacgtgaacgcgtcgtattcaacggactgctgccctatgggatgtgacattgacatggatgcgctgaatgccgttggaagagtgtgtgttgaacgcacgcttcaacgtggctgggcatctggatgcctggaatttggaatgggagctgtggctacatgtatcgaagtatcatgctctcgtgaactccgagtatcgagctttggcgagaagaacatcaaggttaacgtgactggaagctttcacagtgaaaccacgaacttgaccctgattccagccgcagttcgaaccctctcttttggagacctcggatacgccacaatttcttgtggacttggattgtctgatgctctcaacatgtacatcgtggctggagagaagcataaagttcttctcccgaaaggcactattgacgtgtggactggtttgttcaaggttggtgccgtcatacacggggctgacacggctgttctctgggggaagaccactcccactgaagtcaaggttaaggcgatcattgacccgtctgtggcctgggaagaaggcataaacatcgagaaggggttgtcagatggaatgttccttaaatgcgacatcgtggtggacaaactcttggttgagacaactcgcaattgtgataaagttggtgagctgatcttcacccaagaccagattggaactagtggacgcgtgcaagtcacgctgtctgcccctgctggggcagattgcgtggtcgttctcacatgcgagggttgtagcctgccggctgcaagtgtgttctttgccaagggaacgcagatctcgtccacctcagttgtttgtgacgaaacgtctgcaaagatttcggctggaaaaaaggtcgtttacgtgaaatgtaaggtctccagaatgatttcggcttggaacatcgtgctgaacactgctgatcgttatcaacgccatggtgttgaaggcatcaaacattcgttctttgatctaactggcggttggggactccacctattttcagggtggtgggtccaaatcgccattgtcttaatcggcttgacgctgctcgttgacaaacgcgtgcttgttctgttggttctcgttggatacatcgtgtatgtcaaggctgactacggatgcggcgtcgacacccagcgcaagacgtttacctgtggtgatgggttgtttgtcttccgcagtttgttcaactggcccacggccgaagagcaggtcgagatcgataactacggattgttcgaaggttatgtcgataacatgttcaaaaagtacaacaaagtgtgcgtcttgtgcgaggatgttctgcaatgtgcagccgctcgagccgccgctgagtactacgtgtacaaccatgctggcgtccattacaacttgtccttgtcgcaccataggcactttccaagcgtggagaagtcgattgtgagggtaaaaattggtgatgttgagacccaattggccgttagagaacaagatcgtgaggtggatgcggaacagctagggttcttgaagaaaccgctgtggcaatacggacataaaccagagaatgtctctgacaaggtaatccgtgttgtgtccagcggaaaggcacgaaccaaggtttgtcagaaatcagtggcttttcagtacgacttcaccggctttagacgccgcctttgggggtcttcgctaggagtgtcgatttcgtccaccatgagacggacttgccccatgtatttggcaggcttggtcgtgaagaacaaccaaaccatctacacggatggaagcatgtggatgcgtagcgagttcaacaaaacgtacaccattactgagttgagcatgcagcaatcccactcatgcatctggccaccaaggttcacggctgaaccgctcgactggactgacaagcgcttgtttgttccaccagcgtggggatcacccctatcagccgccaaccacgttcctgggtaccttacccaaacggacttcccgtgggacaaatatcccatcgagatgatcaaaggagctgtgcctggcaccacggttgagatgacgagcaaatgcaaaggccgcgggaaggcgttgaaagtggaggctaacgccttcagcaagtggtgctgcaagacttgcctggaggaaggaaacgtgttccacttcagaatcggaactgatttgtactatccaatggagatccggacctatgaccagccagaaagcgcaaagacagaaaagaaaactgtattggtcgaggaggaggtcgtagctactgtgagtcaggatgacatccaaacggagttgccaaagacctgggacgctggtttctctcagacgtatgctgaagccagccctctgaaaatgtcaaaccaggatttttcggcttggccgcgtcgatcatataagccgcatgttagtgttgtcaatagcgctcatgtgcatcacggcacgcacgagacggaagtggctcttccgagctgtcggtacatggttggctttccttttaattggtatgcctttgctatcggattggcaatcatggggttggctcatcttgtcacaagggattgcgggacacaaagggtacaccatgtggatgtgccacctttggatggccattcacaccgggaccggtcacatatggtttctcgcgatgatgtggagacgccagatgtgggctccgctggatgtcaaatgcttcgtgttgattctccaatgggcgtatgcgataatagcacacaaacttggtcaatttggctccctcttggatgctgggctcatgattgcggccgggatgggtctatcgacggcagccgcgaacatgggatttcacgaatggctgatctcgtccactctcttggttgcatcttggcaaaccgcgatcttttctgtagcaatcatattggcagtgatcacagtgagagcgttaaaagtctcctatcaagcgcactcatccgcgtggagaaatggactgaggagtgccacgaccctatgtgggctgctgcgggccctgcaacgcaatacccgcatgctcctgctgaatggcccttggctagtacttggatgcttgttggtgctgtcacgggactggtcactagcggcgaacggtttgatgactcaacgctatgttcccactttcgcaatgacatgcttggccttcttggcgagaccactgtcgtgttgcgttcgtgggtcgatcgattggatatatcaatgcaaattcgtcgcaggatctggaatcgttatagccgccgtttggctgctagaagaagctcagcgccctga

SEQ ID NO: 10134 - DNA, 123 bp, unidentified; identical to SEQ ID NO: 344
  misc_feature 1..123: note = Synthetic
  source 1..123: mol_type = other DNA

SEQ ID NO: 10135 - DNA, 123 bp, unidentified; identical to SEQ ID NO: 344
  source 1..123: mol_type = other DNA
  misc_feature 1..123: note = Synthetic

SEQ ID NO: 10136 - DNA, 15 bp, unidentified
  source 1..15: mol_type = other DNA
  misc_feature 1..15: note = Synthetic
atgttagcgctttaa

SEQ ID NO: 10137 - DNA, 45 bp, unidentified; identical to SEQ ID NO: 349
  source 1..45: mol_type = other DNA
  misc_feature 1..45: note = Synthetic

SEQ ID NO: 10138 - DNA, 30 bp, unidentified; identical to SEQ ID NO: 351
  source 1..30: mol_type = other DNA
  misc_feature 1..30: note = Synthetic

SEQ ID NO: 10139 - DNA, 30 bp, unidentified; identical to SEQ ID NO: 351
  misc_feature 1..30: note = Synthetic
  source 1..30: mol_type = other DNA

SEQ ID NO: 10140 - DNA, 180 bp, unidentified
  source 1..180: mol_type = other DNA
  misc_feature 1..180: note = Synthetic
atgcatggtgaaaagtattacaggactgtggcttcccgtgtctccaaggaggccgcccaaagtgggatagaaatggtagtcccacgccaccgatctgttctgcgctgggtgcgctttggaacaatggatgctgagaccccgcaggaacgctcagcagtctttgtgaatgaggatgagtga

SEQ ID NO: 10141 - DNA, 180 bp, unidentified; identical to SEQ ID NO: 10140
  misc_feature 1..180: note = Synthetic
  source 1..180: mol_type = other DNA

SEQ ID NO: 10142 - DNA, 66 bp, unidentified
  misc_feature 1..66: note = Synthetic
  source 1..66: mol_type = other DNA
atgcagatggatcataatcagagagcttcttggaagacgatgatctatagaggggtattattgtga

SEQ ID NO: 10143 - DNA, 159 bp, unidentified
  misc_feature 1..159: note = Synthetic
  source 1..159: mol_type = other DNA
ataggattgagagaagaattagacgtggcattgagctcaagataccaagtcagcggcgtcggaaacatcactagagcgatgtccacgctgtctaagagtttgaagtcttttaggaaaataagaggtcccatcatacatctgtacggcggtcctaaatag

SEQ ID NO: 10144 - DNA, 159 bp, unidentified; identical to SEQ ID NO: 10143
  source 1..159: mol_type = other DNA
  misc_feature 1..159: note = Synthetic

SEQ ID NO: 10145 - DNA, 231 bp, unidentified
  misc_feature 1..231: note = Synthetic
  source 1..231: mol_type = other DNA
atgcatgccaattatctgttttggagaaatagtacaatgtggaatggaggggcttacagtctctttgacatgagtaagttccctttgaaagcggctggtacggctgttgttagccttaaaccagaccaaataaatgacttagtcctctccttgattgagaagggcaagttattagtgcgtgatacacgcaaagaagtttttgttggcgatagcctagtaaatgtcaaataa

SEQ ID NO: 10146 - DNA, 27 bp, unidentified
  source 1..27: mol_type = other DNA
  misc_feature 1..27: note = Synthetic
atggagcaagtgctcacaaaccagtga

SEQ ID NO: 10147 - DNA, 114 bp, unidentified; identical to SEQ ID NO: 365
  misc_feature 1..114: note = Synthetic
  source 1..114: mol_type = other DNA

SEQ ID NO: 10148 - DNA, 552 bp, unidentified
  misc_feature 1..552: note = Synthetic
  source 1..552: mol_type = other DNA
atggaccacaagcagtacctgctaactatgttcttcgcagaggacagctccttcttcaagtacctgtcggagcaggacgacgacacagccctggacgacgtaatgattgtcaagcactacatggacgtgctgctggccctgctagtgcgcgccaagaacaagctcgaggcgcttgggcactgctacgagccgctgtccgaggacttccgcgcgctcttgcatgtgcgccagctgcgagaactacgccaggtgcacgaccgcgcgctgctgcgcctggacgcagagcccgtgcatgtgagccatggctaccttgcggacttcgtgctcagcctagtacggctggcgcgcgagctgggggagctgtgcgtgccaccgcgcacgcgctacgtggacccgcgcgacgaccctacgctggcctacgtgctggagatcctgcacggcacggacgtcgactctggcgcgggagcttacgctctcgcgcgcccggaagccgaaaaaataagtcctgtccggagagcgctgcctggctgcagtccttctcgccgcccttaa

SEQ ID NO: 10149 - DNA, 15 bp, unidentified
  source 1..15: mol_type = other DNA
  misc_feature 1..15: note = Synthetic
gtgtcggtgtggtag

SEQ ID NO: 10150 - DNA, 2139 bp, unidentified
  source 1..2139: mol_type = other DNA
  misc_feature 1..2139: note = Synthetic
aagactgtcgccactatgtcctccgcacttcggtctcgggctcgctcggcctcgctcggaacgacgactcagggctgggatccgccgccattgcgtcgtcccagcagggcgcgccggcgccagtggatgcgcgaagctgcgcaggccgccgctcaagccgcggtacaggccgcgcaggccgccgccgctcaagttgcccaggctcacgtcgatgaagacgaggtcgtggatctgatgaccgacgaggccggcggcggcgtcaccactttgaccaccctgagttccgtcagcacaaccaccgtgcttggacacgcgactttttccgcatgcgttcgaagtgacgtgatgcgtgacggagaaaaagaggacgcggcttcggacaaggagaaccagcgtcggcccgtggtgccgtccacgtcgtctcgcggcagcgccgccagcggcgacggttaccacggcttgcgctgccgcgaaacctcggccatgtggtcgttcgagtacgatcgcgacggcgacgtgaccagcgtacgccgcgctctcttcaccggcggcagcgacccctcggacagcgtgagcggcgtccgcggtggacgcaaacgcccgttgcgtccgccgttggtgtcgctggcccgcaccccgctgtgccgacgtcgtgtgggcggcgtggacgcggtgctcgaagaaaacgacgtggagctgcgcgcggaaagtcaggacagcgccgtggcatcgggcccgggccgcgttccgcagccgctcagcggtagttccggggaggaatccgccacggcggtggaggccgactccacgtcacacgacgacgtgcattgcacctgttccaacgaccagatcatcaccacgtccatccgcggccttacgtgcgacccgcgtatgttcttgcgccttacgcatcccgagctctgcgagctctctatctcctacctgctggtctacgtgcccaaagaggacgatttttgccacaagatctgttatgccgtggacatgagcgacgagagctaccgcctgggccagggctccttcggcgaggtctggccgctcgatcgctatcgcgtggtcaaggtggcgcgtaagcacagcgagacggtgctcacggtctggatgtcgggcctgatccgcacgcgcgccgctggcgagcaacagcagccgccgtcgctggtgggcacgggcgtgcaccgcggtctgctcacggccacgggctgctgtctgctgcacaacgtcacggtacatcgacgtttccacacagacatgtttcatcacgaccagtggaagctggcgtgcatcgacagctaccgacgtgccttttgcacgttggccgacgctatcaaatttctcaatcaccagtgtcgtgtatgccactttgatattacacccatgaacgtgctcatcgacgtgaacccgcacaaccccagcgagatcgtgcgcgccgcgctgtgcgattacagcctcagcgagccctatccggattacaacgagcgctgtgtggccgtctttcaggagacgggcacggcgcgccgcatccccaactgctcgcaccgtctgcgcgaatgttaccaccctgctttccgacccatgccgctgcagaagctgctcatctgcgacccgcacgcgcgtttccccgtagccggcctacggcgttattgcatgtcggagttgtcggcgctgggtaacgtgctgggcttttgcctcatgcggctgttggaccggcgcggtctggacgaggtgcgcatgggtacggaggcgttgctctttaagcacgccggcgcggcctgccgcgcgttggagaacggcaagctcacgcactgctccgacgcctgtctgctcattctggcggcgcaaatgagctacggcgcctgtctcctgggcgagcatggcgccgcgctggtgtcgcacacgctacgctttgtggaggccaagatgtcctcgtgtcgcgtacgcgcctttcgccgcttctaccacgaatgctcgcagaccatgctgcacgaatacgtcagaaagaacgtggagcgtctgttggccacgagcgacgggctgtatttatataacgcctttcggcgcaccaccagcataatctgcgaggaggaccttgacggtgactgccgtcaactgttccccgagtaa

SEQ ID NO: 10151 - DNA, 1215 bp, unidentified
  misc_feature 1..1215: note = Synthetic
  source 1..1215: mol_type = other DNA
atgttacgagttccggacgtgaaggctagtctagtagagggcgcggcgcgcctgtcgacaggcgagcgcgtgtttcacgtcttgacctctccggcggtggcggccatggtgggagtctctaatcctgaagtcccgatgccactgttgttcgaaaagtttgggactccggactcgtctaccctgccactctacgcggctaggcacccggaactatcgttgctacggatcatgctctcaccgcacccctacgcgttaagaagccacttgtgcgtaggcgaagagaccgcatctcttggcgtttacctgcactccaagccagtcgtacgcggccacgaattcgaggacacgcagatactaccggagtgccggctggccataacgagcgaccagtcttataccaactttaagattatagatctgccagcgggatgccgtcgcgtccccatacacgccgcgaacaagcgtgtcgtcatcgacgaggccgccaaccgcataaaggtgtttgacccagagtcgcctttaccgcgtcaccccataacaccccgtgccggtcagaccagatctatactgaaacacaacatcgcacaggtttgcgaacgggatatcgtgtcacttaacacagacaacgaggccgcgtctatgttctacatgattggactcaggcggccgagactcggagaaagcccggtctgtgacttcaacaccgttaccatcatggagcgtgctaacaactcgataacttttctacccaagctaaaactgaaccggctacaacacctgttcctgaagcacgtgttgctgcgcagcatggggctggaaaacatcgtgtcgtgtttctcatcgctgtacggcgcagaacttgcccctgcgaaaacacacgagcgggagttcttcggcgctctgctagaaagactcaaacgtcgggtggaggacgcggtcttctgcctgaataccatagaggatttcccgtttagggaacccattcgccaacccccagattgttccaaggtgcttatagaagccatggaaaagtactttatgatgtgtagccccaaagaccgtcaaagcgccgcatggctaggtgcaggggtggtcgaactgatatgtgacggcaatccactttctgaggtgctcggatttcttgccaagtatatgcccatacaaaaagaatgcacaggaaaccttttaaaaatctacgctttattgaccgtctaa

SEQ ID NO: 10152 - DNA, 1215 bp, unidentified
  misc_feature 1..1215: note = Synthetic
  source 1..1215: mol_type = other DNA
atgttacgagttccggacgtgaaggctagtctagtagagggcgcggcgcgcctgtcgacaggcgagcgcgtgtttcacgtcttgacctctccggcggtggcggccatggtgggagtctctaatcctgaagtcccgatgccactgttgttcgaaaagtttgggactccggactcgtctaccctgccactctacgcggctaggcacccggaactatcgttgctacggatcatgctctcaccgcacccctacgcgttaagaagccacttgtgcgtaggcgaagagaccgcatctcttggcgtttacctgcactccaagccagtcgtacgcggccacgaattcgaggacacgcagatactaccggagtgccggctggccataacgagcgaccagtcttataccaactttaagattatagatctgccagcgggatgccgtcgcgtccccatacacgccgcgaacaagcgtgtcgtcatcgacgaggccgccaaccgcataaaggtgtttgacccagagtcgcctttaccgcgtcaccccataacaccccgtgccggtcagaccagatctatactgaaacacaacatcgcacaggtttgcgaacgggatatcgtgtcacttaacacagacaacgaggccgcgtctatgttctacatgattggactcaggcggccgagactcggagaaagcccggtctgtgacttcaacaccgttaccatcatggagcgtgctaacaactcgataacttttctacccaagctaaaactgaaccggctacaacacctgttcctaaagcacgtgttgctgcgcagcatggggctggaaaacatcgtgtcgtgtttctcatcgctgtacggcgcagaacttgcccctgcgaaaacacacgagcgggagtacttcggcgctctgctagaaagactcaaacgtcgggtggaggacgcggtcttctgcctgaataccatagaggatttcccgtttagggaacccattcgccaacccccagattgttccaaggtgcttatagaagccatggaaaagtactttatgatgtgtagccccaaagaccgtcaaagcgccgcatggctaggtgcaggggtggtcgaactgatatgtgacggcaatccactttctgaggtgctcggatttcttgccaagtatatgcccatacaaaaagaatgcacaggaaaccttttaaaaatctacgctttattgaccgtctaa

SEQ ID NO: 10153 - DNA, 432 bp, unidentified
  source 1..432: mol_type = other DNA
  misc_feature 1..432: note = Synthetic
atggacgcggacctaaagctgctggcggagacactcttcgcaggcgtgctcagcaccaaggacgtgtacgtgcttgcgcgcgagatgcgcggacagagcccgcggcgcacggtcttctcggtggacgcacagggctgcgtgggcgtcgactttgagtacgacggtttccgcgcctccgactacctaggcactccgcgcaccgcgttgccgcccgccgagtaccgcgcgcacgcggcgctcgtggcgcgggagctcacggctgtggacatgatcgacgaggaccccgccgcgtacatgcgtgctagcccgcacctgcgccgcctcatgcgcgtggctcgcgaccgcaagcgcatggccgcgatcgcgcgcacgcagcagcgtgcggcgcgccgcgggttggactgtgcttttatcaaggatgtggtcttctag

SEQ ID NO: 10154 - DNA, 171 bp, unidentified; identical to SEQ ID NO: 380
  misc_feature 1..171: note = Synthetic
  source 1..171: mol_type = other DNA

SEQ ID NO: 10155 - DNA, 33 bp, unidentified; identical to SEQ ID NO: 381
  source 1..33: mol_type = other DNA
  misc_feature 1..33: note = Synthetic

SEQ ID NO: 10156 - DNA, 1356 bp, unidentified
  misc_feature 1..1356: note = Synthetic
  source 1..1356: mol_type = other DNA
atggctatagcagaaagcggagcgttcgaaataaatgtcaatcttggaaaatccatcgcttccatacaaaaaaatcctataatctacatgcgtagacatctctctttttatgtggagttattaaaatttatcattcatcaatatgagcaatgttttttaccaccgaaaggaacgatactttaccacaatggcttaatcgaactaaatactttaattatcgatctgaatcaacaaattacatcgaaacagcagatctatagttggacgagcattactttgccaaaaatattttcgactaaagaattatattttattgtcgcgtcaccagaatcggaaaacataactctcaatccagctgttactaaaggaggatggttatctgggagttttagctttccattgagtttaagttgtgcatacgccctcactggcgtatcttcaacaatctatatgttaccatttattccatataaattcccaatgacttacgtagacttttcgacacttcgaacatacgaggtaacaagtgaatatggatcaatccaaattataaaacagcggaattttttatttttgggaattatacgggatctgtcatggaaaagtcagagggataacaagaattttatcctgaaagcaatgttcgttggaaactggttagggatacaaattccagaagcttttgcattgagactttttaataacacacggttttctattcaggattttgaattctccattaacatacaaaatataaaccttactagggacaataaaattttgggttctctttccacggtttcttgtgatcagatgccaccaaacttgtctccagagaatctcccaaactatctagttattcagttcgaattggtttcaactctcgcaaatcctgatcatctactgttttcttgcaatcccaaattgtttttcacaggagatattctgaacagcgctataaatttacaacatagtcctaatcattatgagcttacagtgtacgcaccacataatttacatttctatcccagctgttttcatatagtaacattaccaattcagttttcatccagaaatgatagacagatgttggtgtcaagctatcctaatgaaggctactttgaagtacaaatgtgcccatgggtacagaattctcctcttcaaattgttattaaatctttttcaaaaaatctagtgctaccgcaaggcacccctattgcaattctcttatatatggaaaaaatgacaacaggaaaaaattctttacgggatcaagaattaaaaattaataaagacattacccgaataggaaacgtaaaccttccaaaagaaaatttcttacattataatagctaa

SEQ ID NO: 10157 - DNA, 162 bp, unidentified
  source 1..162: mol_type = other DNA
  misc_feature 1..162: note = Synthetic
atgaccatcactccaagccactgctcaatcagttacctccacatgatgatatatacaaccacactcttccgtccttccgcgagcaatagaacaaagtatgttatggtgccacacaatagctgcatactcttaatatatattatccaataccttcacatgtga

SEQ ID NO: 10158 - DNA, 2328 bp, unidentified
  misc_feature 1..2328: note = Synthetic
  source 1..2328: mol_type = other DNA
atggagttcaaaagaatttttaatacggttcatgacattataaaccgattatgtcaacatggctacaaggaatacatcattccgcccgaatcaaccacaccggtggaattaatggagtatattagcactatcgtctcaaaacttaaggcggtgacgcgacaagatgagcgagtgtaccgatgttgtggagaacttatccattgccgtattaacctacgatccgtttccatggaaacgtggttgacttccccaattctctgtttaactccccgagtccgccaagcaattgaagggcggagggacgaaattcgtcgggctatattagaaccgtttttgaaagatcaataccccgctttagctacccttggactacagtctgctttaaagtacgaagacttttatttaactaagttagaggaaggtaaattagagtcgctttgccaattctttttaagactggcggccaccgtgacaacagaaatcgtaaacctgcctaaaatcgcaactcttattcccggaataaatgatggttatacatggactgatgtctgtcgggtatttttcacagcgttggcatgtcagaaaattgtcccggctacaccggttatgatgtttttaggtcgagagaccggggcaacggccagttgttatttaatggacccggaatccatcactgttgggagagctgttcgagctatcacaggcgatgtgggaacggtattacaaagtcgaggtggagtgggaatttctctacagagtctgaatttaatacctacggaaaatcaaacgaaaggtcttcttgcagttttaaaacttttagattgcatggttatggcaattaacagtgattgtgaacgaccaactggagtttgtgtttacatagaaccatggcacgtcgatctacaaactgttttggccacacgtggaatgttggttcgtgatgaaatatttcgatgtgataacatattttgttgtttatggaccccagatttattttttgaaagatacctaagctatctaaaaggggctagtaatgttcagtggactctttttgataacagagccgatatccttcgaacattacacggggaggcattcacttcaacctatttacgtttagagagagaaggattaggcgtttcttctgttcccattcaagatatcgcattcacaatcatacgcagtgctgctgtaacaggaagcccctttttaatgttcaaagatgcctgtaatcgtaattatcatatgaatacccaaggaaatgctatcacggggtcaaatttgtgtacggaaattgttcaaaaggcagacgctcatcaacatggcgtatgtaatcttgccagcataaatcttacaacgtgcttatccaaaggcccagtgtcatttaatttaaacgaccttcaattgacagcaagaacgactgttatttttttaaacggggtcctggcggctgggaactttccatgtaaaaaatcatgtaaaggtgtaaaaaacaaccgatcacttggcattggcatacaagggttacatacaacttgtctccgcttaggatttgatttaacttcccaaccagctagacggttaaatgtacaaatagcggagttaatgttgtatgagacaatgaaaacaagcatggaaatgtgtaagattggcggcttagccccgtttaagggttttaccgaaagtaaatatgctaagggatggttacaccaagatgggttttctacgataagttatttagatttaccatggtgtaccctgcgagatgatatttgcgcttatgggttatacaactcgcagttcttagcgttaatgcccacagtttcatctgcacaggtaacggagtgcagtgagggtttctctccaatttataataatatgtttagtaaggtcaccacctcgggtgagttacttagacccaacttagaccttatggacgaactaagagatatgtattcatgtgaagaaaaacgactggaagttataaacatacttgagaaaaaccaatggtcagtaatacgttcgtttggctgtttatctaatagtcacccactcttaaaatataaaacagcgtttgaatatgagcaagaggatctcgttgatatgtgtgcagaaagggcgccatttattgaccaaagtcaatcaatgactttatttattgaggaacgcccagacgggacaattcccgcctccaaaataatgaatttgcttatacgtgcctataaagccggccttaaaacgggtatgtactactgtaaaattcgtaaagctacgaacagcggactgtttgcgggaggcgaattaacctgtaccagttgtgctttataa

SEQ ID NO: 10159 - DNA, 36 bp, unidentified; identical to SEQ ID NO: 387
  source 1..36: mol_type = other DNA
  misc_feature 1..36: note = Synthetic

SEQ ID NO: 10160 - DNA, 1137 bp, unidentified
  misc_feature 1..1137: note = Synthetic
  source 1..1137: mol_type = other DNA
atgtggccgttctcctccatccccgtgggcgccgactgccgcgtcgtggagacgctgcccgcagaggtggcgtccctggcgcagggcaacatgagcaccctcgactgcttcaccgccatcgccgagtccgcgaagaagtttttgtacatctgcagcttctgctgcaacctgagctccaccaaggagggcgtcgacgtcaaggacaagctctgcacgctcgccaaggagggcgtagacgtcacgctgctcgtggacgtgcagagcaaggacaaggacgcggacgagctgcgcgcggcgggcgtcaactactacaaggtcaaggtgtccaccaaggagggcgtcggcaacctgctcggcagcttctggctctcggacaccgggaactggtacgtgggcagcgcctcgctcacgggcgggtccgtgtccaccatcaagaacctcgggctctactccaccaacaagcacctggcctgggacctcatgaaccgctacaacaccttctactccatgatcgtggagccgaaggtgccgttcacgcggctctgctgcgccgtcgtcacgcccacggccacgaacttccacctcaaccactccgggggcggcgtattcttctcggactcgccggagcgcttcctgggcttctaccgcacgctcgacgaggacctcgtgctgcaccgcatcgagaacgccaagaacagcatcgacctctcgctgctctcgatggtgccggtgatcaagcacgccggcgccgtggagtactggcctcggatcatagacgcgctgctgcgcgcggccatcaaccgcggcgtgcgcgtgcgcgtgatcatcaccgagtggaagaacgcggacccgctgtcggtctcggccgcgcgcagcctcgacgactttggcgtcggcagcgtggacatgtccgtgcgcaagttcgtggtgcccgggcgggacgacgctgcgaacaacaccaagctgctcatcgtggacgacaccttcgcgcacctcacggtcgccaacctcgacggcacgcactaccgctaccacgccttcgtgagcgtgaacgccgagaagggcgacatcgttaaggacctgtccgcggtcttcgagcgggactggcgctcggagttctgcaagccaataaattaa

SEQ ID NO: 10161 - DNA, 492 bp, unidentified
  misc_feature 1..492: note = Synthetic
  source 1..492: mol_type = other DNA
agggaaatacaaccatctccatctactgcatctgtaaccaccccggattgcatgaaagcctttgctgtcttgtttgtgctgagtttaataaaaactgagttaagaccctcctacggactaccgcttcttcaatcaggactttacaacaccaaccagatcttccagaagacccagacccttcctcctttcatccaggactctaactctaccttaccagcaccctccactactaaccttcccgaaacaaacaagcttgcatctcatctgcaacaccgcctttcacgaagccttctttctgccaatactaccactcccaaaaccggaggtgagctccgcggtcttcctactgacgacccctgggtggtagcgggttttgtaacgttaggagtagttgcgggtgggcttgtgctgatcctttgctacctatacacaccttgctgtgcatatttagtcatattgtgctgttggtttaagaaatgggggccatactag

SEQ ID NO: 10162 - DNA, 75 bp, unidentified; identical to SEQ ID NO: 391
  misc_feature 1..75: note = Synthetic
  source 1..75: mol_type = other DNA

SEQ ID NO: 10163 - DNA, 459 bp, unidentified
  source 1..459: mol_type = other DNA
  misc_feature 1..459: note = Synthetic
acgacgcgtatgctcaagatgcaggtgaacgaatgcagtcttacggagatgcgccagacatatcagagtctgaagaggcgttgccgactgctttattatggagagttgctgtgtctagctgcggctttaggactcacactcgtcctgatggtcccatccgcgtcgagggtcttggagggcgcgctcacccaggctaacatcacgggtcacgtgataaccggaatccttacgagccttgcgatcttcctgcaacaccaccgagcgcggctgctgaagcggaagcgcagcattaaacgtgacatcgtgaagcgcatgacctacatctccctcgcccgcaggatgggatcgcagtttccggaaagcgctggcgcaggaagtgactttagggctcgtctcatggcgctagcggaggaagcggaacgtgccagggatgacagcgactggcggcgctggccctag

SEQ ID NO: 10164 - DNA, 114 bp, unidentified; identical to SEQ ID NO: 398
  misc_feature 1..114: note = Synthetic
  source 1..114: mol_type = other DNA

SEQ ID NO: 10165 - DNA, 114 bp, unidentified; identical to SEQ ID NO: 398
  misc_feature 1..114: note = Synthetic
  source 1..114: mol_type = other DNA

SEQ ID NO: 10166 - DNA, 39 bp, unidentified; identical to SEQ ID NO: 400
  misc_feature 1..39: note = Synthetic
  source 1..39: mol_type = other DNA

SEQ ID NO: 10167 - DNA, 723 bp, unidentified
  misc_feature 1..723: note = Synthetic
  source 1..723: mol_type = other DNA
atgaacccaccccaagcccgcgtctcggaacagacaaaggacttgcttagcgttatggttaaccagcaccccgaagaggacgcaaaagtgtgtaaatccagtgataattcaccgctttataacaccatggttatgttatcgtatgggggtgatacggacttactattaagctctgcatgtacccgcacatctaccgtaaacaggtcggcgtttacgcaacactccgtgttttatattatatccacggtgttgattcaaccaatatgttgtatcttcttttttttttactataaagcgacacgctgtatgctcttattcacagccgggttacttctgacgattctacatcactttcgacttattattatgttattgtgtgtctacagaaatatacgatcagacctgctacccttatctacatcccagcaactgctgcttggaattattgttgtgactcgaacaatgctattttgtattacggcgtattatactctttttatagacacccgggtgttctttttgattaccggacacttgcaaagtgaggttatttttccagatagcgtttcaaaaatacttcctgtgtcgtggggtccaagtccagccgtgttactggtaatggcggcagttatttacgctatggactgtttggtggacacggtatcctttattgggccaagggtgtgggtccgtgttatgttaaaaacatctatttcgttttag

SEQ ID NO: 10168 - DNA, 1380 bp, unidentified
  misc_feature 1..1380: note = Synthetic
  source 1..1380: mol_type = other DNA
atgcaacccgccactctacaatggtcttcgtacgtactacagctaagattaacaactgccgccatattaaaacccggcgaactgagatattttaaatgcggattaggtatctgccccccttcatccagcgtggtgtgcacttgtagagacgaaagcagttttgcagcatcgccttttacttacatcgatccaaaagattatggcaacataccctttgcggtgcataacatctcagatctagatctggatctcggcagattacccatcgttcttaacatattcgcactcccttacgcgaacgtgactgtatcaaatttaccggtgcaacgcatagaagcctacgatcgccacgccataccccacggacagtgcgaggcgcagtttattctatatggccctctcacgcgcattaaaatttacgcggctgatatacgatggacagaaaaaacaccagaagagccaacacgttatttatttaacgcagatatatggatcaatctccaaaacactccgctcgaccaaatttttaactctgctaaaattgaatttatatcacaccgacacgtctccatctctagaatcttactttgtggaaatctattaattttgaagacagtgtacgaaaacgactatctccttgatgatactttttttcccgaaaaacttaacatacaactttcactgaccccccacaccgcagacatcacaatgtcgcagaatcaagaaacacttctaaaatgcaacgtcggttcaataactgtcggcgcaactaaaaatatcgtctctaacctgattacgcctttccattgctctttccacactatcttcgaatcaaattcaaactttacgggtttctttatccccaaactcttgcacggaatctctataaccacctgcatttgggacgagacgcggcctctctacatcaccatgaaagcacagaaaaagaactgtcgcatcaattactcgcaagaactaggcaaagtattcttcttccccaagcaaattttaccaccggggaataatatcgaattcagctggacagaaatgagcaacatttatgtaaacatagaatctccaaatggtcccgtaaaagacattgtagctctcgcaagccagccagtatcgcgagcaccaagtctaaccacggtcgcgcacgtaacaccagagatcagcatgggcatttttttgaaatcactccgcatcgcgttcgacaaagaacatttggtacccttgcacttttttctaaaacccggagaatctactcgcatggaattcatgccgcctgaaaccccacaaagcctaacgatattagaaggagacgtcggcattcgtttcataccttgtcacaataattactcccatagatcttccccgtaa

SEQ ID NO: 10169 - DNA, 1377 bp, unidentified
  source 1..1377: mol_type = other DNA
  misc_feature 1..1377: note = Synthetic
atgcaacccgccactctacaatggtcttcgtacgtactacagctaagagtaacaactaccgccatattaaaacccggcgaactgagattgtttaaatgcggattaggtatcacccccccttcatccgccgtagtgtgcatttgtagagacgaaagcagttttacatcatcgccttttacttacatcgatccaaaagattacggcaacatacccttcgcggtgcagaacatctcagatctagatctggatctcagtagattacctatcgtccttaatatatttgcacttcctcacgcaaacgtgaatatatcaaatttaccggtgcaacgcatcgaagcccacgatcgccacattataccccacggacagtgcgacgcgaagtttgtcatatatggccctctcacgcgtattaaaattcaagtggctgatatacgatggatagaacaaacaccagaagagccaacacgatattcatttaaggcagagatatgggttaatctccaaaacactccgctcgaccaaatttttaaaactggtaacatcgaatttatatcacacaaaaacgtctatatttctagaatcttactctgcggaaatctattaattttgaaggcaaactacgaaaacgactatctccttgacgataatttttatcctgaacaacttgccatacaaatttcactgaccccccaaaccgcagacattacattgtcgcagaatcaagaaacacttctaaaatgcaacacccattcaataactgtctgcgcaactaaaaatatcatccctaacacggttactcctgtccattgttcttttaacactatctttaattcaaattcaaactttacgggtttatttatacccaaactcttgctcggaatctctacaaccaccggcatttgggatgagacacggcctctctacatcaccatgaaagcatttaagaagaaccgtcgcatcaattactcgcaacctataggcgtagtatacttcttccccaaacaaattttaccaccggggaataatgtcgaattcaactggacagaagcaagcaaaatttatgtaaacacagaatctccaaatggtcccgtaagaaacaccgtaactttcacaaaccaagcagtattgcgaacaccaagtctaagcacggttgcaaacttaacgccagacatcaacatgggaatttttttgagttcactccgcgttgcgttcgacaccgcacatatggtacccttgcacttttctctaaaacccggagaatctactcgcatggaattcatgccgcctggaaccccacaaaacctaacgatattagaaggagatgtcggcattcatttcattccttgtcacaatcactcccatagatcttccccgtaa

SEQ ID NO: 10170 - DNA, 24 bp, unidentified
  source 1..24: mol_type = other DNA
  misc_feature 1..24: note = Synthetic
ttgtacaatatgaacaagaaatag

SEQ ID NO: 10171 - DNA, 66 bp, unidentified
  misc_feature 1..66: note = Synthetic
  source 1..66: mol_type = other DNA
atgaccaatataagttccataaattgctaccgtaaatataaatccgttaaaataatgaataattaa

SEQ ID NO: 10172 - DNA, 360 bp, unidentified
  source 1..360: mol_type = other DNA
  misc_feature 1..360: note = Synthetic
ctggagcccctaaacccaaggcaaatcaacaacatcaggacaacgctcggggtcttgtgcttccgggttacaaatacctcggacccggcaacggactcgacaagggggaacccgtcaacgcagcggacgcggcagccctcgagcacgacaaggcctacgaccagcagctcaaggccggtgacaacccctacctcaagtacaaccacgccgacgcggagttccagcagcggcttcagggcgacacatcgtttgggggcaacctcggcagagcagtcttccaggccaaaaagagggttcttgaacctcttggtctggttgagcaagcgggtgagacggctcctggaaagaagagaccgttga

SEQ ID NO: 10173 - DNA, 762 bp, unidentified
  source 1..762: mol_type = other DNA
  misc_feature 1..762: note = Synthetic
aaggacgtagaagagggtgtagagggacccatctgctggatatgtagggaagaggtggggaacgagggcatacacccctgcgcctgtaccggagagctggatgtcgtccacccgcagtgtttaagcacttggctaacagtgtctcgaaacacggcctgtcaaatgtgtcgcgttatataccgcacgcgcacgcagtggcgtagtcgccttaacctgtggccggagatggagcgccaagaaatttttgaactgtttttgctgatgtctgtggtggtggctgggcttgtcggcgtggcgttgtgcacctggacgctcctggtcatcctaactgctcctgcgggaacattctcccccggggccgtgctcggttttctctgcttctttgggttttaccaaatatttattgtgtttgcatttggcggcatatgccgcgtaagtggcactgtgagggcattatacgcggcaaataacacccgggtgaccgtactgccataccgacggccgcgccggccaaccgcgaacgaagataacatcgaattgacggtccttgtcggacccgcgggcgggacggacgaggagcccacggacgagtcatctgaaggagacgtcgcctctggagacaaagaacgtgacggttcatccggagacgagccggacgggggcccgaacgaccgtgcgggacttagggggacagcgcgtaccgacctatgcgcgcccacaaaaaagccggtgcggaaaaatcatccaaaaaacaacggttga

SEQ ID NO: 10174 - DNA, 762 bp, unidentified; identical to SEQ ID NO: 10173
  misc_feature 1..762: note = Synthetic
  source 1..762: mol_type = other DNA

SEQ ID NO: 10175 - DNA, 15 bp, unidentified
  source 1..15: mol_type = other DNA
  misc_feature 1..15: note = Synthetic
ctgctggatatgtag

SEQ ID NO: 10176 - DNA, 15 bp, unidentified
  source 1..15: mol_type = other DNA
  misc_feature 1..15: note = Synthetic
ctgctggatatgtag

SEQ ID NO: 10177 - DNA, 99 bp, unidentified; identical to SEQ ID NO: 416
  misc_feature 1..99: note = Synthetic
  source 1..99: mol_type = other DNA

SEQ ID NO: 10178 - DNA, 99 bp, unidentified; identical to SEQ ID NO: 416
  source 1..99: mol_type = other DNA
  misc_feature 1..99: note = Synthetic

SEQ ID NO: 10179 - DNA, 30 bp, unidentified; identical to SEQ ID NO: 419
  source 1..30: mol_type = other DNA
  misc_feature 1..30: note = Synthetic

SEQ ID NO: 10180 - DNA, 33 bp, unidentified
  misc_feature 1..33: note = Synthetic
  source 1..33: mol_type = other DNA
atgaagagaaagaggctgcagaacatttcttaa

SEQ ID NO: 10181 - DNA, 15 bp, unidentified
  misc_feature 1..15: note = Synthetic
  source 1..15: mol_type = other DNA
atatacattacttaa

SEQ ID NO: 10182 - DNA, 153 bp, unidentified
  misc_feature 1..153: note = Synthetic
  source 1..153: mol_type = other DNA
ttgacttcaacgcagttgactacagcgtactctacaatccgggtggccagctggtccaaccaaccgccatcgttggatcacctgtccactatgaagctgtttatcccacaccaatgttgccttacactgccgtaccgaccgtcacttcaatga

SEQ ID NO: 10183 - DNA, 1548 bp, unidentified
  source 1..1548: mol_type = other DNA
  misc_feature 1..1548: note = Synthetic
atgttgagtctattcgacacattcagtgcgcgtaggcaggagaacataacgaaatcagctggtggggctgttattcccgggcaaaaaaacactgtgtctatatttgctcttggaccatcaataacagatgacaatgataaaatgacattggctcttctctttttgtctcattctttagacaatgaaaagcagcatgcgcaaagagctggatttttagtttctctgttatcaatggcttatgccaacccagaattatatttaacatcaaatggtagtaatgcagatgttaaatatgttatctacatgatagagaaagacccaggaagacagaaatatggtgggtttgtcgtcaagactagagagatggtttatgaaaagacaactgattggatgttcgggagtgatcttgagtatgatcaagacaatatgttgcaaaatggtagaagcacttctacaatcgaggatcttgttcatacttttggatatccatcgtgtcttggagcccttataatccaagtttggataatacttgttaaggctataaccagtatatcaggattgaggaaaggattctttactcggttagaagcatttcgacaagatggaacagttaaatccagtctagtgttgagcggtgatgcagtagaacaaattggatcaattatgaggtcccaacagagcttggtaacactcatggttgaaacactgataacaatgaacacaggcaggaatgatctgacaacaatagaaaagaatatacagattgtaggaaactacatcagagatgcaggtcttgcttcatttttcaacacaatcagatatggcattgagactagaatggcagctctaactctgtctacccttagaccggatatcaacagactcaaggcactgatcgagttatatctatcaaaggggccacgtgctccttttatatgcattttgagagatcccgtgcatggtgagtttgcaccaggcaactatcctgccctctggagttatgcgatgggtgtagcagttgtacaaaacaaggccatgcaacagtatgtaacaggaaggtcttatctggatattgaaatgttccaacttggtcaagcagtggcacgtgatgccgagtcgcagatgagttcaatattagaggatgaactgggggtcacacaagaagccaagcaaagcttgaagaaacacatgaagaacatcagcagttcagatacaacctttcataagcctacagggggatcagccatagaaatggcgatagatgaagaagcagggcagcctgaatccagaggagatcaggatcaaggagatgagcctcggtcatccatagttccttatgcatgggcagacgaaaccgggaatgacaatcaaactgaatcaactacagaaattgacagcatcaaaactgaacaaagaaacatcagagacaggctgaacaaaagactcaacgagaaaaggaaacagagtgacccgagatcaactgacatcacaaacaacacaaatcaaactgaaatagatgatttgttcagtgcattcggaagcaactag

SEQ ID NO: 10184 - DNA, 1596 bp, unidentified
  misc_feature 1..1596: note = Synthetic
  source 1..1596: mol_type = other DNA
aagacattgactagaaggtcaagaaaagggaactctataatttcaaaaatgttgagcctatttgatacatttaatgcacgtaggcaagaaaacataacaaaatcagccggtggagctatcattcctggacagaaaaatactgtctctatatttgctcttggaccgacaataactgatgataatgagaaaatgacattagctcttctttttttatctcattcactggataatgagaaacaacatgcacaaagggcagggttcctggtgtccttattatcaatggcttatgccaatccagagctctacctaacaacaaatggaagtaatgcagatgtcaagtatgtcatatacatgatcgagaaagatctaaaacggcaaaagtatggaggatttgtggttaagacgagagagatggtatatgacaagacaactgattggatatttggaagtgacctggattgtgatcaggaaactatgttgcagaacggaagaaacaattcaacaattgaagaccttgtccacacatttgggtatccatcatgtttaggagctcttataatacagatctggatagttctggtcaaagctatcactagtatctcagggttaagaaaaggctttttcacccgattggaagctttcagacaagatggaacagtgcaggcagggctggtattgagcggtgacacagtggatcagattgggtcaattatgcggtctcaacagagcttggtaactcttatggttgaaacattaataacaatgaatactagcagaaatgacctcacaaccatagaaaagaatatacaaattgttggtaactatataagagatgcaggtctcgcttcattcttcaatacaatcagatatggaattgagactagaatggcagctttgactctatccactctcagaccagacatcaatagattaaaagctttgatggaactgtatttatcaaagggaccacgcgctcctttcatctgtatcctcagagatcccatacatggtgagttcgcaccaggcaactatcctgccatatggagctatgcaatgggagtggcagttgtacaaaatagagccatgcaacagtatgtgacgggaagatcatatctggatattgatatgttccagctaggacaagcagtagcacgtgatgctgaagctcagatgagctcaacactagaagatgaacttggagtgacacacgaagctaaagaaagcttgaagagacatataaggaacataaatagttcagagacatctttccacaaaccaacaggtggatcagccatagagatggcaatagatgaagagccagaacaattcgaacatagatcagatcaagaacgagatggagaacctcaatcatctataattcaatatgcttgggcagaaggaaacagaagcgatgatcggactgagcaagatacagaatctgacaatatcaagactgaacaacaaaacatcagagacagactaaacaagagactcaacgaaaagaagaaacaaggcagtcaaccacctaccaatcccacaaacagaacgaatcaggacgaaatagatgatctgtttaatgcatttggaagcaactaa

SEQ ID NO: 10185 - DNA, 27 bp, unidentified
  source 1..27: mol_type = other DNA
  misc_feature 1..27: note = Synthetic
ttgacgttcgctcatagatacatgtga

SEQ ID NO: 10186 - DNA, 51 bp, unidentified; identical to SEQ ID NO: 434
  misc_feature 1..51: note = Synthetic
  source 1..51: mol_type = other DNA

SEQ ID NO: 10187 - DNA, 1383 bp, unidentified
  source 1..1383: mol_type = other DNA
  misc_feature 1..1383: note = Synthetic
atggcaagattacgacgacgacgacctcgtggacgctttggcttctaccacagaggacgatggcactggagacacagactgcgacgaagacgctattcccggaggggtaaatttcgatatgcgcgtagaagatcctttgatcgccgcgttaagaggaggatcttcaacccacacccgggctcctatgtggtaaggctaccaaacccttacaataagcttaccctctttttccaaggcattgtgttcattccggaggctcaagcatttgttaaaagtacttatacaaagactaatcttacggtttgccatgtagcctcaataaatgttaacctccgagaatttatgcttgctacaatgcctttagatgcaaagagcaaaatcggaggccctaatccttatcctcagcacttgcaggggtgccaatggtcagcacaaacgacgcaggacgcatggccgtactcggcgggcatgtcagagacaaaaagacccagcgtaccaccgagtgagtggtggcgctgggctctcctggtgatgcaccctagagcacctggcagattttacaatgcccctaagctaatgactctggacgctatgggagacctcttagggggctggcaactattccgtcatgttagaaccaagttcagagtgctggccactatgggccagggtgcattctcaccggttgcaagcctccttgtgcaaaatgactattggagcagggggcacttagagggcttcccagtgaaaggtgcaccgcctatgtgcaccatgcaaagaaagactcagcaatacggcaacgtggaggcgaacgctccagcagatgagcagtggctaccggtgaatcccccagacccaccagtgtaccctaaccagggaggatgctcccaaaacgtggctccaggcatataccggcttgcaggcttacaagacagtagcagatgcttttattcaaaggcttgtttccccagctttgcagcgctttctgctatgggggcaccctggtcatttcctagcactcaaaaacccattcaaagaggctcatttaacaaacattccatcacggggacaggggacccccagggccgacggtggttaacacttgtgcctaaaggcgtggaatggatcactgatgacaccatggaacaaacgcaactggacacagacattgcaacactcttcttagctcaaggcagcccaatgtgggcaccctacaaattcgggacttttcacaaggcaatggccataacagcaatgcagaccaccccctggtgcgtggtgaaagtacggtccatctggcagctcggcaaccaaagacagccgtacccatggcaagtgaactggtacaacgagcatactgcaacggacagatacaacccgtaa

SEQ ID NO: 10188 - DNA, 57 bp, unidentified; identical to SEQ ID NO: 436
  misc_feature 1..57: note = Synthetic
  source 1..57: mol_type = other DNA

SEQ ID NO: 10189 - DNA, 663 bp, unidentified
  misc_feature 1..663: note = Synthetic
  source 1..663: mol_type = other DNA
atgaacctggccattgctctggactctcctcacccaggcctcgcgtcttatactattctgccacgcccattttatcatataagcctgaagcccgtgagctggcctgacgagaccatgaggccagccaagtctacagattctgtgtttgtgaagaccccggtcgaggcgtgggtcgcgccctcgccgccggacgacaaggtggctgagtccagctacctcatgttcagggccatgtacgcggtgttcacccgggatgagaaagacctgcctttgccagccctggtcctctgccggctcatcaaggcctccctgaggaaggataggaagctgtacgcagagctggcctgcaggacagccgacatcgggggcaaagacacgcacgtacggctcatcatcagcgtcctgcgcgcagtgtacaacgaccactacgactactggtcgcggctcagggtggtgctgtgctacacagtggtgtttgcggtgcgaaactacctggatgaccacaagagcgccgccttcgtgctgggggcaatcgcccactacctggccctctatcgcagactctggtttgcgaggctgggcggcatgccaagatcgctgagacgtcagttccccgtgacgtgggccctggccagcctgactgacttcctgaaatctttgtaa

SEQ ID NO: 10190 - DNA, 132 bp, unidentified; identical to SEQ ID NO: 439
  source 1..132: mol_type = other DNA
  misc_feature 1..132: note = Synthetic

SEQ ID NO: 10191 - DNA, 108 bp, unidentified; identical to SEQ ID NO: 440
  source 1..108: mol_type = other DNA
  misc_feature 1..108: note = Synthetic

SEQ ID NO: 10192 - DNA, 21 bp, unidentified
  source 1..21: mol_type = other DNA
  misc_feature 1..21: note = Synthetic
atggacactcatttaacgtga

SEQ ID NO: 10193 - DNA, 300 bp, unidentified
  source 1..300: mol_type = other DNA
  misc_feature 1..300: note = Synthetic
atcgatttccgcgacctgcctaccgtctacctggtctcggccatcttccgcgagcgcgaggaaagcgaactgggctgcgagttgctggccggcggtcgcgttttccactgcgaccacatcccgctcctgctcatcgtcacgcccgtggtctttgaccctcagtttacgcgccatgccgtctctaccgtgttagaccgttggagtcgcgacctgtcccgcaagacgaacctaccgatatgggtgccgaactctgcaaacgaatatgttgtgagttcggtaccacgtccggtgagcccctga

SEQ ID NO: 10194 - DNA, 30 bp, unidentified; identical to SEQ ID NO: 453
  misc_feature 1..30: note = Synthetic
  source 1..30: mol_type = other DNA

SEQ ID NO: 10195 - DNA, 57 bp, unidentified; identical to SEQ ID NO: 454
  misc_feature 1..57: note = Synthetic
  source 1..57: mol_type = other DNA

SEQ ID NO: 10196 - DNA, 51 bp, unidentified; identical to SEQ ID NO: 455
  source 1..51: mol_type = other DNA
  misc_feature 1..51: note = Synthetic

SEQ ID NO: 10197 - DNA, 87 bp, unidentified; identical to SEQ ID NO: 457
  source 1..87: mol_type = other DNA
  misc_feature 1..87: note = Synthetic

SEQ ID NO: 10198 - DNA, 54 bp, unidentified; identical to SEQ ID NO: 460
  source 1..54: mol_type = other DNA
  misc_feature 1..54: note = Synthetic

SEQ ID NO: 10199 - DNA, 423 bp, unidentified
  misc_feature 1..423: note = Synthetic
  source 1..423: mol_type = other DNA
atgagcgccaactcgtttgatggaagcattgtgagctcatatttgacaacgcgcatgcccccatgggccggggtgcgtcagaatgtgatgggctccagcattgatggtcgccccgtcctgcccgcaaactctactaccttgacctacgagaccgtgtctggaacgccgttggagactgcagcctccgccgccgcttcagccgctgcagccaccgcccgcgggattgtgactgactttgctttcctgagcccgcttgcaagcagtgcagcttcccgttcatccgcccgcgatgacaagttgacggctcttttggcacaattggattctttgacccgggaacttaatgtcgtttctcagcagctgttggatctgcgccagcaggtttctgccctgaaggcttcctcccctcccaatgcggtttaa

SEQ ID NO: 10200 - DNA, 1269 bp, unidentified
  source 1..1269: mol_type = other DNA
  misc_feature 1..1269: note = Synthetic
atgtctgttacagtcaagagaatcattgacaacacagtcatagttccaaaacttcctgcaaatgaggatccagtggaatacccggcagattacttcagaaaatcaaaggagattcctctttacatcaatactacaaaaagtttgtcagatctaagaggatatgtctaccaaggcctcaaatccggaaatgtatcaatcatacatgtcaacagctacttgtatggagcattaaaggacatccggggtaagttggataaagattggtcaagtttcggaataaacatcgggaaagcaggggatacaatcggaatatttgaccttgtatccttgaaagccctggacggcgtacttccagatggagtatcggatgcttccagaaccagcgcagatgacaaatggttgcctttgtatctacttggcttatacagagtgggcagaacacaaatgcctgaatacagaaaaaagctcatggatgggctgacaaatcaatgcaaaatgatcaatgaacagtttgaacctcttgtgccagaaggtcgtgacatttttgatgtgtggggaaatgacagtaattacacaaaaattgtcgctgcagtggacatgttcttccacatgttcaaaaaacatgaatgtgcctcgttcagatacggaactattgtttccagattcaaagattgtgctgcattggcaacatttggacacctctgcaaaataaccggaatgtctacagaagatgtaacgacctggatcttgaaccgagaagttgcagatgaaatggtccaaatgatgcttccaggccaagaaattgacaaggccgattcatacatgccttatttgatcgactttggattgtcttctaagtctccatattcttccgtcaaaaaccctgccttccacttctgggggcaattgacagctcttctgctcagatccaccagagcaaggaatgcccgacagcctgatgacattgagtatacatctcttactacagcaggtttgttgtacgcttatgcagtaggatcctctgccgacttggcacaacagttttgtgttggagataacaaatacactccagatgatagtaccggaggattgacgactaatgcaccgccacaaggcagagatgtggtcgaatggctcggatggtttgaagatcaaaacagaaaaccgactcctgatatgatgcagtatgcgaaaagagcagtcatgtcactgcaaggcctaagagagaagacaattggcaagtatgctaagtcagaatttgacaaatga

SEQ ID NO: 10201 - DNA, 1248 bp, unidentified
  misc_feature 1..1248: note = Synthetic
  source 1..1248: mol_type = other DNA
atgcatccggtgctgcggcagatgcgcccccctcctcagcagcggcaagagcaagagcagcggcagacatgcagggcaccctccccttctcctaccgcgtcaggaggggcaacatccgcggctgacgcggcggcagatggtgattacgaacccccgcggcgccgggcccggcactacctggacttggaggagggcgagggcctggcgcggctaggagcgccctctcctgagcgacacccaagggtgcagctgaagcgtgacacgcgcgaggcgtacgtgccgcggcagaacctgtttcgcgaccgcgagggagaggagcccgaggagatgcgggatcgaaagttccacgcagggcgcgagttgcggcatggcctgaaccgcgagcggttgctgcgcgaggaggactttgagcccgacgcgcggaccgggattagtcccgcgcgcgcacacgtggcggccgccgacctggtaaccgcgtacgagcagacggtgaaccaggagattaactttcaaaaaagctttaacaaccacgtgcgcacgcttgtggcgcgcgaggaggtggctataggactgatgcatctgtgggactttgtaagcgcgctggagcaaaacccaaatagcaagccgctcatggcgcagctgttccttatagtgcagcacagcagggacaacgaggcattcagggatgcgctgctaaacatagtagagcccgagggccgctggctgctcgatttgataaacattctgcagagcatagtggtgcaggagcgcagcttgagcctggctgacaaggtggccgccattaactattccatgctcagtctgggcaagttttacgcccgcaagatataccataccccttacgttcccatagacaaggaggtaaagatcgaggggttctacatgcgcatggcgttgaaggtgcttaccttgagcgacgacctgggcgtttatcgcaacgagcgcatccacaaggccgtgagcgtgagccggcggcgcgagctcagcgaccgcgagctgatgcacagcctgcaaagggccctggctggcacgggcagcggcgatagagaggccgagtcctactttgacgcgggcgctgacctgcgctgggccccaagccgacgcgccctggaggcagctggggccggacctgggctggcggtggcacccgcgcgcgctggcaacgtcggcggcgtggaggaatatgacgaggacgatgagtacgagccagaggacggcgagtactaa

SEQ ID NO: 10202 - DNA, 90 bp, unidentified; identical to SEQ ID NO: 468
  misc_feature 1..90: note = Synthetic
  source 1..90: mol_type = other DNA

SEQ ID NO: 10203 - DNA, 1206 bp, unidentified
  misc_feature 1..1206: note = Synthetic
  source 1..1206: mol_type = other DNA
atggaaaacctcagcagtcgcttagacttactgcaagagcagctaatgaacctatatgaacaggacagtaaattgatagaagatcaaattaagcagtggaatctaattagacaagaacaagttcttttccatttcgccagaaaaaatggggtaatgagaattggattgcaggcagttccatctttagcgtcctcacaggagaaggcaaagacagctattgaaatggtgttacatttagagtctttaaaggactcaccttatggcacagaggattggtcacttcaagacactagcagagagctgtttttggcacccccagctggcaccttcaagaagagtggcagcacacttgaggttacctatgacaataaccctgataatcagacaaggcacacaatttggaatcatgtgtattatcaaaatggggacgatgtatggagaaaagtatccagtggtgttgatgctgtaggagtgtactatttagaacacgatggctataaaaattattatgtgttatttgctgaggaggcctctaagtacagcacaacaggacaatatgctgtaaattacaggggtaaaaggtttacaaatgttatgtcttccactagctccccaagggctgctggggctcctgcagtacactccgactacccaaccctatccgagagtgacaccgcccagcaatcgacgtccatcgactacaccgaactcccaggacagggggagacctcgcaggtccgacaaagacagcagaaaacacctgtacgcagacggccttacggacggcgaagatccagaagtcccagaggtggaggacgaagagaaggagaatcaacgccctctaggacacccggatctgtcccttctgcgcgagacgttggaagtatacacacaacgcctcaaaagggacattcttcaagacttagacgacttctgcaggaagcttgggatccacccgtggtctgtgtaaaagggggtgccaatcagcttaagtgtctcaggtacagacttaaagcatctactcaagttgactttgacagcataagcaccacatggcattggacagatagaaaaaacaccgagaggataggtagtgctagaatgttagtaaagtttattgatgaggctcaacgagagaagtttcttgagagagttgctttgcccagatcagtgtctgtgtttttgggacagtttaatgggtcttaa

SEQ ID NO: 10204 - DNA, 264 bp, unidentified
  source 1..264: mol_type = other DNA
  misc_feature 1..264: note = Synthetic
acgaccatacgtagtgatgatttgtcgaatcagatcactcagatttcaggttcttcaaaaaaagaagaagaaaagaaaaagcagcagatgcttaccggtgttttggggctgcagcctaatatggccagtcatcccgttcttggggtttttttgccaaaatatgctaagcagaacggcggtaacgtggataaaacggcgttccgactcgatttgataagaatgctggcgctgcatagactgaacacaaaaacagggagtgattga

SEQ ID NO: 10205 - DNA, 198 bp, unidentified
  misc_feature 1..198: note = Synthetic
  source 1..198: mol_type = other DNA
atgatttgtcgaatcagatcactcagatttcaggttcttcaaaaaaagaagaagaaaagaaaaagcagcagatgcttaccggtgttttggggctgcagcctaatatggccagtcatcccgttcttggggtttttttgccaaaatatgctaagcagaacggcggtaacgtggataaaacggcgttccgactcgatttga

SEQ ID NO: 10206 - DNA, 225 bp, unidentified
  misc_feature 1..225: note = Synthetic
  source 1..225: mol_type = other DNA
atttcaggaagttcttcaaaaaaagaggaggaaaagaagaagcagcagatgcttaccggtgttttagggctgcagcctaccatggccaatcatcccgtccttggggtctttttgccaaaatacgctaagcagaacggcggtaacgtggataaaacggcgttccgactcgatttgataagaatgctggcgctgcatagactgaacacaaaaacagggagtgattga

SEQ ID NO: 10207 - DNA, 813 bp, unidentified
  misc_feature 1..813: note = Synthetic
  source 1..813: mol_type = other DNA
attatttcttgttgtttaaacaaattccttttgtgtgagacatcctcaaggcacaagatggctaaagccacaggccgatacaatctcgtgcccccaaagaaagatatggaaaagggagtgatttttagtgatctttgtaatttcttgattactcaaaccctgcaaggttggaaggtttattgggcaggaattgagtttgatgtaagtcaaaaaggcatggctcttctgacaagactcaaaacaaatgactttgctcctgcctgggcgatgacaagaaatcttttcccacatctgttccagaacccaaattcggttattcaatctcccatctgggctttgagggtaattttggcagccggattgcaggatcagttgttagaccattcattggttgagccattgacaggggctctcggtctaatttctgattggctcctaactacaacgtcaacacatttcaatcttcgtactagaagcgtaaaggaccagcttagtcttcgtatgttatctttgatcaggtcaaacatcttgcagttcatcaacaagcttgacgccctgcatgttgtcaattacaatggtttactcagtagtattgagatcgggacttctacacacacaatcattataactcgtacaaatatgggttttctcgtggaagttcaagagcctgacaaatcagctatgaattctaagcgcccaggaccagtcaagttctcattacttcatgagtctgccttcaaacctttcactcgtgttccacaatctgggatgcaatcattaataatggagttcaacagtttgttggcaatttaa

SEQ ID NO: 10208 - DNA, 306 bp, unidentified
  misc_feature 1..306: note = Synthetic
  source 1..306: mol_type = other DNA
atgtccgacgagggctaccgagagctcgtggagagtaagagtgctcccacgaccccgggaccctggagcccggacagggagagatggaagcgtcacgaggcagcgtggaagcagcactgtagctggagtcacgggctctggtgccactgccacgactggacgcgacacctcaaaaaagagacgcgagaatgcggttccggtaccgaaagtggagaagaccccgccgtctctttcgatctcgtagacgacgcggctatgctcgccgccgctggagacgccgagcctggggccgccggaggcgggtaa

SEQ ID NO: 10209 - DNA, 66 bp, unidentified
  misc_feature 1..66: note = Synthetic
  source 1..66: mol_type = other DNA
atgatcatgttaccatacatcatatcgctacttggtagcgtattattcagtatgaagatctattaa

SEQ ID NO: 10210 - DNA, 501 bp, unidentified
  source 1..501: mol_type = other DNA
  misc_feature 1..501: note = Synthetic
atgtcttggtttactggagcatctctggctgccggttcactcgtggacatggcaggcaccatttcatcaattgtggcacaacaaagacaaattgatctgatggcagaagcaaatagaatccaggcagattgggtgcgccgtcaagaggcactacaaatccgtggccaggacatctcacgggatcttgctgttaacggcactgcccagcgtgttgagtctttagtcaatgcaggcttcacacccgtggacgcacgtcggctggccggcggaacggaaacggtgagttacggcctactggatcgccctatcctacaacggggcatcctttctggcatcactgagacacgacacctccaggccatgcagggcgctctaagtgcattcaaaaatggtgcctcttacggagccccgccagccccatcaggctttgtgaatccaaattatcaaccttcacctccgagattgaaactaggccctaggccccctagcaccaatgtttga

SEQ ID NO: 10211 - DNA, 21 bp, unidentified
  source 1..21: mol_type = other DNA
  misc_feature 1..21: note = Synthetic
atgtattttaacactaattag

SEQ ID NO: 10212 - DNA, 216 bp, unidentified
  source 1..216: mol_type = other DNA
  misc_feature 1..216: note = Synthetic
aagatcgtcttgtccttcagcgtgctcattacctgtctagccgtctcgcatttccacgaagcggccctggctgtacgctacgagacgccgctggaacgcgcgcttttggcggccgtcaaggtgtttctcagcctggttttcactctgctgatggtgctgagaatcatgaccctgcgcacctttttgcaaacctacttttcctctgacaagctgtag

SEQ ID NO: 10213 - DNA, 261 bp, unidentified
  source 1..261: mol_type = other DNA
  misc_feature 1..261: note = Synthetic
atccctcgcacgcgcctcaaagtgttagtcgaggtgctgggcgtgttgcagagtatcagcggtacgccgcacacgcgcgaagtgatccaccagacgttgtttcgattgtgctcggcggccgcagccacatcgggcctgtgttcatcccctcccccattgtgtgtgtcctcatcttcctccgtcccttctgtcccaacctccgtcagcgttgacggcagttctgaacccacgtcgccgcgagtgcggtttgcatcacgatga

SEQ ID NO: 10214 - DNA, 108 bp, unidentified
  source 1..108: mol_type = other DNA
  misc_feature 1..108: note = Synthetic
attgtgctcggcggccgcagccacatcgggcctgtgttcatcccctcccccattgtgtgtgtcctcatcttcctccgtcccttctgtcccaacctccgtcagcgttga

SEQ ID NO: 10215 - DNA, 1302 bp, unidentified
  source 1..1302: mol_type = other DNA
  misc_feature 1..1302: note = Synthetic
atgatgatctgccttgttttcttatgcgtcttgacgttagctcggggtgaaatctatcctcccatttgtccggcccctggcgtagggaacgatgaagcggttagagctggggagttgctgttagagatatctgcatacagaaatcaaagaagcggtagagtggagttgtggggcagtgcggcggtcaacaaccaagtgttttatggaggaatggaaaacagtcaaattgattatgatttcggaaagtttttggtttttcgatgttttcaggtttttaataacgtacataaactattgtttaataccgtgagtagtgcaactatgcatcttgcaagaaagcgtgttcagaaatgtggtcatggaaaaatgacatttattagcattcaagtccaatgctctgttaataaaaaatcgatacgactgagtagaatgagtgaagcaagtctcaagaaacaagtactacgtgttgctttttttcttgatcggaacaataactcttggattgcagataagaattttcagggtgaagacagaacgatgttacgtctttggaatgaactctcgacatatcaacagtacttgatatcttcgtgcaacaacgacgttaaaatcctatctgagttgtacggtgaatttagacaaatagctctgccttacgacgagaagttgaacctaaattttatgccggttatcagatcttcttcagaaagattgttcagagctgatgatttgaaatgttcgttctctaggtggctgggcgcagaaggggagtttgcagtttgtgaatattcaggttggggtgtcagcaggctgggaaagatcgaaatctttgcggagaagccactgacgtttgatatggcatggaaaacggtaaagatgagatcgtccggtgcatatacgtctttatttcgcgacgatgtgacgtggggacttattccattggataaatgggtaggggataaatatttctgcatgtgcacgaacaaggagagtggcgataatgttatcgttacgcttccggagaagaatgttgaaaagtctattcagatttatgacgaaggttcggctatgttatcatttgcagagatgacatctatcatattaaaccttatgttcatgggtgcggtggcggtttctgtgggtatcctgggtatttcctgttttgtaggattgaaggaaataatatactttatctttgttagtgttgactacatgtggcctttttgtgatacgttattgactacggcggttaattgtttcttcaaaggccgtacctttcttcgacgtgaattaaaaatttaa

SEQ ID NO: 10216 - DNA, 132 bp, unidentified; identical to SEQ ID NO: 517
  source 1..132: mol_type = other DNA
  misc_feature 1..132: note = Synthetic

SEQ ID NO: 10217 - DNA, 594 bp, unidentified
  source 1..594: mol_type = other DNA
  misc_feature 1..594: note = Synthetic
gtgagcggagccgagcagcggaccttcggagccatgaagccggtgttggtgctcgcgatcctggccgtcctgttcctgagactcgcggactcggtgccccggcccctgaatgtggtggtatcggagatcaaatcggcccactttcgggtggaggagaaccaatgctggttccatatgggcatgctgtacttcaaggggaggatgtcgggcaacttcaccaagaaacactttgtgaacgtgggtatcgtctctcaatcttacatggacagattgcaagtgtccggtgagcagtaccaccatgatgagcgcggagcctatttcgagtggaacatcggtgggtacccggtgtcgcacaccgtggatatggtggacatcacgttgtctacgaggtggggagaccccaagaaatatgccgcgtgtgttccccaggtgaggatggactatagctctcagaccatcaactggtaccttcagcgaagcatgagagacgacaattggggtctgctgttcagaaccctgctcgtatatctgttctctctggttgttcttgtgctcctgaccgtaggggtgagcgcccgtctgcgatttatttaa

SEQ ID NO: 10218 - DNA, 582 bp, unidentified
  source 1..582: mol_type = other DNA
  misc_feature 1..582: note = Synthetic
aaggagaggcaccacgaaaacaagaatcactctcagatgtcatcggactccttgacgtcgtcttatcctacaagcccacagaaattggagaagacagaagctggctccatggtatcatcgacaacccaaaagaaaacaagccatcatgcaaagccgacgataacaacaaagacagagcaatctcaacgtcgacccaagatcatagatcaagtgaggggagtggaatctctaggagaacaagtgagtcaaaaacagagacacatgctagaatccttgatcaacaaggtatacacagggcctctaggcgaggaactagtccaaaccctctacctgagaatatgggcaatgaaagaaacaccagaatcgacgaagattctccaaatgagagaagacatcagagatcagtacttacggatgaagacagaaagatggctgagaactctaataagagggaagaagaccaagttgagggatttccagaagaggtacgaagaagtacacccttatctgatgatggagagggtagaacaaataataatggaagaagcatggaaactagcagcacacatagtacaagaataa

SEQ ID NO: 10219 - DNA, 1476 bp, unidentified
  source 1..1476: mol_type = other DNA
  misc_feature 1..1476: note = Synthetic
acgtccctgattcccttcataaagctgttgaccggccctagaaagaccaagagcatgctgtgggcccactgcggtcgcttcttgcgttatcatctgctcccgctgctactgtgtagactgccattcttactcttttttcagcggccgcagtgggcccacggcttggacattgtcgaggaggacgagtggctacgggagatacaaggagcgacgtaccagctgtccatagtacgccaagctatgcagcacgccggattccaagtcagagcggcgtcggttatgacacggcgaaacgccgttgacctggaccgaccgccgctttggtctggatcgctcccgcatttgcccgtctacgatgtgcgttccccgcggccgttgagaccgccgtcatcacagcatcacgccgtatcacccgaactgccgtcgcgaaacgggatacgttggcagtaccaagagctgcagtatctggtggaagaacaacggcggcgaaatcagtcgcgtaatgcgattccgagaccctcgttcccccctccggatccaccatcgcagccggcagaggatgcacgagacgcggacgcagaacgtgccgaatcaccacacactgcagaaagcaccgtcagccacgacgcgagtgacaacgcagtgcggcgacggcacgaaagacggcgctataacgctctgacggtccgcagcagggactcgctgctcctaacgcgaatacgcttctccaaccaacggtgtttcggacgcgggcgtctgagacatcccgcgggaagcggtcccaacaccggcggaccgcgacccggcggtgcgggactccgtcaactacgccaacaactgacggtccgctggcagctgttccgcctacggtgccacggttggacacagcaagtctctagccagatcagaacccgctgggaggaaagcaacgtcgtgagccagacggccacgcgagtacgtacgtggtttgtgcaaagaaccacgttgtggcgtcgcacgtgggttccgggacagaacccggcggccgaagcgcaagaactggcgatcataccgccggcacccacggtgctccggcagaacgaggaaccacgtcaacagcttacgggagaggagacaagaaattcaacgcacactcaacgtgaagaagtggaggacgtttcgagagagggcgcgagagaagggaatgatgggagccgagcaagtggaaacgacgagagaaggaataatgcgggaagatatgatgatgatcatgaggttcaagagccgcaggtcacttatccagcgggacaaggagaactgaataggaggtcacaggaggagaacgaggaaggtggaccgtgtgaatcgccgccaatgacgacaaatacgctgaccgtggcctgtccgccccgcgaacccccgcatcgtgccctgtttcgtctatgcttaggactgtgggtctcgagctacctggttcgacggcccatgacgatttag

SEQ ID NO: 10220 - DNA, 897 bp, unidentified
  misc_feature 1..897: note = Synthetic
  source 1..897: mol_type = other DNA
atgagcaagatctttgtcaaccccagtgcaatcagagctggtctggcagatctggagatggcggaggagactattgatttgatcaatagaaccatagaggataatcaggcccatctgcaaggagtccccatagaggtcgaagcccttccagaggatatgaagaagcttcaaatttccgaccatcaacaaggtcaaccatccggaggggcaactgggcaggatgggagtgaggaagaagacttctatatgacagagagtgagaacccatatattccgttccagtcatatcttgatgctgttggaattcagcttgttaggaagatgaagacaggagagggattcctcaagatttggtcacaggccgccgaggaaatagtctcctatgttgccatcaacttcccccttcctgctgacaaagaatccgctgaaaagtcaactcagactgtgggggagcctctcaagtccaacagtgcatcgaacacccccaataagagatcaaaaccctcgacatcgacagatctaaaggctcaagaagcgtctggccctcacggcattgactgggcagcaagcaatgatgaagatgatgcatctgtagaggcagaaattgcccatcagattgccgaaagtttctcgaagaagtacaaattcccctccagatcatccgggatatttctttggaactttgaacagcttaaaatgaatttggatgatattgtcggcggggcaaaggagattccgggtgtaattaggatggccaaagaaggcaacaaactgccactcaggtgcatcctaggaggtgtggcattgacccattccaagagatttcaagtcctagtcaactccgaaaagctaggcaggatcatgcaggaggacttgaacaaataccttgcaaattaa

SEQ ID NO: 10221 - DNA, 39 bp, unidentified; identical to SEQ ID NO: 533
  source 1..39: mol_type = other DNA
  misc_feature 1..39: note = Synthetic

SEQ ID NO: 10222 - DNA, 129 bp, unidentified; identical to SEQ ID NO: 535
  misc_feature 1..129: note = Synthetic
  source 1..129: mol_type = other DNA

SEQ ID NO: 10223 - DNA, 3042 bp, unidentified
  misc_feature 1..3042: note = Synthetic
  source 1..3042: mol_type = other DNA
atggatctggtgtccttctttaatccgtatctagagaatgtacgaactaagaaaaaaacaaaatctacttttctccggatttttccgcgcggtataatgcacgatggagcacccggcttaatgaagactctttgtgactcggaaccgagaatgttctatcaagataagcaatacattctcaaaaatgatatgacatggccatcgctttctcaagtagccgaaaaagaattgcgtgcgcctttaaaatttcatatctatgatgcatccgaatctttattatttactgattctatagaaaacatccctttccaatatagacatttcgttattccatctggtaatgtcataaaactttttggaaaaacagaatgtggtaaaaaagtttgtatcaatgtatttggacaaaatagttatttctactgtgaatatcaatgtaaaaaagagctgaattctagaatctgttcacttctgaatagttctgaaataaaaatgtcatgctcattttctattgaatctgtaactaaatacaatttctacggttataacacggaacctatcaaaaatttatttaaattatcattttcaaacttttatatcagtaatcgaattggaaaaattttactaaatgagggcgtttctgtttatgaagcagaagttgagattctcaatcgtttcttcattgataacaacttaaaaagctttggttggtaccaaattaattatctatctattcaagaatttgcaaaaagcagtaatgttgaaattgaattaaattgtcatgtgtcagatttatttttgttaaaggaagattcttggccattatatgattgttgttcttttgatattgaatgtctaagccaaaatggaaactttccagatgctgagcaaatgggtgacatcatcattcaaatttcggtcatcgattttgattctgaaggaaattaccaaagtaaacatttgtttactttgggcacttgcgagcaaatcgaaggggtattcatctatgagtttgcatcagaatttgaacttctatatgcttttttcctttttttaaaatgtaaatcaccagaaatccttactggatacaacatcataaatttcgatttaaagtatttatgtacgagaatggaaaaaatatataattttgagatagggggtttttcgaaactaaaacgtggaaagttttctgtcatcgttccctacgaacagcataagaagtttttgaattctttaactaaagttaacatgtctgggattttatgcttcgacatgtataatgtgtattcatctaaaatctcagctcagaattataaattagacactatagccaaactttgtttaaatcaggaaaaaaaaaatctctcttacaaggaaattcctaaaaaatttattgatggttccaaaggtagagctgtggttggcagatattgtatacaagattctctattggttgttcagctttttacaaagattaattatcactatgaaatggctgaggttgcaagtctcgcttatattactattcgttgcgccgtatttgagggacaacaaaaaaaaattttcccatgcattttacacgaagctaaaaatttaaatatgattttaccaagtatgaacactaactttaataaaggcaaagaaaatgtgggctataaaggtgctacagttttagaaccgaaaataggttattatgctactccaacagtagtttttgatttccaaagtttgtatccaagtattatgatggctcataatctgtgttatagtaccctggttgttgatgaaaatgcagtaattggtttacatgcagatgacattctcactgtgcatgttggacctgtaacgcacaggtttgttaaaaagacagtcagggaatcaattttagcgagtttattgaaaaaatggctggataaaagaaaagaagtaaaaatgcagatgaaaatgtgtaacaaccccgtgatggaaatgcttttagataagaagcagcttgcattaaaaactacttgtaattcagtctacggagtcaccggggcaacacatagcttacttccatgtgtggcaatagcagcttctgtcacatgtcttgggcgtgaaatgctttgtaaaactgttgattacgttgacagcgccatgtattcggacacttttttcattgagaaatttggattgacacgcggtgatttttcagggacatttggaatagaggtgatttatggtgatactgacagtctttttgttactttcaaaaatgtttgtcccaaagctttgaaaagaatagctccttctattgcaagccacataacaaacacgttatttaaacatcctatcaaattagaatttgaaaagatcctatttccattaattttaatatgcaagaaacgttacattggaaagttagatgatgcaacgcttgtttttaaaggtgtggagttagttcgcaagacttcttgcgattttgttaaagtggtagttaaagacatcatcgatcttctcttttgggatgtcgatgtacaaaagtctgctgaaaagctctctaatatgacaatacaagaaatctatgaaaatggagttcccgatggtatccaaaaaataattaaaaagttgtgtgacgcacgagacgcacttttcttaaacagggttaacattaaaagtttggttttgtcttcagtcttatcaaaagacatttctgcctacaagcaagcaaatttaccacatttggctgttgttaaaaggttagctcaaagaaaggaagagttgccaaacataggagatagagttatgtacattttaattgcacccacagaaaccgtaaaaaaaacatttcataattatgagttagcagaagatccagcatatgctattgagaacaacttaaaaatcaatgcagataaatattttgaacaaataatgaaagctgtaacaaatgctatctctccaatatttccgaaaacgggcattaagaaagaaaagtttttactttcaatcctacctttaaaagtatatgtagatcaaagcttttgtgacctgacagatgttctgtga

SEQ ID NO: 10224 - DNA, 966 bp, unidentified
  misc_feature 1..966: note = Synthetic
  source 1..966: mol_type = other DNA
atggcggcggcgccgctgcggttgacgccggccacgcagtgcacgagcgtgggcttcttctcggcctcgaggcgcgccagcagcttcacgagcgcgggcatgatggaagtgatgttcgtcttatcgtcgtctctcagcggaatgtggtacgccgttatccccgcgggcgtcgagtacttggacatggtcatgttaaccaggcacttgaagtcgacgccggagtccccccgcagcacggcgcgcgcgtcctcagcgctgcccaagtacacgtggtccgtgagccgcgtcatgcctgagggcatggccagcggcggccccgcgcgcgtgcaccgcaacaggagcctggcgtaccactcgctcttatcgcccatatttatttatatgatacaaatggcagacgtcacgacactgacggccaacggcctgaccctggagttcgcgcgcgagcgcgccctgcgcagcctgcgcgctgcgcgcacctccacgctggtgttcttcacgctcacgctcgcggcctcgctgttcgtgctctggctgcagctaaccgagtttcccgtcttcgaggagctcggcaagtacgcgcgcatcaagagcgcggtgcggtcctggcgcccgctggtggaggctaagaccgagatcgagtccgacctcggccggcaaaagaccgccgaccggcccgagctcttcgagttcaggtgcgtggacttcggcaagttctacctgccggtgaggtacagccccacgaccttcctgccgcaagccgtgcgccgcggcgcgggcgacggctggatggtgcacaaggcggcggccgtggacctcgccgcgcagcagttctgcgagtccgtgctgcggcaccgcgccaacaacgtcatcacatgcgggtcagagatgatgcggctggtgggctacagcggctacttcgaggacgaccactggtgcgccgcgacgtccggcgtgctgacgtga

SEQ ID NO: 10225 - DNA, 60 bp, unidentified; identical to SEQ ID NO: 546
  source 1..60: mol_type = other DNA
  misc_feature 1..60: note = Synthetic

SEQ ID NO: 10226 - DNA, 1170 bp, unidentified
  misc_feature 1..1170: note = Synthetic
  source 1..1170: mol_type = other DNA
atgaaccacttcttcaagcagatcggcgccggcgtgcgcaagcccgcgacgcggctcacgcccagcggcgcgcacgagattcggctgttcacggtgcccgtggagctccccgagttcatatacaacaacgagaacctcttccagaagcccgtcaactccgtggacacggtgctgaaggcgctcgcggtcgcgagcgcctttcgcgaggagtgggaggccgtgcgcgcgctcgcgcgcgcgctgcaggccgcgggcgtgcacgtctgcgacgtgttcttctcgccggtgggctggatggccggaaccgcgccgccgccgggcgcgcacgcggccgtgcgcgtagtcgcgccgagcgcggcctccgccgcgcgtgcggtcaagcagaccgtgcgggcgctgcggccggcggcggcgatggtgcccggcgaggcgcgcgaggacgccgtggtcgaggtgcaggagttctcctccgcgtacgcaggccacgggccgccgccggtgggcgtgatggccgtgtgtcccttcgaccaggacgcgagcgtgctggtgctcttcttcgggcgcacgcaggacgcgcactgcgggatcgcgtaccgctgcgcgacgcgcacagagaccgaccgcatgctggccacgctgctgccgatcgtgtcggagctgcacgtggtctgcgacgacgtgggcagaagcacggtcacgcggcaccgcggcggcggcgccgcgacgcagttcccggacgaccgcgttacgtccatcgtgggcgtggtgcacccttttgaccaccggcagttcccctcggcgccttcggcgtcgccgtcctcggacctggtgctctacgcgccgaagcgcttcgtgttcgtggtggacctgccctcgggcgtggacatccgctgcgcgagccgcagcggcacggacttcgtcacgcacatcaacgggcgcaagctagacgcggtgctggtcatcgtcaaggacgccttcatggcgggcgtgaccatggacggcgtcttccagaaggaaaacctggtctggcgcggcaagtacacgtaccgcgtgacgaagtcaagcttcgaggtcccagagttccgcgggaaggccggcggacacccgcccgacggacgcgtgttggccagccgggagttcgtgacgcggtcgctctatactgtactataa

SEQ ID NO: 10227 - DNA, 21 bp, unidentified
  source 1..21: mol_type = other DNA
  misc_feature 1..21: note = Synthetic
atggtactacgtatactttaa

SEQ ID NO: 10228 - DNA, 69 bp, unidentified
  source 1..69: mol_type = other DNA
  misc_feature 1..69: note = Synthetic
acgaagatattgcagaatttgttaaagaaaatgagagagttaatgtatcgagagtggttgaatgtttga

SEQ ID NO: 10229 - DNA, 1926 bp, unidentified
  source 1..1926: mol_type = other DNA
  misc_feature 1..1926: note = Synthetic
atggcccagggatcgcgagccccatcgggcccgccactgcccgttctccccgtggacgactggctcaactttcgggttgacctgtttggagacgagcaccggcgcctgctgctcgagatgttgacccagggctgctccaactttgtggggctgctcaactttggcgtgcccagccccgtatacgcactcgaggccttggtggacttccaggtgcgcaacgcttttatgaaggtgaagcccgtggcccaggagattatccgtatctgcattctcgctaaccactaccgcaacagccgcgacgtattgcgggacctgcgcacgcagctcgacgtgctgtactcggagccgcttaagacgcggctgcttagagggctcatccgactctgccgcgctgcgcaaaccggcgttaagcccgaggacatcagcgtgcacctgggcgccgacgatgtaacattcggcgtgctaaaacgagcgctggtccggctgcaccgggtacgcgacgcgctggggctgcgcgcgtctcccgaggccgaggcgcgctatccgcgcctcaccacctacaacctgctgttccacccaccgcccttcaccacggtcgaggcggtggatctgtgcgccgagaacctgtccgacgtaacacaacgtcgcaaccgaccgttgcgctgcctcacctccatcaaacgcccgggctcacgcaccctggaggacgcgctaaacgacatgtatctgttgttgacactgcgacacttgcagctgcgacacgcgctggagctacaaatgatgcaggactgggtggtggaacgctgcaaccgtctttgcgacgcgctttacttttgttacacgcaagcccccgaaacgcggcagactttcgtcacgctggtgcgtgggctggaacttgcgcggcaacacagcagtccggccttccagccgatgctgtacaatctgttgcaactactgacgcagctgcacgaggccaacgtgtatctctgcccgggatatttacatttcagcgcgtacaagctgctgaaaaagatccaatcggtctcggacgcccgcgagcgcggcgagttcggggacgaggacgaagagcaggagaacgacggcgagccgcgcgaggcccagctcgatctcgaagccgatcccacggcgcgcgaaggcgagctctttttcttctccaagaacctgtacggcaacggcgaggttttccgcgtgcccgagcaacccagccgctacctgcgtcgacgtatgttcgtggaacggcccgaaaccctgcagatcttctataacttccacgaaggcaagatcaccaccgagacgtatcacctccagcgcatctatagcatgatgatcgagggcgcctctcggcagacgggcctgacacccaagcgcttcatggaactcctcgacagagcgcctctgggccaggagtcggaacccgagatcacagaacatcgcgatttatttgccgatgtttttcgccgtcctgtgaccgacgcggcttcttcgtcgtccgcgtcttcgtcgtcgtcctcagcatctccgaattctgtttcgctgccgtctgccaggtcgtcatccacacgaaccaccacgcccgcgtccacgtacacctcggccgggacttcttctaccacgggtctcttactctcctcttcttctttgtcggggtcgcacggcattagctccgcggacctggagcagccgccccggcaacgacgccgcatggtcagcgtgaccctcttttcgccctactcggtagcctacagccaccaccgacgtcaccgaaggcgacgcagcccgccacccgcaccccgagggccggcccacacacgcttccagggacccgacagcatgccgagcactagctacggcagcgacgtcgaagacccgcgggacgatctggccgaaaacctacggcatctctga

SEQ ID NO: 10230 - DNA, 27 bp, unidentified
  misc_feature 1..27: note = Synthetic
  source 1..27: mol_type = other DNA
atgcctgattgcagcaggaaaacttag

SEQ ID NO: 10231 - DNA, 27 bp, unidentified
  misc_feature 1..27: note = Synthetic
  source 1..27: mol_type = other DNA
atgctacggagacacagtggagactga

SEQ ID NO: 10232 - DNA, 255 bp, unidentified
  source 1..255: mol_type = other DNA
  misc_feature 1..255: note = Synthetic
gtgcgcagcctcgagcgccgtgcagttgagagcagcggctacttggacgcgatccttgcgtacttggaagagtcgcgctacccgttgctgcgccacgccaagcgcttgctcttcgacctctgcttcacgctgctcgtgctgctctgcgtgcttgtgcgcctgtgctggcgaaacctgggcgccgcgctgatgctagcgtgtgccgccgcactatggacgcttgctagcaacttgctctactggcggcgcccgtga

SEQ ID NO: 10233 - DNA, 1716 bp, unidentified
  source 1..1716: mol_type = other DNA
  misc_feature 1..1716: note = Synthetic
attctaatgcagagtgacatggagggcagtcgtgataacctcacagtggatgatgagttaaagacaacatggaggttagcttacagagttgtatctctcctattaatggtgagtgctttgataatttctatagtaatcttgacgagggataacagccaaagcataatcacggcaatcaaccagtcatatgatgcagactcaaagtggcaaacagggatagaggggaaaatcacctctatcatgactgatacgcttgatactaggaatgcagctctcctccacattccactccaacttaatacacttgaagcaaacctattatcagccctcggtggcaacacaggaatcggccccggggatctagagcattgccgttatccagttcatgattctgcttacctgcatggagtcaaccgattacttatcaatcaaacggctgattatacagcagagggtccactagatcatgtgaacttcataccggcaccagttacgaccactggatgcactaggataccatctttttccgtgtcctcatccatttggtgttatactcacaatgtgattgaaactggttttaatgatcactcaggcagcaatcagtatattagcatgggggtgattaagagggctggcaacggcttgccttatttctcaaccgttgtgagtaagtatctgaccgacggattgaataggaaaagttgttctgtggctgctgggtctgggcattgctatcttctctgcagcctagtatcagagcccgagcctgacgactatgtatcaccagaccccacaccgatgaggttaggggttctgacatgggatgggtcctatactgaacaggtggtgcctgaaaggatattcaaaaacatatggagtgcaaattaccctggggtgggatcaggtgctattgtgggaaataaggtgttgttcccattttacggaggagtgaggaatgggtcgacacctgaggttatgaataggggaaggtattactacattcaagatcctaatgattattgtcctgatccactgcaagaccaaatcttaagggcagaacaatcatattatcctacacggtttggtaggaggatggtgatgcagggtgtcttagcgtgcccagtgtccaacaactcaacaattgccagccaatgccagtcctactatttcaacaactcattagggttcattggggcggaatctaggatttattacctaaatgggaacctctacctttaccaaagaagctcgagctggtggccccacccccagatttatctgcttgaccccagaattgcaagcccgggcactcagaacatcgactcaggcattaatctcaagatgttgaatgttaccgttattacacgaccgtcatctggtttttgtaatagtcagtcaagatgccctaatgactgcttattcggggtctattcagacgtctggcctcttagcctaacctcagatagtatattcgcattcacgatgtatttacaagggaagacaacacgtattgacccggcgtgggcactgttctccaatcacgcaattgggcatgaagctcgtctattcaacaaggaggtcagtgctgcttactccactaccacttgcttttcggacaccatccaaaaccaggtgtattgcctgagtatacttgaagttagaagtgagcttttggggccattcaagatagtaccattcctctaccgtgtcctatag

SEQ ID NO: 10234 - DNA, 21 bp, unidentified
  source 1..21: mol_type = other DNA
  misc_feature 1..21: note = Synthetic
ataagattagcgatgttttag

SEQ ID NO: 10235 - DNA, 60 bp, unidentified; identical to SEQ ID NO: 564
  misc_feature 1..60: note = Synthetic
  source 1..60: mol_type = other DNA

SEQ ID NO: 10236 - DNA, 153 bp, unidentified
  misc_feature 1..153: note = Synthetic
  source 1..153: mol_type = other DNA
atgattgagatatcaagatcatcatacaatgtatctgttatagtcaacacacccattggagtaataacaaacgcggcgtccatggcggcgttcgttaaaggcctattattatttcattttttgttgtcacttgtagaatcttttaacacatag

SEQ ID NO: 10237 - DNA, 36 bp, unidentified; identical to SEQ ID NO: 567
  misc_feature 1..36: note = Synthetic
  source 1..36: mol_type = other DNA

SEQ ID NO: 10238 - DNA, 21 bp, unidentified
  source 1..21: mol_type = other DNA
  misc_feature 1..21: note = Synthetic
atgaaagactacgtagactag

SEQ ID NO: 10239 - DNA, 246 bp, unidentified
  misc_feature 1..246: note = Synthetic
  source 1..246: mol_type = other DNA
atgcgcctggtccgaggccttatccggcatgagcatcacgacctcttgaatctcttccaggagatggtgccggatgagatagcccggatagacctggatgacctgtcagtggcggatgatttatcacgcatgcgtgtgatgatgacctacctacagtctttggcatcactatttaatttggggcctcgcttggccacagcggcatactctcaagagaccctgacggccacttgctggttaagataa

SEQ ID NO: 10240 - DNA, 66 bp, unidentified; identical to SEQ ID NO: 571
  misc_feature 1..66: note = Synthetic
  source 1..66: mol_type = other DNA

SEQ ID NO: 10241 - DNA, 318 bp, unidentified
  misc_feature 1..318: note = Synthetic
  source 1..318: mol_type = other DNA
atgatcaacactaccttaactggcaatggtactcaagtatacttagctcccacgctgctatgtgcgggtgtcccgacgctgtcgctcattttaatcatcttgcttctgtgcttcgtgccccgcaaaacccaccccctcccggtccccagcgaaacctgcccctccgacggctgccggctctcccggctgcgccagaggcgcccggagatagagcaccatggcctatggctggtggcgccgaaggagaagacggtggcgcaggtggagacgcagaccatggaggcgccgctggaggacccgaagacgcagacctgctag

SEQ ID NO: 10242 - DNA, 300 bp, unidentified
  misc_feature 1..300: note = Synthetic
  source 1..300: mol_type = other DNA
atggcagaaggggccccagagatcccagaaggagcaggagaggtggatctaaatacctggttggaaagatctctggagaaaatcaatcaggaggcaagattacacttccacccagagttccttttccgtctctggaacgcatgcatagaacactggcatgacagacatcagagaagcttaagctatgcaaagtatagatacctgctgttgatgaataaagcaatgtttactcacatgcaacaagaatgtccttgtagaagtgggcatccgagaggacctcctcctccagggatggtctaa

SEQ ID NO: 10243 - DNA, 30 bp, unidentified; identical to SEQ ID NO: 576
  source 1..30: mol_type = other DNA
  misc_feature 1..30: note = Synthetic

SEQ ID NO: 10244 - DNA, 15 bp, unidentified
  source 1..15: mol_type = other DNA
  misc_feature 1..15: note = Synthetic
atgccccatccatag

SEQ ID NO: 10245 - DNA, 15 bp, unidentified
  misc_feature 1..15: note = Synthetic
  source 1..15: mol_type = other DNA
atactatatgcgtga

SEQ ID NO: 10246 - DNA, 15 bp, unidentified
  misc_feature 1..15: note = Synthetic
  source 1..15: mol_type = other DNA
atgccccatccatag

SEQ ID NO: 10247 - DNA, 15 bp, unidentified
  source 1..15: mol_type = other DNA
  misc_feature 1..15: note = Synthetic
atgccccatccatag

SEQ ID NO: 10248 - DNA, 15 bp, unidentified
  source 1..15: mol_type = other DNA
  misc_feature 1..15: note = Synthetic
atgccccatccatag

SEQ ID NO: 10249 - DNA, 27 bp, unidentified
  misc_feature 1..27: note = Synthetic
  source 1..27: mol_type = other DNA
atagtttaccaaattataccgaactaa

SEQ ID NO: 10250 - DNA, 144 bp, unidentified; identical to SEQ ID NO: 587
  misc_feature 1..144: note = Synthetic
  source 1..144: mol_type = other DNA

SEQ ID NO: 10251 - DNA, 2085 bp, unidentified
  misc_feature 1..2085: note = Synthetic
  source 1..2085: mol_type = other DNA
atgctcttccgactctgggtctttgttctgttgactccctgttacagttggagaccgtggaccatatcggacgagagccattgtaaaaatggaaactctgaaaatccaattgttcgcccgggctttataacttttaacttttatacaaaaaacgacactcggatatatcaagtccctaaatgcttactcggatccgatatcacgtaccatctgtttgatgccatcaacacgacagaatcgttaaccaattatgaaaaacgcgtcacacgtttctatgagccgccaatgaacgatattttaagactttctaccgtacctgcggtcaagcaatttaacctggatcactctatccaaccgcagattgtctattccttaaacctgtacccttcacacggaatttattacatcagggttgtggaagtccgacagatgcaatacgacaacgtttcctgtaagctgcctaattctctcaacgaactgatctttccagtccaagttagatgcgctaaaattacacgctatgcgggcgaaaacatctatacccatttctttactccggactttatgatactgtacatccaaaatcccgcaggagatctgactatgatgtatggaaataccaccgacataaactttaaagccccttataggaaaagttcattcatattcaaacagacattgacagacgatctactattgatagtcgaaaaagacgtagtcgatgaagaataccgtttcatatcagatgcgacattcgtagacgaaacgttggatgacgtagatgaagtagaagctctactactcaaatttaataacctaggaatccaaaccctattaaggggagactgtaaaaaacccgactatgccggcataccgcagatgatgtttctttacggtatcgtacatttctcatatagcacaaaaaacacaggaccgatgcccgtgttaagagtgttaaagacacacgaaaatctcttgtccatcgactcatttgtcaaccgatgtgtgaacgtctcggaaggtacgatacaatacccaaaaatgaaggaatttttaaaatacgagccctcggactatagctacatcaccaaaaacaaatccattcccgtatctacgctgctcacgtacttagcgacagcgtacgaaaccaatgtaacgatttccaggtacaagtggtctgacattgccaacactctacaaaagatctatgaaaaacacatgttttttacgaatctgacattttccgatagggaaactctattcatgctagccgaaatagcgaatttcatccctgccgatgaacgcatgcagaggcacatgcaactactaattggaaacctgtgtaaccccgtagaaatagtttcatgggcccacatgcttacagctgacaaggcaccgaatctagaaaatatttattcgccttgtgcctctcccgtacgcagagatgtaacaaattcttttgtaaaaacagttctcacgtacgcttccctcgaccgttatcgatcagacatgatggagatgctatccgtatacagaccgccagatatggcgagagtagcggccattcagtgtctctctccaagtgagccagcagcttctctgcctctgccgaatgtgacatttgtaatttctccctcttatgtgattaaaggagtgagtttaacaattacaacgacaatcgtggctacgagtataataatcacagccatacctctcaattctacctgcgtttcaacaaattataaatatgcaggacaagatctgcttgtgctacgaaacatatcatctcaaacatgcgagttttgtcagagcgtagtcatggaatatgatgatatcgacggtcccttacaatacatctacataaaaaacatagacgaactaaaaacactgaccgatcccaacaacaatttacttgttcccaacaccaggacgcactaccttttgttagccaaaaacggctctgtttttgagatgtctgaagtcggaatcgatatagaccaagtatctatcatattggttatcatttatgttctgatcgcaataattgctttattcggcttatatagactcatcagattgtgttga

SEQ ID NO: 10252 - DNA, 42 bp, unidentified; identical to SEQ ID NO: 589
  misc_feature 1..42: note = Synthetic
  source 1..42: mol_type = other DNA

SEQ ID NO: 10253 - DNA, 144 bp, unidentified; identical to SEQ ID NO: 592
  source 1..144: mol_type = other DNA
  misc_feature 1..144: note = Synthetic

SEQ ID NO: 10254 - DNA, 12 bp, unidentified
  source 1..12: mol_type = other DNA
  misc_feature 1..12: note = Synthetic
atgatgtcttaa

SEQ ID NO: 10255 - DNA, 60 bp, unidentified; identical to SEQ ID NO: 595
  source 1..60: mol_type = other DNA
  misc_feature 1..60: note = Synthetic

SEQ ID NO: 10256 - DNA, 273 bp, unidentified
  misc_feature 1..273: note = Synthetic
  source 1..273: mol_type = other DNA
atggtaactcctcttctcctgcttgtctgtctgccaattatctacgcctccaccaccttcgccgcagtctcccaccttgatacggattgtcttcccgccttgctgacttatctcatcttcacctctgtttgctgcactgccatctgcagcattgccactttttttgtggccattttccaaactgcggactacctatacgttagagtggcatactatcgtcatcatccccaatataggaaccacgaggtggctacccttctgtgcctgtcatga

SEQ ID NO: 10257 - DNA, 1473 bp, unidentified
  source 1..1473: mol_type = other DNA
  misc_feature 1..1473: note = Synthetic
atggccggcggcagtcaggacgtgcgccggtttatggaccgagaggccactccgccccggggccacgggtcggcgcgctatccgccggagcaggaaaggagcccctcgccgccgctacctcctctgcccaccaagcgccgaaagtatcagcgggtgggctccgggtcttccgaggaggacgtggttccactggacagccctccaaaaaagaagcagcccagaaagaccaaacatgtgaccaaggtaaaccccgacgaagagatgccccaggaagatgccgtgatcgtgggagtgggattcagccagccgccggttctgttgaaggaaggcaaggacggaaaacgcattgtccagcccgcgacccccggtattctgaacgtgtgcaaccccctgagtctgcctttggtttcgtcctgggagaagggcatggataccatgaacgtgctgatggaacgctaccgcgttgacagcggcctgcgcgatgcttacaagcttatgcccgagcagaccgagatcttccaaaaaatgtgccagacctggataaacgaggaggcccgcgggatgcaactgacctttaccacccagaagagctttagcaccgtaatgggtcgcctgttgcaaggttacatctttagccacagcgggatcgcgcacaaaaactgggagtgcaccggcagtgccctgtgggaccacggctgtgccgaggtggaaggccagctcaagtgtctgcacgggacggtaatgatccacaaggaccatgtggtggagatggatgtgaccagcgagaacggtcagcgcgcgttgaaggagcaacccagcaaggccaaagtgacccagaaccgctgggggagaagcgtggtgcaactgaccagccatgacgcgcgctgctgcgtgcaggatgccgggtgcgggaataaccagtttagcgggaaaagctgcggcctgttttttagcgagggagccaaggcccagcaagcttttaagcagattatggcctttattaaggccctgtacccgaatatgcagcgcggcgcagggatgatgctaatgcccgtgcactgcgagtgtaaccacaagccccacagcgtgcccttcctgggccgccagctgtgtaagatgaccccgttcggcctgagcaacgccgaggacctggacaaggatcagattagcgataagagcgtgctggccagcgtaaagtaccccagtttgatggtgtttcagtgctgcaaccccgtgtaccgcaactcgcgcgcgcagagcaccggtcccaactgcgattttaaaatttcagccccggacatgctgggcgccctgcagatgagccggcgcatgtggagcgagaccttccccgagattgctgttcccaaactggtgatccccgagtttaagtggcagcccaagtaccagtaccgcaacgtggcccttcccagcgcggcgcacaacgacgagcgcgagaacccctttgacttttaa

SEQ ID NO: 10258 - DNA, 30 bp, unidentified; identical to SEQ ID NO: 600
  misc_feature 1..30: note = Synthetic
  source 1..30: mol_type = other DNA

SEQ ID NO: 10259 - DNA, 699 bp, unidentified
  source 1..699: mol_type = other DNA
  misc_feature 1..699: note = Synthetic
atggctttggaattgtttaacccagatgagtactatgatattctgtttcctggtgtaaatacttttgttaataatattcaataccttgatcctaggcattggggtccttctttgtttgctactatttcccaggctttgtggcatgttattagggatgatataccttctataacctcacaggaattgcagagaagaacagaaagattttttagagactccttggctagatttttggaggaaactacctggacaattgtaaatgcccctataaacttttataattatattcaacaatattattctgatctttcccctattaggccctcaatggttagacaagtagctgaaagggaaggtacccgtgtacattttggccatacttatagtatagatgatgctgacagtatagaagaagttacacaaagaatggacttaagaaatcaacaaagtgtacattcaggagagtttatagaaaaaactattgccccaggaggtgctaatcaaagaactgctcctcaatggatgttgcctttacttctaggcctgtacgggactgtaacacctgctcttgaagcatatgaagatggccccaaccaaaagaaaaggagagtgtccaggggcagctcccaaaaagccaaaggaacccgtgcaagtgccaaaactactaataaaaggaggagtagaagttctagaagttaa

SEQ ID NO: 10260 - DNA, 27 bp, unidentified
  source 1..27: mol_type = other DNA
  misc_feature 1..27: note = Synthetic
gtgctagaagcgatctctctgacctaa

SEQ ID NO: 10261 - DNA, 27 bp, unidentified
  misc_feature 1..27: note = Synthetic
  source 1..27: mol_type = other DNA
gtgctagaagcgatctctctgacctaa

SEQ ID NO: 10262 - DNA, 27 bp, unidentified
  misc_feature 1..27: note = Synthetic
  source 1..27: mol_type = other DNA
gtgctagaagcgatctctctgacctaa

SEQ ID NO: 10263 - DNA, 42 bp, unidentified; identical to SEQ ID NO: 604
  misc_feature 1..42: note = Synthetic
  source 1..42: mol_type = other DNA

SEQ ID NO: 10264 - DNA, 21 bp, unidentified
  misc_feature 1..21: note = Synthetic
  source 1..21: mol_type = other DNA
aagataaggaaaaggtcataa

SEQ ID NO: 10265 - DNA, 15 bp, unidentified
  source 1..15: mol_type = other DNA
  misc_feature 1..15: note = Synthetic
aagctgttactttaa

SEQ ID NO: 10266 - DNA, 24 bp, unidentified
  misc_feature 1..24: note = Synthetic
  source 1..24: mol_type = other DNA
atgtgtccgataatacattcttaa

SEQ ID NO: 10267 - DNA, 45 bp, unidentified; identical to SEQ ID NO: 608
  misc_feature 1..45: note = Synthetic
  source 1..45: mol_type = other DNA

SEQ ID NO: 10268 - DNA, 504 bp, unidentified
  source 1..504: mol_type = other DNA
  misc_feature 1..504: note = Synthetic
atcgaaggagctactgctgcacaactaactagacaacttaatatggagaagcgagaagttaataaagctctgtacgatcttcaacgtagtgctatggtgtacagctccgacgatattcctcctcgttggtttatgacaacggaggcggataagccggatgctgatgctatggctgacgtcataatagatgatgtatcccgcgaaaaatcaatgagagaggatcataagtcttttgatgatgttattccggctaaaaaaattattgattggaaaggtgctaaccctgtcaccgttattaatgagtactgccaaattactaggagagattggtcttttcgtattgaatcagtggggcctagtaactctcctacattttatgcctgtgtagacatcgacggaagagtattcgataaggcagatggaaaatctaaacgagatgctaaaaataatgcagctaaattggcagtagataaacttcttggttacgtcatcattagattctga

SEQ ID NO: 10269 - DNA, 66 bp, unidentified; identical to SEQ ID NO: 610
  source 1..66: mol_type = other DNA
  misc_feature 1..66: note = Synthetic

SEQ ID NO: 10270 - DNA, 54 bp, unidentified; identical to SEQ ID NO: 611
  misc_feature 1..54: note = Synthetic
  source 1..54: mol_type = other DNA

SEQ ID NO: 10271 - DNA, 15 bp, unidentified
  misc_feature 1..15: note = Synthetic
  source 1..15: mol_type = other DNA
atgaatggacactag

SEQ ID NO: 10272 - DNA, 45 bp, unidentified; identical to SEQ ID NO: 613
  misc_feature 1..45: note = Synthetic
  source 1..45: mol_type = other DNA

SEQ ID NO: 10273 - DNA, 51 bp, unidentified; identical to SEQ ID NO: 614
  misc_feature 1..51: note = Synthetic
  source 1..51: mol_type = other DNA

SEQ ID NO: 10274 - DNA, 45 bp, unidentified; identical to SEQ ID NO: 615
  source 1..45: mol_type = other DNA
  misc_feature 1..45: note = Synthetic

SEQ ID NO: 10275 - DNA, 27 bp, unidentified
  misc_feature 1..27: note = Synthetic
  source 1..27: mol_type = other DNA
atgaggaaactctcaaacaacggctaa

SEQ ID NO: 10276 - DNA, 42 bp, unidentified; identical to SEQ ID NO: 619
  source 1..42: mol_type = other DNA
  misc_feature 1..42: note = Synthetic

SEQ ID NO: 10277 - DNA, 84 bp, unidentified
  misc_feature 1..84: note = Synthetic
  source 1..84: mol_type = other DNA
atgaatgcgactttgatcatctcattatcagcaggcaatggaagagaatactggagtcggccactcctgacacagagagaatga

SEQ ID NO: 10278 - DNA, 42 bp, unidentified; identical to SEQ ID NO: 622
  source 1..42: mol_type = other DNA
  misc_feature 1..42: note = Synthetic

SEQ ID NO: 10279 - DNA, 138 bp, unidentified
  misc_feature 1..138: note = Synthetic
  source 1..138: mol_type = other DNA
atgaggactttcaggattgctatttggaatcttgacgttataataagttcaatagtgagacaattatttaagcctctaactaagaagaattattcggagttagatgatgaagaacctatggagttagattatccataa

SEQ ID NO: 10280 - DNA, 759 bp, unidentified
  misc_feature 1..759: note = Synthetic
  source 1..759: mol_type = other DNA
atgggtaacaaaaatattaaaccatctaaggaaaatagactgtccatcttgtccaaggataagatggattcatttaagagaggatcttgggcaacgtcatcctttagagaaaagtcgcgtgcaaccatccaaagattttcatctcttagacgagaacatattaaagtagaccatcctgacaagttcctggagttaaagagagggatatataaaataattcagaaatcgtcgtctatagatgtggacaaacggactaagctcatgtccaacataaaaacgatgatgataaatccattcatgatcgagggtttaatgacatctttagaaaacttggatcccgataacaagatgagctactcatcggtgatgatattgggagaattcgacatcatcaatataagcgacaatgaggcggcattcgagttcataaacagtctgttgaaatctcttctcttgttaaatactagacaactaaaactcttggaatactccattagtaatgacttgttgtatgcccacataaatgcgttggagtatatcataaaaaatacatttaatgttccagaacggcaactgattctgagaggtcaatacctaactccaattttcagtgatttgttaaagtatgcgggtctaaccataaagtcaaacatactcatgtggaataaacagtttatcaaaccagtatctgacctctatacatctatgagactccttcattgtgttacagaatcatataaggtgattggaatgggataa

SEQ ID NO: 10281 - DNA, 363 bp, unidentified
  source 1..363: mol_type = other DNA
  misc_feature 1..363: note = Synthetic
ttggatgattactttacatggagagccatggttggaagaattggttttgtaccggtcggtataggtaatttatttttaaagcttatgaaccttaatacttattttgataaggatagtattaacttgttaacatccaacctgtcaaaaaaaggttttatttctaggtttaaaaaatacttgtatagtaactacgatgttagttatgttagcgctttaacattaattggagttattggttatatatctgaatgttgtggaaaaataggtttagaaaaatacatacaagatttactactcttattgtttaacttcttagacgataatatcctttttaagttaagatattatttgattaaaaaatga

SEQ ID NO: 10282 - DNA, 6051 bp, unidentified
  source 1..6051: mol_type = other DNA
  misc_feature 1..6051: note = Synthetic
ctgggcaaaacaacacccaagagacaaataacaatggatcctctcaatgaatccactgttaatgtctatcttcctgactcatatcttaaaggagtgatttcctttagtgagactaatgcaattggttcatgtctcttaaaaagaccttacctaaaaaatgacaacactgcaaaagttgccatagagaatcctgttatcgagcatgttagactcaaaaatgcagtcaattctaagatgaaaatatcagattacaagatagtagagccagtaaacatgcaacatgaaattatgaagaatgtacacagttgtgagctcacattattaaaacagtttttaacaaggagtaaaaatattagcactctcaaattaaatatgatatgtgattggctgcagttaaagtctacatcagatgatacctcaatcctaagttttatagatgtagaatttatacctagctgggtaagcaattggtttagtaattggtacaatctcaacaagttgattctggaattcaggaaagaagaagtaataagaactggttcaatcttgtgtaggtcattgggtaaattagtttttgttgtatcatcatatggatgtatagtcaagagcaacaaaagcaaaagagtgagcttcttcacatacaatcaactgttaacatggaaagatgtgatgttaagtagattcaatgcaaatttttgtatatgggtaagcaacagtctgaatgaaaatcaagaagggctagggttgagaagtaatctgcaaggcatattaactaataagctatatgaaactgtagattatatgcttagtttatgttgcaatgaaggtttctcacttgtgaaagagttcgaaggctttattatgagtgaaattcttaggattactgaacatgctcaattcagtactagatttagaaatactttattaaatggattaactgatcaattaacaaaattaaaaaataaaaacagactcagagttcatggtaccgtgttagaaaataatgattatccaatgtacgaagttgtacttaagttattaggagatactttgagatgtattaaattattaatcaataaaaacttagagaatgctgctgaattatactatatatttagaatattcggtcacccaatggtagatgaaagagatgcaatggatgctgtcaaattaaacaatgaaatcacaaaaatccttaggtgggagagcttgacagaactaagaggggcattcatattaaggattatcaaaggatttgtagacaacaacaaaagatggcccaaaattaaaaacttaaaagtgcttagtaagagatggactatgtacttcaaagcaaaaagttaccccagtcaacttgaattaagcgaacaagattttttagagcttgctgcaatacagtttgaacaagagttttctgtccctgaaaaaaccaaccttgagatggtattaaatgataaagctatatcacctcctaaaagattaatatggtctgtgtatccaaaaaattacttacctgagaaaataaaaaatcgatatctagaagagactttcaatgcaagtgatagtctcaaaacaagaagagtactagagtactatttgaaagataataaattcgaccaaaaagaacttaaaagttatgttgttaaacaagaatatttaaatgataaggatcatattgtctcgctaactggaaaagaaagagaattaagtgtaggtagaatgtttgctatgcaaccaggaaaacagcgacaaatacaaatattggctgaaaaattgttagctgataatattgtaccttttttcccagaaaccttaacaaagtatggtgatctagatcttcagagaataatggaaatcaaatcggaactttcttctattaaaactagaagaaatgatagttataataattacattgcaagagcatccatagtaacagatttaagtaagttcaaccaagcctttaggtatgaaactacagcgatctgtgcggatgtagcagatgaactacatggaacacaaagcctattctgttggttacatcttatcgtccctatgacaacaatgatatgtgcctatagacatgcaccaccagaaacaaaaggtgaatatgatatagataagatagaagagcaaagtggtttatatagatatcatatgggtggtattgaaggatggtgtcaaaaactctggacaatggaagctatatctctattagatgttgtatctgtaaaaacacgatgtcaaatgacatctttattaaacggtgacaaccaatcaatagatgtaagtaaaccagttaagttatctgagggtttagatgaagtgaaagcagattatagcttggctgtaaaaatgttaaaagaaataagagatgcatacagaaatataggccataaacttaaagaaggggaaacatatatatcaagagatcttcagtttataagtaaggtgattcaatctgaaggagtaatgcatcctacccctataaaaaagatcttaagagtgggaccatggataaacacaatattagatgacattaaaaccagtgcagagtcaatagggagtctatgtcaggaattagaatttaggggggaaagcataatagttagtctgatattaaggaatttttggctgtataatttatacatgcatgaatcaaagcaacaccccctagcagggaagcagttattcaaacaactaaataaaacattaacatcagtgcagagattttttgaaataaaaaaggaaaatgaagtagtagatctatggatgaacataccaatgcagtttggaggaggagatccagtagtcttctatagatctttctatagaaggacccctgattttttaactgaagcaatcagtcatgtggatattctgttaagaatatcagccaacataagaaatgaagcgaaaataagtttcttcaaagccttactgtcaatagaaaaaaatgaacgtgctacactgacaacactaatgagagatcctcaagctgttggctcagagcgacaagcaaaagtaacaagtgatatcaatagaacagcagttaccagcatcttaagtctttctccaaatcaacttttcagcgatagtgctatacactacagtagaaatgaagaagaggtcggaatcattgctgacaacataacacctgtttatcctcatggactgagagttttgtatgaatcattaccttttcataaagctgaaaaagttgtgaatatgatatcaggaacgaaatccataaccaacttattacagagaacatctgctattaatggtgaagatattgacagagctgtatccatgatgctggagaacctaggattattatctagaatattgtcagtagttgttgatagtatagaaattccaaccaaatctaatggtaggctgatatgttgtcagatatctagaaccctaagggagacatcatggaataatatggaaatagttggagtaacatcccctagcatcactacatgcatggatgtcatatatgcaactagctctcatttgaaagggataatcattgaaaagttcagcactgacagaactacaagaggtcaaagaggtccaaagagcccttgggtagggtcgagcactcaagagaaaaaattagttcctgtttataacagacaaattctttcaaaacaacaaagagaacagctagaagcaattggaaaaatgagatgggtatataaagggacaccaggtttaagacgattactcaataagatttgtcttggaagtttaggcattagttacaaatgtgtaaaacctttattacctaggtttatgagtgtaaatttcctacacaggttatctgtcagtagtagacctatggaattcccagcatcagttccagcttatagaacaacaaattaccattttgacactagtcctattaatcaagcactaagtgagagatttgggaatgaagatattaatttggtcttccaaaatgcaatcagctgtggaattagcataatgagtgtagtagaacaattaactggtaggagtccaaaacagttagttttaatacctcaattagaagaaatagacattatgccaccaccagtgtttcaagggaaattcaattataagctagtagataagataacttctgatcaacatatcttcagtccagacaaaatagatatgttaacactggggaaaatgctcatgcccactataaaaggtcagaaaacagatcagttcctgaacaagagagagaattatttccatgggaataatcttattgagtctttgtcagcagcgttagcatgtcattggtgtgggatattaacagagcaatgtatagaaaataatattttcaagaaagactggggtgacgggttcatatcggatcatgcttttatggacttcaaaatattcctatgtgtctttaaaactaaacttttatgtagttgggggtcccaagggaaaaacattaaagatgaagatatagtagatgaatcaatagataaactgttaaggattgataatactttttggagaatgttcagcaaggttatgtttgaatcaaaggttaagaaaaggataatgttatatgatgtaaaatttctatcattagtaggttatatagggtttaagaattggtttatagaacagttgagatcagctgagttgcatgaggtaccttggattgtcaatgccgaaggtgatctggttgagatcaagtcaattaaaatctatttgcaactgatagagcaaagtttatttttaagaataactgttttgaactatacagatatggcacatgctctcacaagattaatcagaaagaagttgatgtgtgataatgcactattaactccgattccatccccaatggttaatttaactcaagttattgatcctacagaacaattagcttatttccctaagataacatttgaaaggctaaaaaattatgacactagttcaaattatgctaaaggaaagctaacaaggaattacatgatactgttgccatggcaacatgttaatagatataactttgtctttagttctactggatgtaaagttagtctaaaaacatgcattggaaaacttatgaaagatctaaaccctaaagttctgtactttattggagaaggggcaggaaattggatggccagaacagcatgtgaatatcctgacatcaaatttgtatacagaagtttaaaagatgaccttgatcatcattatcctttggaataccagagagttataggagaattaagcaggataatagatagcggtgaagggctttcaatggaaacaacagatgcaactcaaaaaactcattgggatttgatacacagagtaagcaaagatgctttattaataactttatgtgatgcagaatttaaggacagagatgatttttttaagatggtaattctatggaggaaacatgtattatcatgcagaatttgcactacttatgggacagacctctatttattcgcaaagtatcatgctaaagactgcaatgtaaaattacctttttttgtgagatcagtagccacctttattatgcaaggtagtaaactgtcaggctcagaatgctacatactcttaacactaggccaccacaacaatttaccctgccatggagaaatacaaaattctaagatgaaaatagcagtgtgtaatgatttttatgctgcaaaaaaacttgacaataaatctattgaagccaactgtaaatcacttttatcagggctaagaataccgataaataagaaagaattaaatagacagagaaggttattaacactacaaagcaaccattcttctgtagcaacagttggaggtagcaaggtcatagagtctaaatggttaacaaacaaggcaaacacaataattgattggttagaacatattttaaattctccaaaaggtgaattaaattatgatttttttgaagcattagaaaatacttaccctaatatgattaaactaatagataatctagggaatgcagagataaaaaaactgatcaaagtaactggatatatgcttgtaagtaaaaaatga

SEQ ID NO: 10283 - DNA, 222 bp, unidentified
  misc_feature 1..222: note = Synthetic
  source 1..222: mol_type = other DNA
atgaaacacaaagtatattctgaagggttggaaattagtactgattttaactcaataatcagtcaattatctacatccgatatggatatagaaatcgatgaagataatatcacggaacttcttaatatattgactgagctaggttgtgatgtcgactttgatgaagattttagcgatataaccgatgacgttctagaatcgttgatggaacaggatatgtaa

SEQ ID NO: 10284 - DNA, 36 bp, unidentified; identical to SEQ ID NO: 629
  misc_feature 1..36: note = Synthetic
  source 1..36: mol_type = other DNA

SEQ ID NO: 10285 - DNA, 2313 bp, unidentified
  misc_feature 1..2313: note = Synthetic
  source 1..2313: mol_type = other DNA
atggaattggatattaatcgaacattgttggttctactgggtcaagtttatacgtacatctttcaggttgaactgctacgtcgatgtgatccaagggtggcgtgtcgctttttatatcggttagcggctaactgtttgacagttcgttatttattaaagctgtttctccggggatttaatacccagctaaaatttggaaacactcccacggtttgtgcactgcattgggcattatgttatgtaaagggagaaggtgagcgtttgtttgagttgctacaacattttaaaacgcgttttgtttatggtgagactaaagactcaaactgtatcaaagattactttgtctcagcgtttaacttaaaaacctgccaatatcaccatgagctgtcgttaacaacatacggaggttacgtatcgagtgaaattcagtttttacacgacattgagaattttttaaaacagcttaattactgctatattatcacgtcttctcgtgaggcgctaaacacattggaaaccgtgacgcggtttatgacagatactataggaagcggtctaataccacccgtggagttgtttgatccggcgcatccatgtgctatatgttttgaagaattatgtataacagctaaccaaggtgagaccttacatcgtagattattaggatgtatctgcgatcacgttactaagcaagttcgggttaacgtggatgttgacgatattattcggtgtttaccatatatccctgatgtaccggatatcaaacgtcaatccgccgttgaagcgttacgaacacttcaaaccaagacggtagtcaatcccatgggagcaaagaacgatacgtttgaccaaacatacgaaattgcgagcaccatgcttgattcttataatgtttttaaacctgcccctcggtgtatgtacgccatcagcgagcttaaattctggttaacgtctaattccactgaaggaccccaacgtactttagacgtgtttgttgataatttggatgtattaaacgaacatgaaaaacacgcagaacttacagccgtaacggttgagttggcgttatttggaaaaactcccatacactttgatagggcgttttctgaagaactcggatctctggatgcaattgatagtattttggttggcaatcgctcatcctcaccagacagtcagatagaagcattaattaaagcctgttatgcccatcatctatcgtcgcctctcatgcgtcacatttctaacccgagtcatgataacgaagccgccttacgccaacttttagaaagagttgggtgtgaggatgatttaaccaaagaggcgagtgacagcgctacagcatccgaatgtgatctgaacgatgatagtagcataacttttgctgttcatggatgggaaaacctgttatccaaagcaaaaattgacgctgcggaaagaaaacgagtatatcttgaacatctgtctaagcgctctctaaccagcctcggtagatgtatccgcgaacagcgccaagagctagaaaaaacactcagggtaaacgtttatggagaggccttattgcagacatttgtttcgatgcaaaatgggtttggggcacgaaacgtgtttttagctaaggtttcccaggcagggtgtattatcgacaatcgcattcaggaagcggcctttgatgcacatagatttataaggaataccttagttcgacatacagtagatgcggctatgttacctgcacttacacataaattttttgagttggtcaacggcccattgtttaatcacgatgaacaccgttttgcacaaccccctaacaccgccttattttttaccgtggaaaacgttggcctatttccgcacttaaaagaggaattggcaaagtttatgggcggtgtcgttggttccaactggcttctcagtccatttaggggcttttattgcttttctggggtagaaggcgttacttttgcacagagacttgcctggaaatatattagggagcttgtgtttgcaaccacactattcacctctgttttccattgtggggaggtgcggttatgtcgcgttgaccgtctaggtaaggatccacgcgggtgcacgtctcaacctaaaggtataggcagttcccacggacccttagacggcatttatttaacgtacgaagaaacatgtccccttgtggctattattcaaagtggagaaacagggatcgaccagaataccgtcgtaatctacgattcagacgttttttctcttctatacaccctaatgcagcggctggctccggattcaacggacccggcgttttcataa

SEQ ID NO: 10286 - DNA, 72 bp, unidentified; identical to SEQ ID NO: 632
  misc_feature 1..72: note = Synthetic
  source 1..72: mol_type = other DNA

SEQ ID NO: 10287 - DNA, 60 bp, unidentified
  misc_feature 1..60: note = Synthetic
  source 1..60: mol_type = other DNA
attatggaaaacataccgtttgcgcctcccaagttttttatagttgtatacggaaaataa

SEQ ID NO: 10288 - DNA, 60 bp, unidentified
  source 1..60: mol_type = other DNA
  misc_feature 1..60: note = Synthetic
attatggaaaacataccgtttgtgccttccaagatttttatagttgtatacggaaaataa

SEQ ID NO: 10289 - DNA, 747 bp, unidentified
  source 1..747: mol_type = other DNA
  misc_feature 1..747: note = Synthetic
atgaaaaaaattaacagaaatcccagattctctgttgcttaccactattgcatcaaaatgcaacgtctgaagaaatttatagccaagagagaaaagggcgataaaggaaagatgaaatggaacagctcgatggattatgactccccccctagttaccaagatgtaagaaggggtatttttcctacagcgcctttatttggaatggaagatgacatgatggaatttactccatccctggggatccagacattaaagcttcagtataaatgtgtagtgaacatcaatgcgatcaatccattcagagattttcgtgaggcaatatcagccatgcagttctgggaagctgactacagtggatacattgggaagaaaccattttatagagcaataattctccatactgctcggcaattaaaaacatccaatccaggtattctcgaccgcggagtggtagaatatcatgcaaccactcaaggacgggcattagttttccacagccttggaccttccccttccatgatgtttgtcccagaaacttttactcgagaatggaatattcttacaaacaaggggacaatcaatgtaaagatttggcttggggaaactgatactctatcagagttggaaccgatcctcaacccggtcaatttccgagacgaccgagaaatgattgaaggggcggcaataatgggcctggaaattaaaaagcagaaggacaacacatggctgatttctaagagccattga

SEQ ID NO: 10290 - DNA, 2019 bp, unidentified
  misc_feature 1..2019: note = Synthetic
  source 1..2019: mol_type = other DNA
atgccttggtggtacagacgccgtagctacaacccgtggagacgaagaaattggtttagaagacctagaaaaactatttacagaagatacagaagaagacgccgctgggtaagaagaaaacctttttacaaacgtaaaattaagagactaaatatagtagaatggcaacctaaatcaattagaaaatgtagaataaaaggaatgctatgcttgtttcaaacgacagaagacagactgtcatataactttgatatgtatgaagagtctattataccagaaaaactgccgggaggggggggatttagcattaagaatataagcttatatgccttataccaagaacacatacatgcacacaacatatttacacacacaaacacagacagaccactagcaagatacacaggctgttctttaaaattctaccaaagcaaagacatagactacgtagtaacatattctacatcactcccactaagaagctcaatgggaatgtacaactccatgcaaccatccatacatctaatgcaacaaaacaaactaattgtaccaagcaaacaaacacaaaaaagaagaaaaccatatattaaaaaacatatatcaccaccaacacaaatgaaatctcaatggtactttcaacataacattgcaaacataccgctactaatgataagaaccacagcattaacattagataattactatataggaagcagacaattaagtacaaatgtcactatacatacacttaacacaacatacatccaaaacagagactggggagacagaaataaaacttactactgccaaacattaggaacacaaagatacttcctatatggaacacattcaactgcacaaaatattaatgacataaagctacaagaactaatacctttaacaaacacacaagactatgtacaaggctttgattggacagaaaaagacaaacataacataacaacctacaaagaattcttaactaaaggagcaggaaatccatttcacgcagaatggataacagcacaaaacccagtaatacacacagcaaacagtcctacacaaatagaacaaatatacaccgcttcaacaacaacattccaaaacaaaaaactaacagacctaccaacgccaggatatatatttataactccaacagtaagcttaagatacaacccatacaaagacctagcagaaagaaacaaatgctactttgtaagaagcaaaataaatgcacacgggtgggacccagaacaacaccaagaattaataaacagtgacctaccacaatggttactattatttggctacccagactacataaaaagaacacaaaactttgcattagtagacacaaattacatactagtagaccactgcccatacacaaatccagaaaaaacaccatttatacctttaagcacatcatttatagaaggtagaagcccatacagtccttcagacacacatgaaccagatgaagaagaccaaaacaggtggtacccatgctaccaatatcaacaagaatcaataaattcaatatgtcttagcggtccaggcacaccaaaaataccaaaaggaataacagcagaagcaaaagtaaaatattcctttaattttaagtggggtggtgacctaccaccaatgtctacaattacaaacccgacagaccagccaacatatgttgttcccaataacttcaatgaaacaacttcgttacagaatccaaccaccagaccagagcacttcttgtactcctttgacgaaaggaggggacaacttacagaaaaagctacaaaacgcttgcttaaagactgggaaactaaagaaacttctttattgtctacagaatacagattcgcggagccaacacaaacacaagccccacaagaggacccgtcctcggaagaagaagaagagagcaacctcttcgagcgactcctccgacagcgaaccaagcagctccagctcaagcgcagaataatacaaacattgaaagacctacaaaaattagaataa

SEQ ID NO: 10291 - DNA, 1275 bp, unidentified
  misc_feature 1..1275: note = Synthetic
  source 1..1275: mol_type = other DNA
atgaatccggataatacaatcgcagtgattacagagactattcctataggtatgcaatttgataaagtatatttgactacatttaacatgtggagggaaattctatccaataccataaaaacactagatatatcatctttttattggagtttatcggatgaagtgggtacgaatttcggcacggtaatattaaacgagattgtacaattacccaaaagaggagtaagagttagagtagccgtcaataaatccaacaaaccattaaaggatgttgaaagactacaaatggccggagttgaagtacgatacatagatattacaaatatcctaggaggagttcttcatacaaaattttggatatctgataatacacatatttatttaggaagcgctaacatggattggagatcactaactcaggtcaaggaattgggtattgcgatcttcaataataggaacttggcagcggatctcactcaaatttttgaggtatactggtatcttggagttaacaatctaccatataattggaaaaacttttatccgtcgtattataatacagatcatcctcttagtattaacgtaagcggtgttccacactctgtatttattgcttctgcaccacaacaattatgtactatggaaagaaccaatgatttaaccgctttattgtcatgtatcagaaatgcgagtaaattcgtttatgtatctgttatgaactttattcctattatttattcaaaggcgggtaaaattttgttttggccttatatagaagatgaattaagaagatccgctatagacagacaagtatccgttaagctattgattagttgctggcaacgatcttcgtttatcatgagaaactttttaagatctatagctatgctaaaatctaaaaacatagatatagaagtaaagctatttattgtaccagatgctgatcctcccattccgtattctagggtaaaccatgcaaaatatatggtaaccgataaaacggcgtatataggtacatcaaattggacaggaaattactttacggatatatgtggagcatctattaatattacaccggatgatggattaggtcttcgtcaacaattggaagatatttttatacgtgattggaattcaaaatacagctatgaattgtacgatactagtcctactaaaaggtgtagactattaaaaaatatgaaacaatgtacaaatgatatatactgcgacgagatacaaccggaaaaggaacttcctgaatattctcttgaataa

SEQ ID NO: 10292 - DNA, 186 bp, unidentified; identical to SEQ ID NO: 644
  source 1..186: mol_type = other DNA
  misc_feature 1..186: note = Synthetic

SEQ ID NO: 10293 - DNA, 54 bp, unidentified; identical to SEQ ID NO: 646
  misc_feature 1..54: note = Synthetic
  source 1..54: mol_type = other DNA

SEQ ID NO: 10294 - DNA, 474 bp, unidentified
  misc_feature 1..474: note = Synthetic
  source 1..474: mol_type = other DNA
atgagaccccacttggaaaaagcaataaaaggagttgaaggcagagttggagagatgggacgaatggcaatgaaatggttagttgttataatatgtttctctataacaagtcaacctgcttctgcttgcaatctaaagacctgtctaaaactatttaacaatactgatgcggtaactgttcattgttttaatgaaaaccaaggatacatgctaacattagcctctttgggattagggataattactatgttgtatttattagtaaaaatcataattgaacttgtcaatggttttgtgctcggcagatgggagagatggtgtggagatataaagaccacaattatgcctgaaattgactcgatggaaaaagatattgccctttctagggagagacttgacctgggagaggatgctcctgacgaaaccgacaactcaccaattcctttttccaatgatggtatttttgaaatttaa

SEQ ID NO: 10295 - DNA, 30 bp, unidentified; identical to SEQ ID NO: 651
  misc_feature 1..30: note = Synthetic
  source 1..30: mol_type = other DNA

SEQ ID NO: 10296 - DNA, 30 bp, unidentified; identical to SEQ ID NO: 651
  misc_feature 1..30: note = Synthetic
  source 1..30: mol_type = other DNA

SEQ ID NO: 10297 - DNA, 60 bp, unidentified; identical to SEQ ID NO: 652
  source 1..60: mol_type = other DNA
  misc_feature 1..60: note = Synthetic

SEQ ID NO: 10298 - DNA, 60 bp, unidentified; identical to SEQ ID NO: 652
  source 1..60: mol_type = other DNA
  misc_feature 1..60: note = Synthetic

SEQ ID NO: 10299 - DNA, 30 bp, unidentified; identical to SEQ ID NO: 653
  source 1..30: mol_type = other DNA
  misc_feature 1..30: note = Synthetic

SEQ ID NO: 10300 - DNA, 246 bp, unidentified
  source 1..246: mol_type = other DNA
  misc_feature 1..246: note = Synthetic
atagagttcacagtagctcattcagtcaaaatgtttgactatctggaaaatgaggaggtggctctcgatgaacttaaacagatgttgagagacagagatcctaatgataccaggaaccaattcaagaataatgctttacacgcatacctttttaatgagcattgtaataatgtcgaggtcgtcaaactactactagacagtggcactaatccattacgcaaaaattggagacagctaccccattag

SEQ ID NO: 10301 - DNA, 33 bp, unidentified
  source 1..33: mol_type = other DNA
  misc_feature 1..33: note = Synthetic
gtgatactgaatctgaagaagagttgcaactag

SEQ ID NO: 10302 - DNA, 42 bp, unidentified; identical to SEQ ID NO: 659
  misc_feature 1..42: note = Synthetic
  source 1..42: mol_type = other DNA

SEQ ID NO: 10303 - DNA, 12 bp, unidentified
  source 1..12: mol_type = other DNA
  misc_feature 1..12: note = Synthetic
atgaaaggataa

SEQ ID NO: 10304 - DNA, 21 bp, unidentified
  misc_feature 1..21: note = Synthetic
  source 1..21: mol_type = other DNA
atggaaattaaacgttattaa

SEQ ID NO: 10305 - DNA, 123 bp, unidentified
  misc_feature 1..123: note = Synthetic
  source 1..123: mol_type = other DNA
atgaagaagaaaagtcaaatcctgaagcacgtgtacctaacaacgaagaagcagaaaaaaataataaaaatgttgacgaaaatgttaaaatcaataaagaaaacatcaaaaaagaaattttag

SEQ ID NO: 10306 - DNA, 1434 bp, unidentified
  misc_feature 1..1434: note = Synthetic
  source 1..1434: mol_type = other DNA
atcgaggaagtaattctcccgacttatctcgcaagtatgtcatctgtgttcacagattacgacaaactccaggagtacttggtgacgccatgtaaaaaacgtgttgatggggcgacaggagggctcttaagattaaacattccagtctgtgtaaccacatcagagaatccagaggagcgttgggcattggcaataatctgcctaaggtggatagtcagcgattcagcaacagaggcaataaaaattggtgccatattatcactactcagtttacatgcgagtaatatgaaggctcatgcgtcacttgctgcacgaagcagtgaagctgagctaactatacttgaaatggaaaatcttgatatgcagcaacagttaataaggttctctgctcgaagtggagttccagaaaccagggcgcgacagctctttgcaatgattgacgatattaatacctcgtgtaggaatggatccccatttttaaatcccaacatcgaaagcgatagccctgcggacatgtccgatctcctagacatgctccatagcatagctgcacaaatctgggtatcagcgatgaaaagtatgacagcacctgacacagcagccgaatctgaagcacggcggatagccaaatatgcacaacaaaatcgtgtaacccagcagactatgctccaaacatatacgaggactgaattgagcaggctcatcagaaagtctctcatccttagacatttcatgatctatgaaataaggagagcaacctcaatgggatccaatactactaaatattatgccatggttggagacgctgctgcatatttcaagaatgcagggttggcctcattcttcttaacccttaggttcggaattggaaccaaatatccagtcttggcaatggcagcactatcctcagatcttaagaaaattcagagtttaattcgagtttatcagcagaaaggagaagaggcaccgtatatgactttcttggaagatccagacacaatgagtttcgctccagggaattaccccttaatatattcctacgctatgggggttggatcaattctagaagctagtgtaggtaaataccagtttgctcgttcattcatgaacgatacattctaccggctgggtgtagacactgctcaaaagcaccagggggctctggatgagcaaatggcaaatgaacttcaattaacatcagaggcaagacaaagtgtcaaagagcttatggctagccttgatatgagcgaccatagtcccaaccagactgcagctccttcttttctagctaatccaaataaccccaatcctgcacctgccccgaccggtcaacaggaatcaagaacctctcagcctactcccccttcttcaggcaccatccagccacctgcaccagctgatccgccgagcaccagtcatggacttgatatttag

SEQ ID NO: 10307 - DNA, 1074 bp, unidentified
  misc_feature 1..1074: note = Synthetic
  source 1..1074: mol_type = other DNA
atggatatctttaaagaactaatcttaaaataccctgatgaaaatgttttgatttctccagtttccattttatctactttatctattctgaatcatggagcagctggttctacagctgaacaactatcaaaatatatagagaatgtgaatgaaaatacacccgatgataagaaggatgacaataatgacatggacgtagatgttccgtattgtgcgacactagctattgcaaataaaatatactgtagcgatagtatcgagttccacgcctccttcctacaaaaaataaaagatgattttcaaactgtaaactttaataatgctaaccaaacaaaggaactaatcaatgaatgggttaagacgatgacaaatggtaaaattaattccttattgactagtccactgcccattaatactcgcatgacagttgttagcgccgtccattttaaagcaatgtggaaatatccattttctaaacatcttacatatacagacaagttttatatttctaaaaatatagttaccagcgttgatatgatggtgagcactgaaaacgacttacaatatgtacatattaatgaattatttggaggattctctattatcgatattccatacgagggaaactctagtatggtaattatactaccagacgacatagaaggtttatataacatagaaaaacacataactgaagaaaattttaaaaaatggtgtggtaagttatacactaaaagtatagacttgtatatgccaaagtttaaactgaaaatgacagaatcgtataatctggtacctattctagaaaatttaggacttactaatatattcggatattatgcagattttagcaagatgtgtaatgaaactatcactgtagaaaaatttctacacaagacgtttatagatgttaatgaggagtatacagaagcatcggctattacaggagtatttatgactaacttttcgatggtatatcgtacgaaggtctacataaaccatccattcatatacatgattaaagacaacacaggacgtatactctttatagggaaatactgttatccacaataa

SEQ ID NO: 10308 - DNA, 129 bp, unidentified
  source 1..129: mol_type = other DNA
  misc_feature 1..129: note = Synthetic
acggaaaacggtgtggaaccctcaatctggtcatcaacccttatgaacttttcttgcctgatgaacttgatgatgattgttgtgatgatcctttcaactgttgtttctctgatgtctacgcttctatag

SEQ ID NO: 10309 - DNA, 87 bp, unidentified; identical to SEQ ID NO: 682
  misc_feature 1..87: note = Synthetic
  source 1..87: mol_type = other DNA

SEQ ID NO: 10310 - DNA, 36 bp, unidentified; identical to SEQ ID NO: 684
  misc_feature 1..36: note = Synthetic
  source 1..36: mol_type = other DNA

SEQ ID NO: 10311 - DNA, 126 bp, unidentified
  source 1..126: mol_type = other DNA
  misc_feature 1..126: note = Synthetic
ctgaacccgacacaatcagactctggtatttatatgtgcattaccaagaacgagacctacagtgatatgatgtcgttaaatttgacaattgtgtctgtctcagaatcaaatatagatcttatttag

SEQ ID NO: 10312 - DNA, 687 bp, unidentified
  source 1..687: mol_type = other DNA
  misc_feature 1..687: note = Synthetic
attttcaggatgaggtccctggttatagttctgctgttcccctctatcatttactccatggtcattagacgatgtgagaagatggaagaggaaacgtggaaattgaaaataggaatgtgtatacaggctaaagatttctattccaaaagaactgactgcagtgtccatcgtccagatgtaggtggaggattgataacagaaggcaatggatacagagtagtcgttcatgatcaatgtgaagagcccaatccatttattattgctaccacaaaacaaacccattttggtgtcacccattcatacattgaattcagcaatagtaacaccggtgcaccagagaatatcccagattgtagtaaacatattttgatttctgtatattgtgatcaagaggcaagtggactagatttccacacattgaaatatgtagaatcaaattatttgcatattacagttaagtatgatacatcatgtattaatcatctgggtgtgaattatagtttcatgaatgaatgtgaacggaaactcacgagtatatatgaaactgatactctaacctgtggagcaaaggatatacaaactagagacaaatatcttaagacttgcaccaacacaaaatttgaccggagtgtctacaagacgcacatgcagaaaagtaagatactccatgttaaaacagaattgtaa

SEQ ID NO: 10313 - DNA, 27 bp, unidentified
  misc_feature 1..27: note = Synthetic
  source 1..27: mol_type = other DNA
ctgcgtcgtcgtagatattccgcgtaa

SEQ ID NO: 10314 - DNA, 783 bp, unidentified
  misc_feature 1..783: note = Synthetic
  source 1..783: mol_type = other DNA
atggcgtccgaaaaaatggcgcagcgcccgcagagcagctacgacgactacgtgaacaccttgcagaagatcgcgccgcatctgcgatctctcctgactcagctcaacaacgagcaggtcattcgtggaggcgccacctccggcgacgtggattgcgtgggcggcgccggcgcgctggaggctagttcgtcgtctacccgccgcggaagctcctcctcttcgtccagaaagcgcactaccggcaccaggtcgaccggcagccggtccacgggctctaggtcatccggaactcggtccagcagcagcaccaggagtcgccgcagcggcgcgccttctcgaagaaacaacgacggtgtgtacagcggaatgaacgcctgtgacgacgagaccaccatccaggctgtgtccaactgcggcaagatcgtgtacggggtcgtcaagaacggcaagttggacgtgcagggaactgtcggcgaagtgtgcgaagacttgctcggcatcgacagcgttaacggcggccgcaagaaaagctccagcggcaagtctggcaccggcacttcacgccgcggcggtactggcactggcactggtaggagcagcacgagcggcacaacaggtcgccgcagtaccaacagcggaacctcgagttccgcttctagctcccgccgccgcgcctcctccagcaacactccctgctccacgacctcgagcgcttccaccggcgcgcggcgccgcgcctccaacctcatgaacgccatggacctcgacagcggcatgtgctga

SEQ ID NO: 10315 - DNA, 6636 bp, unidentified
  source 1..6636: mol_type = other DNA
  misc_feature 1..6636: note = Synthetic
atgtccaatcaagcagctgagattatactccctacctttcacctagagtcacccttaatcgagaacaaatgcttctactatatgcaattacttggtcttatgttgccgcatgatcattggagatggagggcatttgtcaactttacagtggatcaagcacaccttagaaaccgtaatcctcgcttgatggcccacatcgaccacactaaggataaactaagggctcatggtgtcttaggtttccatcagacccaaacaggtgagagccgtttccgtgtcttgcttcacccggaaaccttaccatggctatcagcaatgggaggatgcataaaccaagtccccaaagcatggcggaacactctgaagtccatcgagcacagtgtgaagcaggaggcaacacaactacaatcgcttatgaaaaaaacctcattgaaattaacaggagtaccctacttattttccaactgtaatcccgggaaaaccacaacaggcactatgcctgtattaagcgagatggcatcagagctcctatcaaatcccatctcccaattccaatcaacatgggggtgtgctgcttcagggtggcaccatattgttagcatcatgaggcttcaacagtatcaaagaaggacaggtaaagaggagaaggcgatcactgaggttcattttggttcagacacctgtctcattaatgcagactacaccgttatcttttccttacagagccgtgtaataacagttttaccttttgacgttgtcctcatgatgcaagacctgctcgaatctcgacgaaatgtcctgttctgtgcccgctttatgtaccccagaagccaattgcatgagaggataagcatgatactagctctcggagatcaacttgggaaaaaggcaccccaagttctatatgactttgttgcaacccttgaatcatttgcatacgcagctgtccaacttcatgacaataaccctatctacggtgggactttctttgaattcaatatccaagaattagaatctatcttgtctcctgcgcttagcaaggaccaggtcaacttctacattagtcaggttgtctcagcatacagtaacctccccccatctgaatcggcagaattgctatgcctgttacgcctatggggtcaccctttactaaatagcctcgatgcagcaaagaaagtcagagaatcaatgtgtgccgggaaggttcttgactacaatgccattcgattagtcttgtctttttaccatacattattgatcaatggatatcggaagaaacacaagggacgctggccaaatgtgaatcaacattcactactcaacccaatagtgaggcagctttactttgatcaagaagagatcccacattctgtcgccctcgaacattacttagacatctcaatgatagaatttgagaaaacttttgaggttgaactatctgacagcctaagcatctttttgaaagacaagtcgattgccttggacaaacaagagtggtacagcggttttgtttcagaagtgaccccaaagcacttgcggatgtctcgtcatgaccgcaagtccaccaacaggctcctgctggcctttatcaactcccctgaattcgatgttaaagaagagctaaaatacttgactacaggtgagtatgctactgatccaaatttcaacgtttcttactcacttaaagagaaggaagtaaagaaagaaggacgaatctttgcaaaaatgtcacaaaagatgagagcgtgccaggttatttgtgaagagttgctagcacatcatgtagcccctttgtttaaagagaatggtgtcacacagtcggaactatctctgacaaaaaatctgctagctatcagtcagttgagttataactcaatggctgctaaggtgcggttgctgagaccaggggacaaattcactgccgcacactatatgaccacagacctgaaaaagtactgccttaattggcgtcaccagtcagtcaaactgtttgccagaagcctagatcgactgttcgggctagatcatgctttttcttggatacatgtccgcctcaccaacagcaccatgtatgtggctgatccattcaatccaccagactcagatgcatgcccaaacttagacgacaacaaaaacacgggaattttcatcataagtgcacgaggtgggatagaaggcctccaacaaaaactgtggaccggcatatcaatcgcaatcgcgcaagcagctgcagccctcgaaggcttgagaattgctgctactttgcagggggacaaccaggttctagcgatcacgaaggaatttgtaaccccagtcccggaaggtgtcctccatgagcaattatctgaggcgatgtcccgatataaaaagactttcacataccttaattacttaatggggcatcaactgaaagataaagagacaatccaatccagtgatttctttgtttactctaaaaggatattctttaatgggtccattctgagtcaatgtctcaaaaacttcagtaagctcaccactaatgccaccacccttgccgagaacactgtagccggctgcagtgacatctcatcatgcatcgctcgttgtgtagaaaacgggttgccaaaggatgctgcatacatccagaacatagtcatgactcgacttcaactgttgctagatcactactattccatgcatggtggcataaactcagaattagaacagccgaccctaagtatttctgttcggaatgcaacctatttaccatctcagttgggcggttacaatcatctaaatatgacccgactattttgccgcaacatcggtgacccgctcactagttcctgggcagaagcaaagagactaatggaagttggcctgctcaatcgtaaattcctggagggaatattgtggcgacctccgggaagtgggacattctcaacacttatgcttgacccgtttgcgctgaacattgattacctcagaccaccagagacaataatccgaaagcatacccagaaggtcttgctgcaagattgccctaatcccctattagccggtgtggttgatccgaactacaaccaggaactggaactattagcgcagttcttgctcgaccgagagaccgttattcccagggcagctcatgctatctttgagctgtctgtcttggggaggaaaaaacatatacaagggttggtggacactacaaaaacgattatccagtgttcgctggaaagacaaccattgtcctggaggaaagttgagaacattatcacctataatgcgcagtatttccttggagccactcagcagattgatacagattcccctgaaaagcagtgggtgatgccaagcaacttcaagaagctcgtgtctcttgacgattgttcagtcacattgtctactgtttcccggcgtatatcttgggccaacctacttaattggagggcaatagatggcttggaaaccccagatgtgatagaaagtattgatgggcgccttgtgcaatcatccaatcagtgtggcctatgtaatcaaggattaagttcctactcctggttcttcctcccctccggatgtgtgtttgatcgtccacaagactccagggtagtaccgaaaatgccgtatgtgggatccaagacagatgagaggcagactgcgtcggtacaagctatacagggatccacatgtcaccttagagcagcattgagacttgtatcactctacctttgggcttatggggattctgatatatcatggctggaagccgcgacactagcccaaacacggtgcaatatttcccttgatgatctgcgaatcctgagccctctaccttcctcggcaaatttacaccacagattaaatgacggggtaacacaagtgaaattcatgcctgctacatcaagccgagtatcaaagtttgtccagatttgcaatgacaaccagaatcttatccgtgatgatgggagtgtggattccaatatgatttatcagcaagtcatgatattaggacttggggaatttgagtgcttgttggccgacccaatcgatactaacccagagcaattgattcttcatctacactctgacaattcttgctgcctccgggagatgccaacaaccggctttgtgcctgctttgggattaaccccatgcttaactgtaccaaagcaaaatccatatatttatgacgagagtccaatacctggtgacctggatcaacggctcatccaaacaaagtttttcatgggttctgataatctagacaaccttgatatctatcagcaacgagcgttactaagtcggtgtgtggcttatgatgttatccaatcagtatttgcttgtgatgcaccagtttctcagaagaatgatgcaatcctccatactgactatcatgagaattggatctcagagttccgatggggtgaccctcggataattcaagtgacagcaggttatgaattgatcttgtttcttgcttaccagctttattaccttagagtgaggggtgaccgtgcaatcctgtgctatattgataggatactgaataggatggtgtcatcaaatctaggcagccttatccagacactctcccatccggagattaggaggaggttttcattaagtgatcaaggattccttgttgaaagggaactagagccaggcaaacctttggtaaaacaagcagtcatgttcctaagggactcagtccgatgtgctttagcaactatcaaggcaggagtcgagccggagatctcccgaggtggctgtacccaagatgagttgagtttcaccctcaagcacttgctatgtcgacgtctctgtataattgctctcatgcattcagaagcaaagaacttggtcaaggtcagaaatctcccagtagaggaaaaatctgctttactataccagatgttggtcaccgaagctaatgcccggaaatcaggatctgctagcatcatcataggcttaatttcggcacctcagtgggatatccataccccagcactgtactttgtatcaaagaagatgctaggaatgctcaaaaggtcaactacaccattggatgtaaatgatctgtctgagagccaggaccttatgccaacagagttgagtgatggtcctggtcacatggcagagggatttccctgtctatttagtagttttaacgctacatatgaagacacaattgtttataatccgatgactgaaaagcctgcagtacatttggacaatggatccaccccatccagggcgctaggtcgccactacatcttgcggcccctcgggctttactcgtctgcatggtaccggtctgcagcactcttagcatcaggtgctctcaatgggttaccggagggatcaagcctatacttgggagaagggtatgggaccaccatgactctgctcgaacccgtcgtcaagtcctcaactgtttattaccacacattgtttgacccgacccggaatccctcacagcggaattacaaaccagagccgcgagtcttcactgattccatctggtacaaggatgacttcacacgaccgcctggtggcattgtaaatctatggggtgaagatgtgcgtcagagtgacgtcacacagaaagacacagttaatttcatattatcccggatcccacccaaatcactcaaactgatccatgttgacattgaattctcaccagactccaatgtacggacactactatctggttactcccattgcgcattattggcctactggctattgcaacctggagggcgatttgcggttagggtcttcctgagtgaccatctcttagtaaacttggtcactgctattctgtctgctttcgactctaatctactgtgtattgcatctggattgacacacaaagatgatggggcaggttacatttgtgctaagaagcttgccaatgttgaggcatcaaggattgagcactacttaaggatggtccatggttgcgttgattcattaaagatcccccaccaactagggatcattaagtgggctgaaggtgaggtgtctcggctcacaaaaaaggcagatgaagaaataaattggcgattaggtgacccggttactagatcatttgatccagtttccgagttaataatcgcacggacaggggggtctgtattaatggaatatgggactttcattaatctcaggtgttcaaacctggcagatacatataaacttttggcttcaatcgtggagaccaccttgatggagataagggttgaacaagatcaattggaagacaactcaagaagacaaattcaggtggtccccgcctttaatacgagatccggggggaggatccgtacattgattgagtgtgcccagctgcaggttatagatgtcatatgtgtaaacatagatcacctcttccccaaacatcgacatgttcttgttacacaactcacttaccagtcagtgtgccttggagacttgatcgaggggccccaaattaagatgtatctaagggccaggaagtggatccaacgtagaggactcaatgagacaattaaccatatcatcactggacagatatcacgaaataaggcaagggatttcttcaagaggcgcctgaagttggttggcttctcgctttgcggcggttggagttacctctcactttag

SEQ ID NO: 10316 - DNA, 18 bp, unidentified
  source 1..18: mol_type = other DNA
  misc_feature 1..18: note = Synthetic
ataagaacggggtggtga

SEQ ID NO: 10317 - DNA, 174 bp, unidentified
  source 1..174: mol_type = other DNA
  misc_feature 1..174: note = Synthetic
atgagcctcaggttccccgagagggcgggttacgagaaactgggataccgcccgcatgccaaacgcgtgtgggtgcatgacccgttgggattgacgcggtttatcatgaggcaactcatgatgtacccgctggtgttgccgttcacttttccgttttacgtgccgcggtcctag

SEQ ID NO: 10318 - DNA, 129 bp, unidentified; identical to SEQ ID NO: 701
  source 1..129: mol_type = other DNA
  misc_feature 1..129: note = Synthetic

SEQ ID NO: 10319 - DNA, 108 bp, unidentified; identical to SEQ ID NO: 702
  source 1..108: mol_type = other DNA
  misc_feature 1..108: note = Synthetic

SEQ ID NO: 10320 - DNA, 18 bp, unidentified
  source 1..18: mol_type = other DNA
  misc_feature 1..18: note = Synthetic
atgagacagaatatatag

SEQ ID NO: 10321 - DNA, 63 bp, unidentified; identical to SEQ ID NO: 260
  source 1..63: mol_type = other DNA
  misc_feature 1..63: note = Synthetic

SEQ ID NO: 10322 - DNA, 228 bp, unidentified
  source 1..228: mol_type = other DNA
  misc_feature 1..228: note = Synthetic
atgaacggagttttaaacgatataaagactgagtttttatgtaatactaaaacagatcttttaacgttgatacaaaaaatttgtctgaactgtgatttcattcttgaaccggtagaatcttttcctaaaaaaaccgagttggttgcggtgatgtatgatacgctcgcggtggaaatttttaacgatcttttaaaatataatgaacaaaaaaaagatggacttgcctaa

SEQ ID NO: 10323 - DNA, 57 bp, unidentified; identical to SEQ ID NO: 708
  misc_feature 1..57: note = Synthetic
  source 1..57: mol_type = other DNA

SEQ ID NO: 10324 - DNA, 60 bp, unidentified; identical to SEQ ID NO: 711
  misc_feature 1..60: note = Synthetic
  source 1..60: mol_type = other DNA

SEQ ID NO: 10325 - DNA, 18 bp, unidentified
  misc_feature 1..18: note = Synthetic
  source 1..18: mol_type = other DNA
atgagacggaatatatag

SEQ ID NO: 10326 - DNA, 21 bp, unidentified
  source 1..21: mol_type = other DNA
  misc_feature 1..21: note = Synthetic
atgccccatctaaacgcctga

SEQ ID NO: 10327 - DNA, 24 bp, unidentified
  misc_feature 1..24: note = Synthetic
  source 1..24: mol_type = other DNA
atgacaggctgcgcctcctgttga

SEQ ID NO: 10328 - DNA, 51 bp, unidentified; identical to SEQ ID NO: 719
  source 1..51: mol_type = other DNA
  misc_feature 1..51: note = Synthetic

SEQ ID NO: 10329 - DNA, 21 bp, unidentified
  misc_feature 1..21: note = Synthetic
  source 1..21: mol_type = other DNA
atgccccatctaaacgcctga

SEQ ID NO: 10330 - DNA, 21 bp, unidentified
  source 1..21: mol_type = other DNA
  misc_feature 1..21: note = Synthetic
atgccccatctaaacgcctga

SEQ ID NO: 10331 - DNA, 24 bp, unidentified
  source 1..24: mol_type = other DNA
  misc_feature 1..24: note = Synthetic
atgacaggctgcgcctcctgttga

SEQ ID NO: 10332 - DNA, 24 bp, unidentified
  misc_feature 1..24: note = Synthetic
  source 1..24: mol_type = other DNA
atgacaggctgcgcctcctgttga

SEQ ID NO: 10333 - DNA, 51 bp, unidentified; identical to SEQ ID NO: 719
  source 1..51: mol_type = other DNA
  misc_feature 1..51: note = Synthetic

SEQ ID NO: 10334 - DNA, 51 bp, unidentified; identical to SEQ ID NO: 719
  misc_feature 1..51: note = Synthetic
  source 1..51: mol_type = other DNA

SEQ ID NO: 10335 - DNA, 60 bp, unidentified; identical to SEQ ID NO: 721
  source 1..60: mol_type = other DNA
  misc_feature 1..60: note = Synthetic

SEQ ID NO: 10336 - DNA, 57 bp, unidentified; identical to SEQ ID NO: 722
  misc_feature 1..57: note = Synthetic
  source 1..57: mol_type = other DNA

SEQ ID NO: 10337 - DNA, 273 bp, unidentified
  misc_feature 1..273: note = Synthetic
  source 1..273: mol_type = other DNA
atggcaaaacagctctgcctgctgcctcaggaacccttttgcatcactcgtgtgtgccttttgtgcttgctacataaacaaaacctaaacgctcagtataaaaggccggtggacacgtatgatccttgcctaattctaacgggagaggcagaaagatatatggtggacgctgtgggaaattaccgggaagcctccactggaactaccgtactctaccccacgtatgatctgggctccatagttgcggacatggtgacttatgaagatgagtag

SEQ ID NO: 10338 - DNA, 273 bp, unidentified; identical to SEQ ID NO: 10337
  misc_feature 1..273: note = Synthetic
  source 1..273: mol_type = other DNA

SEQ ID NO: 10339 - DNA, 990 bp, unidentified
  source 1..990: mol_type = other DNA
  misc_feature 1..990: note = Synthetic
atgcagcaggataggacttatagacatcatggacccgaagtgtctggctggttttctgagcaattaatgaccggcaaaataccgctaacagaggtgtttgttgatgttgaaaacaaaccaagtcctgccccgataaccattattagtaagaatcccaagacaacacgtaaaagtgataagcaagtccaaacagatgatgccagtagcttattgacagaagaagtcaaggctgccataaattcggtgatatcagctgtgcgtcggcaaaccaatgctattgaatcactagaaggtcgagtaacaactcttgaggccagcttaaaacccgttcaagacatggcaaagaccatatcatccctgaatcgcagctgtgccgaaatggttgcaaaatacgacctactggtgatgaccactgggcgagcaactgccactgctgcagcaacagaagcatattggaatgaacatggacaagcacctccaggcccatcattgtacgaggatgatgctattaaggctaaattgaaagatccgaacgggaaggttccagaaagtgtcaaacaggcctacataaatctagatagcacaagtgccctcaatgaggaaaatttcgggcgaccttacatttcagcaaaagatctcaaggaaatcatctatgaccatctcccaggatttgggacagcttttcatcagttggtgcaggttatctgcaaaattggtaaggataataatatcctagacataattcatgcagaattccaagcaagcttggctgagggagactccccccagtgtgcattaatccagataacaaaacggatccctgctttccaagatgcctctcctccaattgtgcatatcaagtctcgaggagatatacccaaagcctgtcagaaaagcctccggccggtcccaccgtcaccaaagatcgatagaggttgggtctgtatttttcaattccaagacgggaaggcccttgggctaaaaatatga

SEQ ID NO: 10340 - DNA, 717 bp, unidentified
  source 1..717: mol_type = other DNA
  misc_feature 1..717: note = Synthetic
atgcatgtaatttctgagacacttgcatatgggcatgttcccgcatttattatgggctccactctggtgcgtcccagtttaaacgccaccgccgaggaaaatcccgcgtcagaaacgcgatgtttattacgagtgcttgcggggagaactgtagacctgccaggcggaggaacgttacacattacctgtaccaaaacctatgtaattattggcaaatatagcaaacccggcgaacgtcttagccttgcccgtctaatagggcgtgcaatgacgcctggaggtgcaaggacatttattattttggcgatgaaggaaaagcgatccacaacgcttgggtatgaatgtggtacgggcttgcatttactggctccatctatgggtacatttctccgcacacacggtttaagtaacagagatctctgtttatggcggggtaatatttatgatatgcatatgcaacgtcttatgttttgggagaatatcgcgcaaaataccactgaaacaccttgtataacgtcgacgttaacatgcaacttgacagaagactctggtgaagccgcacttaccacgtcagaccgacccactctcccaaccctaacagcccaaggaagaccaacagtttccaacattcgtggaatattgaaaggatccccccgtcaacagccggtctgtcaccgggttagatttgccgaacctacggagggcgtattgatgtaa

SEQ ID NO: 10341 - DNA, 102 bp, unidentified
  misc_feature 1..102: note = Synthetic
  source 1..102: mol_type = other DNA
atgtttattacgagtgcttgcggggagaactgtagacctgccaggcggaggaacgttacacattacctgtaccaaaacctatgtaattattggcaaatatag

SEQ ID NO: 10342 - DNA, 1716 bp, unidentified
  source 1..1716: mol_type = other DNA
  misc_feature 1..1716: note = Synthetic
atggaccgcgcggttaacagagtcgtgctggagaatgaggaaagagaagcaaagaacacatggcgcctggttttccggatcgcagtcttacttttaatggtaatgactctagctatctccgcagctgccctggcatacagcacgggggccagtacgccgcacgacctcgcaggcatatcgactgtgatctccaagacagaagataaggttacgtctttactcagttcaagtcaagatgtgatagataggatatacaagcaggtggctcttgaatccccgctggcgctactaaacactgaatctataattatgaatgcaataacctctctttcttatcaaattaacggggctgcgaacaatagcggatgtggggcgcctgttcatgacccagattatatcggggggataggcaaagaactcatagtggacgacatcagtgatgtcacatcattttatccttctgcatatcaagaacacttgaatttcatcccggcgcctactacaggatccggttgcactcggataccctcatttgacatgagcaccacccattattgttatactcacaatgtgatactatccggttgcagagatcactcacactcatatcaatacttagcacttggtgtgcttcggacatctgcaacagggagggtattcttttctactctgcgctccgtcaatttagatgacacccaaaatcggaagtcctgcagtgtgagtgcaacccctttaggttgtgatatgctgtgctctaaggtcacagggactgaagaggaggattacaagtcagttgcccccacatcaatggtgcacggaaggctagggtttgacggtcaataccatgagaaggacttagacaccacggtcttatttaaggattgggtggcaaattacccaggagcgggaggagggtcttttattgacgaccgtgtatggttcccagtttacggagggctcaaacccaattcacccagtgacactgcacaagaagggaaatatgtaatatacaagcgccataacaacacatgccccgatgaacaagattaccaaattcggatggctaagtcttcatataaacccgggcgatttggtggaaagcgcgtacagcaagccatcttatccatcaaagtgtcaacatccttgggtaaggacccggtgctgactattccacctaatacaatcacactcatgggagccgaaggcagaatcctcacagtagggacatctcacttcttgtaccaacgagggtcttcatatttctcccctgccttattatatcccatgacagtaaataacaaaacggctacactccatagtccttatacgtttaatgctttcactcggccaggtagtgtcccttgccaggcatcagcaagatgccccaactcatgcatcactggggtctatactgatccatatcccctaatcttccataggaatcatactctacgaggggtcttcgggacgatgcttgatgatgaacaagcgagacttaaccccgtatctgcagtattcgacaacatatcccgcagtcgtgtcacccgggtgagttcaagcagcaccaaggcagcatacacgacatcgacatgttttaaagttgtcgagaccaataaagcttattgtcttagtattgcagaaatatccaataccctattcggggaatttaggatcgttcccttactagttgagatcctcaaggatgatagagtttaa

SEQ ID NO: 10343 - DNA, 21 bp, unidentified
  source 1..21: mol_type = other DNA
  misc_feature 1..21: note = Synthetic
atgcaaagcccttacctttga

SEQ ID NO: 10344 - DNA, 210 bp, unidentified
  source 1..210: mol_type = other DNA
  misc_feature 1..210: note = Synthetic
ataggcataactgtattaatgcttttgatggtgatttctggtgccgccctgatagtcaaggagttaaatcctaatgatatattcacaatgcaatcattaaagtttaatcgagccgtaacgattttcaaatatataggactctttatctatataccaggaacaatcattttgtacgctacatacgtcaaatccctattaatgaaaagttaa

SEQ ID NO: 10345 - DNA, 192 bp, unidentified
  misc_feature 1..192: note = Synthetic
  source 1..192: mol_type = other DNA
atgcttttgatggtaatttctggcaccgccatgatagtcaaggagttaaatcctaatgatatattcactatgcaatcattaaagtttaatcgaaccgtaacgattttcaaatatataggactctttatctatataccaggaacgataattttgtacgctacatacgtcaaatccctattaatgaaaaattaa

SEQ ID NO: 10346 - DNA, 240 bp, unidentified
  misc_feature 1..240: note = Synthetic
  source 1..240: mol_type = other DNA
atggcggatgctataaccgttctaactgcgatcggtataactgtattaatgcttttgatggtaatttctggcaccgccatgatagtcaaggagttaaatcctaatgatatattcacaatgcaatcattaaagtttaatcgagccgtaacgattttcaaatatataggactctttatctatataccaggaacgataattttgtacgctacgtacatcaaatccctattaatgaaaagttaa

SEQ ID NO: 10347 - DNA, 27 bp, unidentified
  source 1..27: mol_type = other DNA
  misc_feature 1..27: note = Synthetic
atgttaacaatactgcgactttgttaa

SEQ ID NO: 10348 - DNA, 2502 bp, unidentified
  misc_feature 1..2502: note = Synthetic
  source 1..2502: mol_type = other DNA
atttctataaattttatagtcttaatagaaggaaataaaatgtcattgtcttcattattcaatggtaaatatgacacaaaattccttttaaacatgtcatctgctgctaaggtggagttgattgttgagaaagttgcagctttagctgatgcctgtttagagacgccgttaccaactgactggtttcgtaacattcttgatcctgaattagaatttaatagcaattttgaagaaattcattctataggtgatgaagaatttgctcaaccgttgccatttttaccttttagagtattattaataaccggtactgcgggtgcgggcaaaacaagcagcattcaaaccttagcagctaatagtgattgtcttataactgctaccacttccattgctgctcaaaatcttagtggtttattgaacagaaccaaatctgcgcaagtgaaaacaatttttaaaacatttggttttaatagttcacatgtatctatgaatgaaagaattagttgttcagtaacaactttagattcgattgcggatcagcaaaaacatgatttatctacatattggaacgtcatcgcagatatagcggaaagagctttgaatgcagcaaatgggaaagccaaagtgatacctgatctatgtgaaagcagtgtgattgtgattgatgaagcaggagtgatcttaaggcacattttgcatacagttgtctttttttattggttttataacggtcttcataaaacacagctctataaaaatagagttattccttgtattgtatgtgttggatctcctacacaaagtggggctttaatttcatcgtttaatccgttaacacaaaataaagacgtaaagaaaggatttgatatcttatccgctttaatatgtgacgacattctatcaaattactgtaaaatatcagaaaattgggtgatttttgttaataataaacgatgcactgatgtggaattcggcgaatttttaaaacatatagaatttggtttgccattgaaacctgaattgattgagtatgttgataggtttgttagaccggcaacttatattagaaatcctacaaacgaaattggaatgacgcgtttatttttatcacattacgaagttaagtcatattttaaagttttacatgagcaggtcgaactgacaaataaagataatctttttacttttcctgtttatttcataattcagaataaagcatttgaagattacaaaaatgaaatttcaaattttactttagagattgaaccatggtttaaaactaatttacacagattaaatacttattcccaattcgctgatcaagatttgtctaagaccatacaaatcgaagaaattgtattagatgatggttcggtagaggaaactttgataacgtgtcatttgaaacatataaaacatagttctattggcgttacttccagaacaaaatcttcaactgttgggttttcagggacatatgaaaaatttgtggagcttctgcaaagtgatttatttattgaaaaaacagcatgcgaatatagcgtgcacgcctattccttcttgacaggtttaatgtatgggggtatgtattctttctgtttatccgaattcacgacttctgaagtaatgacagaaataagaaagatcaaattgcccaatattgattttctacaaacaatgacagctgaagtttctttgcaaaccttcgatgaatcagacgaatactatgatctacacattgcacctacagatgaagaaatgttagcttcggatccgtgcccagatcctttttttttaaagtacaagcaacttccattaacgaatgttctaacatttgaagaaatcagttacctttatacagtatttaaagagattttcatttctagatttgcaattctacaaaggcacagtaaagaaatgttcggcaagagtaatttaatcacatataataggaataatgtttcgagcaaaagatgtggggagatatgttcacatgttaaaagcttctacggcatgttaacatatgctgtgcctgctaataattatactttggaaggatatacttatgataatgtgattttcttagggacggataaaatgcttcctccgataatttacaaaagaggtttacccaaaattgttatcaaggatgaaatgggctttatttcgatcttagacaacaatgtatcaaaacttactgacactgtcaatggtaacagttttcatatctgtacaaccatagattacgccatagtttctaaagttgcaatgactgtgacaaaaagtcaaggcttatctatacaaagggttgccttagattttggaaatgatcctaaaaatttaaagttgagttctatatatgttggtatgtcaagagttgttgatccaaataatttaattatgaatctgaaccctttacggttgaactatgaaaatgataatattattgcttcacatattgtaaaggccttaaaaaataaagatactatgcttattttttaa

SEQ ID NO: 10349 - DNA, 1368 bp, unidentified
  misc_feature 1..1368: note = Synthetic
  source 1..1368: mol_type = other DNA
atggggctctttggactgacacgctttatccatgaacataaactggttaaacccagcatcatttcaacgccacccggagttttaacccccgtggcggtagacgtatggaacgtcatgtacacattgttggaacgtttataccctgtgggtaaacgcgagaatttacacggaccatctgtaacgatacattgtcttggagtcttattgcggctattaacacaacggtcatactatccgatatttgtattggaacgttgtacagacggcccattatcacgtggagccaaggcaattatgtcacgggccatgaaccacgatgaaaggggaacctcggacttaacccgtgttctactatcatccaacacatcatgttctatcaagtataacaaaacatcggaaacatatgacagtgtgtttcgaaactcttccacgagttgtattcctagcgaagaaaacaaatcccaggatatgtttttggacggttgtccacgacaaactgacaagacgatctgcctgcgcgaccaaaacgtatgcagtcttacctctacaatgccatcccgaggacatcctaaccatcgattatatcacaaattgtgtgcaagtcttattagatggatggggtatgcatacgtcgaggcggttgacattgaggcggacgaggcatgtgcaaacttatttcatacgcgtacagtggctttggtttatacgacagatactgatttactcttcatgggctgtgatattttgttagatgcaattcctatgtttgctccagtagtacgatgtcgcgatttgcttcaatatttaggaattacataccctgaatttttggttgcctttgttcgctgtcagaccgatttgcatacaagtgacaacctaaaatctgttcagcaagttattcaggataccggcctgaaagttccacatcaaatggacacttcaacgcgctcccccacttacgactcgtggagacatggcgaggttttcaaaagtcttaccgtagccacgtcgggtaaaacagaaaacggagtgtccgtttccaaatatgcatctaaccgatcggaggtgacagtagacgccagttgggctttaaaccttctgccaccctcatcctccccattggataatttggaacgcgcatttgttgaacatataatcgccgtggtaactccattgacccgcggtcgcctaaagttaatgaaacgtgtaaatattatgcaaaatacggcagacccatatatggttattaacaccttatatcataacttaaagggggaaaaaatggctcgccaatacgcacgtatttttaaacagtttattcctactccactcccactaaacactgtattaacaaaatattggaattaa

SEQ ID NO: 10350 - DNA, 261 bp, unidentified
  source 1..261: mol_type = other DNA
  misc_feature 1..261: note = Synthetic
atgggaatcgtgaacatccttgcctgcaccttcttttcctttgtgatttacccccgctttgactttggttggaacgcacccgaggcgctctggctcccgcctgatcccgacacaccaccacagcagcagcaaaatcaggcacacgcaccaccaccacagcctaggccccaatacatgcccatcttaaactatgaggccgagccacaacgagccatgcttcctgctattagttacttcaatctaaccggtggagatgactga

SEQ ID NO: 10351 - DNA, 39 bp, unidentified; identical to SEQ ID NO: 750
  source 1..39: mol_type = other DNA
  misc_feature 1..39: note = Synthetic

SEQ ID NO: 10352 - DNA, 741 bp, unidentified
  source 1..741: mol_type = other DNA
  misc_feature 1..741: note = Synthetic
ctgactactgcctctcccttatcgtcaatcttctcgaggattggggaccctgcgctgaacatggagaacatcacatcaggattcctaggaccccttctcgtgttacaggcggggtttttcttgttgacaagaatcctcacaataccgcagagtctagactcgtggtggacttctctcaattttctagggggaactaccgtgtgtcttggccaaaattcgcagtccccaacctccaatcactcaccaacctcttgtcctccaacttgtcctggttatcgctggatgtgtctgcggcgttttatcatcttcctcttcatcctgctgctatgcctcatcttcttgttggttcttctggactatcaaggtatgttgcccgtttgtcctctaattccaggatcctcaacaaccagcacgggaccatgccggacctgcatgactactgctcaaggaacctctatgtatccctcctgttgctgtaccaaaccttcggacggaaattgcacctgtattcccatcccatcatcctgggctttcggaaaattcctatgggagtgggcctcagcccgtttctcctggctcagtttactagtgccatttgttcagtggttcgtagggctttcccccactgtttggctttcagttatatggatgatgtggtattgggggccaagtctgtacagcatcttgagtccctttttaccgctgttaccaattttcttttgtctttgggtatacatttaa

SEQ ID NO: 10353 - DNA, 123 bp, unidentified; identical to SEQ ID NO: 753
  misc_feature 1..123: note = Synthetic
  source 1..123: mol_type = other DNA

SEQ ID NO: 10354 - DNA, 123 bp, unidentified; identical to SEQ ID NO: 753
  source 1..123: mol_type = other DNA
  misc_feature 1..123: note = Synthetic

SEQ ID NO: 10355 - DNA, 123 bp, unidentified; identical to SEQ ID NO: 753
  source 1..123: mol_type = other DNA
  misc_feature 1..123: note = Synthetic

SEQ ID NO: 10356 - DNA, 786 bp, unidentified
  misc_feature 1..786: note = Synthetic
  source 1..786: mol_type = other DNA
atgaacaacctatcagctcaagacttctacaaaaaatgtacctacaactcagaaaccagaaaccaaatgtggatgtcctgcattgctgactcccatgacagttggtgtaactgcgatactccttttgctcacctcttggctagtatttttcctcctggtcacacagatcgcacacgaaccatccaagaaatacttaccagagactttaggaaacaatgcctttctggtgggggcgacgcagaaaattctggtatggccgccaatatagaagaaaaagaaaaccatatcaaagaagaaagaaaagaagaatttttagaagaccaaaatatagaagatctactcgccgccgtcgcagacgcagaaggaagaaccagctcccaaaaagaaaagactactgccagtcctccacgacccgcaaaagaaaacggagaaaatcaacaaatgtctcctctctctctgcgaagaaagtacatgccaagagcaggaaacgccggaaaacatccagcagctcatcaagcagcagcagcagcagcagcagaagctcaagcacaacctcttagtactaatcaaagacttaaaagtaaaacagagactactacagctacaaacaggtgtactagaataactttaaccagatttaaacctggttttgaacaagacacagaaaaagagttagcacaagcatttaatagaccccctagactctttaaagaagacaaacccttttacccatggctacccagattcaccccccttgtaaactttcaccttaattttaaaggctag

SEQ ID NO: 10357 - DNA, 780 bp, unidentified
  source 1..780: mol_type = other DNA
  misc_feature 1..780: note = Synthetic
atgaacaacctatcagctcaagacttctacaaaaaatgtacctacaactcagaaaccagaaaccaaatgtggatgtcctgcattgctgactcccatgacagttggtgtaactgcgatactccttttgctcacctcttggctagtatttttcctcctggtcacacagatcgcacacgaaccatccaagaaatacttaccagagactttaggaaacaatgcctttctggtgggggcgacgcagaaaattctggtatggccgccaatatagaagaaaaagaaaaccatatcaaagaagaaagaaaagaagaatttttagaagaccaaaatatagaagatctactcgccgccgtcgcagacgcagaaggaagatatcagaccaaccagttgaagacccaggaaacaaaaacaaatatgatgtgcccgatacagtcaaagaagcattacaggttattaacccagcaaaaaacattgctgccacaatgttccatgactgggactacagaaggggctgcattacatcaacagctattaaaagaatgcaacaaaacctcccaactgattcatctctcgaatctgattcagactcagaaccagctcccaaaaagaaaagactactgccagtcctccacgacccgcaaaagaaaacggagaaaatcaacaaatgtctcctctctctctgcgaagaaagtacatgccaagagcaggaaacgccggaaaacatccagcagctcatcaagcagcagcagcagcagcagcagaagctcaagcacaacctcttag

SEQ ID NO: 10358 - DNA, 372 bp, unidentified
  misc_feature 1..372: note = Synthetic
  source 1..372: mol_type = other DNA
atgaacaacctatcagctcaagacttctacaaaaaatgtacctacaactcagaaaccagaaaccaaatgtggatgtcctgcattgctgactcccatgacagttggtgtaactgcgatactccttttgctcacctcttggctagtatttttcctcctggtcacacagatcgcacacgaaccatccaagaaatacttaccagagactttaggaaacaatgcctttctggtgggggcgacgcagaaaattctggtatggccgccaatatagaagaaaaagaaaaccatatcaaagaagaaagaaaagaagaatttttagaagaccaaaatatagaagatctactcgccgccgtcgcagacgcagaaggaaggtaa

SEQ ID NO: 10359 - DNA, 210 bp, unidentified
  misc_feature 1..210: note = Synthetic
  source 1..210: mol_type = other DNA
ataggcataactgtattaatgcttttgatggtaatttctggtgccgccctgatagtcaaggagttaaatcctaatgatatattcactatgcaatcattaaagtttaatcgagccgtaacgattttcaaatatataggactctttatctatataccaggaacaatcattttgtacgctacgtacgtcaaatccctattaatgaaaagttaa

SEQ ID NO: 10360 - DNA, 354 bp, unidentified
  source 1..354: mol_type = other DNA
  misc_feature 1..354: note = Synthetic
atgagggtgtgcttaagaatgccggtggagggcgctctgcgcgagctttttatcatggctggcttggatttacctcaggaactaatacgaatcattcaaggctggaaaaatgaaaattatctaggcatggtgcaggagtgtaatatgatgattgaggaattagaaaacgctcccgctttcgctgtcctcttgtttctggatgtgcgcgtggaggctttgctggaagccaccgtggaacatctcgagaaccgtgttacctttgacctggctgttattttccaccaacacagtgggggcgagaggtgccacctccgggacctgcattttgaagtgttccgagaccgtttggaataa

SEQ ID NO: 10361 - DNA, 30 bp, unidentified; identical to SEQ ID NO: 760
  source 1..30: mol_type = other DNA
  misc_feature 1..30: note = Synthetic

SEQ ID NO: 10362 - DNA, 354 bp, unidentified
  source 1..354: mol_type = other DNA
  misc_feature 1..354: note = Synthetic
atgagggtgtgtttaagaatggtggtggagggcgccctccgggacctgtttgtaatgtgtggtttggatttaccacaagaactgacacgaataattcaaggctggaaagctgaaaattatctgggaatggtgcaggaatgtaatatgatgtttgaggagttagaaaatgctccttcttttggtattcttttgtttttggatgtgcgcgtggaggctttgttggaagccaccgttgagcaccttgaaaatcgcatttcttttgatttagctgtgctttttcaccaacacagtgggggcgatagatgccatctgcgcgatctacaatttgaagtactgcgagatcgtttggaataa

SEQ ID NO: 10363 - DNA, 30 bp, unidentified; identical to SEQ ID NO: 763
  source 1..30: mol_type = other DNA
  misc_feature 1..30: note = Synthetic

SEQ ID NO: 10364 - DNA, 354 bp, unidentified
  source 1..354: mol_type = other DNA
  misc_feature 1..354: note = Synthetic
atgagggtgtgtttaagaatggtggtggagggcgccctccgggacctgtttgtaatgtgtggattggatttaccacaagaactgacacgaataattcaaggctggaaagctgaaaattatctgggaatggtgcaggaatgtaatatgatgattgaggagttagaaaatgctccttcttttggtattcttttgttcttggatgtgcgcgtggaggctttgctggaagccaccgttgagcaccttgaaaatcgcatttcttttgatctagctgtgctttttcaccaacacagtgggggcgagagatgccatctgcgcgatctacaatttgaagtactgcgagatcgtttggaataa

SEQ ID NO: 10365 - DNA, 831 bp, unidentified
  misc_feature 1..831: note = Synthetic
  source 1..831: mol_type = other DNA
acgctgttctgcagccatttaactttaaataatttacaaaaatttaaaatgagcatccgtataaaaatcgataaactgcgccaaattgtggcatatttttcagagttcagtgaagaagtatctataaatgtagactcgacggatgagttaatgtatatttttgccgccttgggcggatctgtaaacatttgggccattatacctctcagtgcatcagtgttctaccgcggagccgaaaatattgtgtttaatcttcctgtgtccaaggtaaaatcgtgtttgtgtagttttcacaatgatgccatcatagatatagaacctgatctggaaaataatctagtaaaactttctagttatcatgtagtaagtgtcgattgtaataaggaactgatgcctattaggacagatactactatttgtctaagtatagatcaaaagaaatcttacgtgtttaattttcacaagtatgaagaaaaatgttgtggtagaaccgtcattcatttagaatggttgttgggctttatcaagtgtattagtcagcatcagcatttggctattatgtttaaagatgacaatattattatgaagactcctggtaatactgatgcattttccagggaatattctatgactgaatgttctcaagaactacaaaagttttctttcaaaatagctatctcgtctctcaacaaactacgaggattcaaaaagagagtcaatgtttttgaaactagaatcgtaatggataatgacgataacattttaggaatgttgttttcggatagagttcaatcctttaagatcaacatctttatggcgtttttagattaa

SEQ ID NO: 10366 - DNA, 831 bp, unidentified
  misc_feature 1..831: note = Synthetic
  source 1..831: mol_type = other DNA
acgctgttctgcagccatttaactttaaataatttacaaaaatttaaaatgagcatccgtataaaaatcgataaactgcgccaaattgtggcatatttttcagagttcagtgaagaagtgtctataaatgtagactcgacggatgagttaatgtatatttttgccgccttgggcggatctgtaaacatttgggctattatacctctcagtgcatcagtgttctaccgtggagccgaaaacattgtgtttaatcttccggtgtccaaggtaaaatcgtgtttgtgtagttttcacaatgatgccatcatagatatagaacccgatctggaaaataatctagtaaaactttccagttatcatgtagtaagtgtcgattgtaataaggaactgatgcctattaggacagatactactatttgtctaagtatagatcaaaagaaatcttacgtgtttaattttcacaagtatgaagaaaaatgttgtggtagaaccgtcattcatctagaatggttgttgggctttatcaagtgtattagtcagcatcagcatttggctattatgtttaaagatgacaatattattatgaggactcctggtaatactgatgcattttccagggaatattctatgactgaatgttctcaagaacttcaaaagttttctttcaaaatagctatctcgtctctcaacaaactacgaggattcaaaaagagagtcaatgtttttgaaactagaatcgtaatggataatgacgataacattctaggaatgttgttttctgacagagttcaatcctttaagattaacatctttatggcgtttttagactaa

SEQ ID NO: 10367 - DNA, 831 bp, unidentified
  source 1..831: mol_type = other DNA
  misc_feature 1..831: note = Synthetic
acgctgttctgcagccatttaactttaaataatttacaaaaatttaaaatgagtatccgtataaaaatcgataaactgcgccaaattgtggcatatttttcagagttcagtgaagaagtgtctataaatgtagactcaacggatgagttaatgtatatttttgccgccttgggcggatctgtaaacatttgggccattatacctcttagtgcatcagtgttctaccgcggagccgaaaatattgtgtttaatcttccggtgtccaaggtaaaatcgtgtttgtgtagttttcacaatgatgccatcatagatatagaacctgatctggaaaataatctagtaaaactttctagttatcatgtagtaagtgtcgattgtaacaaggaactgatgcctattaggacagatactactatttgtctaagtatagatcaaaagaaatcttacgtgtttaattttcacaagtatgaagaaaaatgttgtggtagaaccgtcattcatctagaatggttgttgggctttattaagtgtattagtcagcatcagcatttgactattatgtttaaagatgacaatattattatgaagactcctggtaatactgatgctttttccagggaatattctatgactgaatgttctcaagaactacaaaagttttctttcaaaatagctatctcgtctctcaacaaactacgaggattcaaaaagagagtcaatgtttttgaaaccagaatcgtaatggataatgacgataacattctaggaatgttgttttcggatagagttcaatcctttaagatcaacatctttatggcgtttttagattaa

SEQ ID NO: 10368 - DNA, 828 bp, unidentified
  misc_feature 1..828: note = Synthetic
  source 1..828: mol_type = other DNA
ctgttctgtagccatttaactttaaataatttacaaaaatttaaaatgagcatccgtataaaaatcgataaattgcgccaaattgtggcatatttttcagagttcagcgaagaagtgtctataaatgtagactcgacggatgagttaatgtatatttttgccgccttgggcggatctgtaaacatttgggccattatacctctcagtgcatcagtgttctaccgcggagccgaaaatattgtgtttaaccttccagtgtccaaggtaaaatcgtgtttgtgtagttttcacaatgatgctatcatagatatagaacctgatctggaaaataatctagtaaaactttctagttatcatgtagtaagtgtcgattgtaacaaggaactgatgcctattaggacagatactactatttgtttaagtatagatcaaaagaaatcttacgtatttaattttcacaagtatgaagaaaaatgttgtggtagaaccgtcattcatctagaatggttgttgggctttatcaagtgtattagtcagcatcagcatttggctattatgtttaaagatgacaatattattatgaagactcctggtaatactgatgcgttttccagggaatattctatgactgaatgttctcaagaactacaaaagttttctttcaaaatagctatctcgtctctcaacaaactacgaggattcaaaaagagagtcaatgtttttgaaactagaatcgtaatggataatgacgataacattctaggaatgttgttttcggatagagttcaatcctttaagattaacatctttatggcgtttttagactaa

SEQ ID NO: 10369 - DNA, 108 bp, unidentified; identical to SEQ ID NO: 774
  source 1..108: mol_type = other DNA
  misc_feature 1..108: note = Synthetic

SEQ ID NO: 10370 - DNA, 21 bp, unidentified
  misc_feature 1..21: note = Synthetic
  source 1..21: mol_type = other DNA
atggacactcatttaacgtga

SEQ ID NO: 10371 - DNA, 57 bp, unidentified; identical to SEQ ID NO: 775
  misc_feature 1..57: note = Synthetic
  source 1..57: mol_type = other DNA

SEQ ID NO: 10372 - DNA, 21 bp, unidentified
  misc_feature 1..21: note = Synthetic
  source 1..21: mol_type = other DNA
atggacactcatttaatgtga

SEQ ID NO: 10373 - DNA, 150 bp, unidentified; identical to SEQ ID NO: 778
  source 1..150: mol_type = other DNA
  misc_feature 1..150: note = Synthetic

SEQ ID NO: 10374 - DNA, 30 bp, unidentified; identical to SEQ ID NO: 779
  source 1..30: mol_type = other DNA
  misc_feature 1..30: note = Synthetic

SEQ ID NO: 10375 - DNA, 306 bp, unidentified
  misc_feature 1..306: note = Synthetic
  source 1..306: mol_type = other DNA
atgcaactttttcacctctgcctaatcatctcttgttcatgtcctactgttcaagcctccaagctgtgccttgggtggctttggggcatggacatcgacccttataaagaatttggagctactgtggagttactctcgtttttgccttctgacttctttccttcagtacgagatcttctagataccgcctcagctctgtatcgggaagccttagagtctcctgagcattgttcacctcaccatactgcactcaggcaagcaattctttgctggggggaactaatgactctagctacctgggtgggt

SEQ ID NO: 10376 - DNA, 111 bp, unidentified; identical to SEQ ID NO: 5697
  misc_feature 1..111: note = Synthetic
  source 1..111: mol_type = other DNA

SEQ ID NO: 10377 - DNA, 486 bp, unidentified
  misc_feature 1..486: note = Synthetic
  source 1..486: mol_type = other DNA
atggttacctttgttaacatgagtactgtttctagtacgcccactctggaaatgtcaagaacttcagattttagttccacgtcaatcacatcagatacagagagtacgagcgatttaatgtctgtgtctatgagtatacctacgactatcgcaacaactaaagagaatgtcgaatctacatccttaaattttacaaagacctcgacattctccagtggcagtactactaatcatgaaaacagtgggaatgcatctgaatttttcacactgacaatttcaactccagaactgacaaaacctcaacttttgaatagccctttaaaaaagttcgttttgttccttgtgattttaattgcagcagttagttttattggtattgtagcgttagcgttgttagttttactaattaaaaaccccaaacgcaaccattctaagaaaccgaaaaatgcatacaataaccaagcctttattggtgtctgggattaa

SEQ ID NO: 10378 - DNA, 213 bp, unidentified
  source 1..213: mol_type = other DNA
  misc_feature 1..213: note = Synthetic
gtgtttatgctgtggggtgcgaaggcgggagacaaagcttcactaatcaactccaagaagcatctggttctgacctctcagcatccctctcccctggcccagaacagcacccgaaagagtgcccagcagaagttcctgggcaacaaccactttgtcctcgctaacaactttttgcgtgagaaggggctcggtgagatagattggaggctgtag

SEQ ID NO: 10379 - DNA, 213 bp, unidentified; identical to SEQ ID NO: 10378
  source 1..213: mol_type = other DNA
  misc_feature 1..213: note = Synthetic

SEQ ID NO: 10380 - DNA, 213 bp, unidentified; identical to SEQ ID NO: 10378
  source 1..213: mol_type = other DNA
  misc_feature 1..213: note = Synthetic

SEQ ID NO: 10381 - DNA, 2130 bp, unidentified
  source 1..2130: mol_type = other DNA
  misc_feature 1..2130: note = Synthetic
atgatggaaacacccgcggagagcgtcagggcccgcgtcagctcggttaccttttataatgtcacccagaccgcagggcggtggtgggcgatttgggtcgtgggcatcgtgcccatcaaaagggaggacgttgagactctgatcgtggtgcaggcctgccagccgccgcttggaggctccctggagccccccgtggtcaacgcgccctcgactaccgaactcaactttttgcgatgggagcgggagctcaggcgcagcggggggctcattgctatgctcgccgatgccgccgagaaggacctatttgacctttcatttagaacccgagaccgcagactcttgtccgccgccagggtggaggatgagcagggcctcatcttccagcctctctttccagcacaggtggtctgccaaagctgctcgggggatgatgggcgggaccaacaacccccacctgttgatggcttcgggtccgagatggagggggaacagacatgcccccatgctcagaggcactctgagtctcccggacagttggacgtatacatcaggacaccgcgtggggatgttttcacctattccaccgagactcccgacgacccctctcccgtcccctttagggacatcctgcgaccggtcacttatgaagtagatctggtgtcgtccgacggggccaccggccgtggtggggacgcccgacggcaccgcgtcagcctgaaaattcttgagccggctgggggattcgagtcctggcttgtcaactcttggagtatggccgggggcgggctctacgccttcctccgcagtatctatgcctcctgctacgccaaccacagaggcaccaagcccatcttctacctcctggaccccgaactctgcccagggggctcagatttccagccctatgtcccgggctttcccttcctgcccatccattatgtgggacgggcgaggccggccttctggcaccgggcgccacacagcgagggtctcctgctactggacctgaacctgggagtctctgggacgcccctggcagacgccctcctgggcctcgacgcgcggtcagggcaacgacgcggctcgctgctcctacaacaaatctggcccccgacccgaaaggagattaaccctcgccacgtttgcacgcgggaaggcggcgagggagggggggaggacgagacgacggtggtcgggcgcgcggaggccacagccatccttgaggctgatgccacttggtggctctacgaattggcccgctgccacctctctgccaggggcgcccccgtgggaacgcctgatggcggagggcaggcgcgggacgcgcaaacctggctgcgggcccttcaccgctatggcacctcagacacgcgacgggcactcgggggcctctacaccgccgtcacccgggttctcctacacgcggccgctgacctaggactgacctgggcttatgcagacgagttcatcctgggctttgtggcaccaacctccgcccatccttcagaggagccactagcacaggctttcctgcaaggcgtgaaagactcggaggatgccagccggctcgaccgggatgtgatgggtggagaggccaccgtggcccgcagacacattcgggtgaaggctcgacgcgggcccgggtgcctactgatggccatctttcagggggatctttacgtgggtggatgtagggagcactcggggccctttttggtttggcacgaagccttctcctggaccctggaccaactagcggcgagacccgaggcagacaaggccccgccatcccacgaccacctgttgaccctggtccgcgacctgacccggagactggcccccgggcggcgccgaaacaggttttgggctcttccgcgagcctggcttcagcggctgcggagggctgggctgcgcctctctggaagccacgtgtgtctcctggacaaggacggagcgcgcccggccccctgccagacggccactgagcatggtctcagccccaccgcctactttcgagagattatggcctttctgcttgatgtgatatcggccctccaccccggctacaccattcctatggaaatcacgcgagagacagatttactgatgactgttctcagtttattctag

SEQ ID NO: 10382 - DNA, 2130 bp, unidentified
  misc_feature 1..2130: note = Synthetic
  source 1..2130: mol_type = other DNA
atgatggaaacacccgcggagagcgtcagggcccgcgtcagctcggttaccttttataatgttacccagaccgcagggcggtggtgggcgatttgggtcgtgggcatcgtgcccatcaaaagggaggacgttgagactctgatcgtggtgcaggcctgccagccgccgcttggaggctccctggagccccccgtggtcaacgcgccctcgactaccgaactcaactttttgcgatgggagcgggagctcaggcgcagcggggggctcattgctatgctcgccgatgccgccgagaaggacctatttgacctttcatttagaacccgagaccgcagactcttgtccgccgccagggtggaggatgagcagggcctcatcttccagcctctctttccagcacaggtggtctgccaaagctgctcgggggatgatgggcgggaccaacaacccccacctgttgatggcttcgggtccgagatggagggggaacagacatgcccccatgctcagaggcactctgagtctcccggacagttggacgtatacatcaggacaccgcgtggggatgttttcacctattccaccgagactcccgacgacccctctcccgtcccctttagggacatcctgcgaccggtcacttatgaagtagatctggtgtcgtccgacggggccaccggccgtggtggggacgcccgacggcaccgcgtcagcctgaaaattcttgagccggctgggggattcgagtcctggcttgtcaactcttggagtatggccgggggcgggctctacgccttcctccgcagtatctatgcctcctgctacgccaaccacagaggcaccaagcccatcttctacctcctggaccccgaactctgcccagggggctcagatttccagccctatgtcccgggctttcccttcctgcccatccattatgtgggacgggcgaggccggccttctggcaccgggcgccacacagcgagggtctcctgctactggacctgaacctgggagtctctgggacgcccctggcagacgccctcctgggcctcgacgcgcggtcagggcaacgacgcggctcgctgctcctacaacaaatctggcccccgacccgaaaggagattaaccctcgccacgtttgcacgcgggaaggcggcgagggagggggggaggacgagacgacggtggtcgggcgcgcggaggccacagccatccttgaggctgatgccacttggtggctctacgaattggcccgctgccacctctctgccaggggcgcccccgtgggaacgcctgatggcggagggcaggcgcgggacgcgcaaacctggctgcgggcccttcaccgctatggcacctcagacacgcgacgggcactcgggggcctctacaccgccgtcacccgggttctcctacacgcggccgctgacctaggactgacctgggcttatgcagacgagttcatcctgggctttgtggcaccaacctccgcccatccttcagaggagccactagcacaggctttcctgcaaggcgtgaaagactcggaggatgccagccggctcgaccgggatgtgatgggtggagaggccaccgtggcccgcagacacattcgggtgaaggctcgacgcgggcccgggtgcctactgatggccatctttcagggggatctttacgtgggtggatgtagggagcactcggggccctttttggtttggcacgaagccttctcctggaccctggaccaactagcggcgagacccgaggcagacaaggccccgccatcccacgaccacctgttgaccctggtccgcgacctgacccggagactggcccccgggcggcgccgaaacaggttttgggctcttccgcgagcctggcttcagcggctgcggagggctgggctgcgcctctctggaagccacgtgtgtctcctggacaaggacggagcgcgcccggccccctgccagacggccactgagcatggtctcagccccaccgcctactttcgagagattatggcctttctgcttgatgtgatatcggccctccaccccggctacaccattcctatggaaatcacgcgagagacagatttactgatgactgttctcagtttattctag

SEQ ID NO: 10383 - DNA, 345 bp, unidentified
  source 1..345: mol_type = other DNA
  misc_feature 1..345: note = Synthetic
attctgcactcaaagccgcatccggcaagagtcatggggaaaacgcagtccaagggacagcccagcacaaatctcctcaaggagacagaaccaaggcatccagtaataccagatgccaggggaactggccctgaattctgcaagagctgctggttcgaaaggagggggttagtcaggtgcaacgatcactacctatgtttgaactgtcttacacttttacacacagtgtcagataggtgccccatctgcaaacacaaactacccttcagactagagctccagacccagccgacagcaccaccagaaatcccaccatcccaaaatcccccaccctacagcccctga

SEQ ID NO: 10384 - DNA, 345 bp, unidentified; identical to SEQ ID NO: 10383
  misc_feature 1..345: note = Synthetic
  source 1..345: mol_type = other DNA

SEQ ID NO: 10385 - DNA, 72 bp, unidentified
  source 1..72: mol_type = other DNA
  misc_feature 1..72: note = Synthetic
atgagtataagtaccctgctattaaagacaagaagaaaccaagcatcactctcggaaaagatcccgatttga

SEQ ID NO: 10386 - DNA, 48 bp, unidentified; identical to SEQ ID NO: 792
  misc_feature 1..48: note = Synthetic
  source 1..48: mol_type = other DNA

SEQ ID NO: 10387 - DNA, 27 bp, unidentified
  misc_feature 1..27: note = Synthetic
  source 1..27: mol_type = other DNA
atgttcatctgtagaacagaaatgtaa

SEQ ID NO: 10388 - DNA, 90 bp, unidentified
  misc_feature 1..90: note = Synthetic
  source 1..90: mol_type = other DNA
aggttatctctgatcagtatgaatacaaataccctgcgattgatgataaaaagaaacccagtattacactgggaaaagcccctgatttga

SEQ ID NO: 10389 - DNA, 165 bp, unidentified
  misc_feature 1..165: note = Synthetic
  source 1..165: mol_type = other DNA
atgacctccaaatgcatgctgtgttggaccgcgattacgaatgccctggctattttaatgttattactagtaatttaccgggcgataatcggatttaatggcgatatttatacgagcacgttgtcggcgtttagctgtatacggacaaattcatctaatacctaa

SEQ ID NO: 10390 - DNA, 1356 bp, unidentified
  source 1..1356: mol_type = other DNA
  misc_feature 1..1356: note = Synthetic
atggactctgacaagattgtcttcaaagtccataatcagttggtgtctgtaaagccagaggtgattgttgatcaatatgagtacaaatatcctgctatcagagatcagaagaaacctagcataactctggggaaagctcctgatttaaacaaggcttacaaatctattttgtcaggaataaatgcggctagattggatcccgatgatgtatgttcctacctagcagcagctatggaactgtttgaaggaatttgccctgaagactggctaagctatgggattctcatagcaagaaagggggagaagattacccctgccaccttggtgaacattcagagaacgaacattgaaggcaactgggccttgaccggaggatacgaccttacaagggatccaactgtggccgaacatgcatctctagtgggccttctgctctgcttgtatagactaagcaaggtctccgggcagaacacagggaattataagactaacatagccgatcgaatggagcaaatctttgagaccgctccttttgtcaaaatcgtggagcatcataccttaatgaccactcacaaaatgtgtgccaattggagtacaatcccaaattttaggtttcttgcaggcacatatgatatgttcttttctaggatagagcatttattttctgcaatccgggtcggaactgtagtgacggcatatgaagattgttctggactggtctctttcacaggattcatcaaacaaataaatttgacggctagggaggctatattgtatttcttccacaagaattttgaagaggaaatcaagaggatgtttgaaccagggcaagagactgcagttccacactcttattttatacatttcaggtccttagggttgagtgggaagtctccttattcctcaaatgcagtaggtcatgtgtttaatctgatccatttcgttggctgttacatgggtcaaatcagatctctaaatgctactgttatctctagttgtgcaccacatgaaatgtctgtgttagggggttatctgggggaggaattctttggcaagggaacattcgagaggaggttcttcagagacgaaaaggagctccgagattatgaagccgcagagtctgtcaaaaacgacgtcgcactggcagatgatggaaccgtcaactcagatgatgaggactttttttctggggaaacgagaagtccggaggccgtgtatgcgaagatcatgatgaacgggggaaaattgaaaaagtctcacatccggcgatatgtatcagtcagctcaaaccaccaggccagaccgaactcctttgcagaatttttgaacaaaacttacctaggtgatcagagataa

SEQ ID NO: 10391 - DNA, 48 bp, unidentified; identical to SEQ ID NO: 810
  source 1..48: mol_type = other DNA
  misc_feature 1..48: note = Synthetic

SEQ ID NO: 10392 - DNA, 84 bp, unidentified; identical to SEQ ID NO: 101
  source 1..84: mol_type = other DNA
  misc_feature 1..84: note = Synthetic

SEQ ID NO: 10393 - DNA, 2130 bp, unidentified
  misc_feature 1..2130: note = Synthetic
  source 1..2130: mol_type = other DNA
atgatggaaacacccgcggagagcgtcagggcccgggtcagctcggttaccttttataatgtcacccagaccgcagggcggtggtgggcgatttgggtcgtgggcatcgtgcccatcaaaagggaggacgttgagactctgatcgtggtgcaggcctgccagccgccgcttggaggctccctggagccccccgtggtcaacgcgccctcgactaccgaactcaactttttgcgatgggagcgggagctcaggcgcagcggggggctcattgctatgctcgccgatgccgccgagaaggacctatttgacctttcatttagaacccgagaccgcagactcttgtccgctgcccgggtggaggatgagcagggcctcatcttccagcctctctttccagcacaggtggtctgccaaagctgctcgggggatgatgggcgggaccaacaacccccacctggtgatggcttcgggtccgaggtggagggggaacagacatgcccccatgctcagaggcactctgagtctcccggacagttggacgtatacatcaggacaccgcgtggggatgttttcacctattccaccgagactcccgacgacccctctcccgtcccctttagggacatcctgcgaccggtcacttatgaagtagatctggtgtcgtccgacggggccaccggccgtggtggggacgcccgacggcaccgcgtcagcctgaaaattctcgagccggctgggggattcgagtcctggcttgtcaactcttggagtatggccgggggcgggctctacgccttcctccgcagtatctatgcctcctgctacgccaaccacagaggcaccaagcccatcttctacctcctggaccccgaactctgcccagggggctcagatttccagccctatgtcccgggctttcccttcctgcccatccattatgtgggacgggcgaggccggccttctggcaccgggcgccacacagcgagggtctcctgctactggacctgaacctgggagtctctgggacgcccctggcagacgccctcctgggcctcgacgcgcggtcagggcaacgacgcggctcgctgctcctacaacaaatctggcccccgacccgaaaggagattaaccctcgccacgtttgcacgcgggagggcggcgagggagggggggaggacgagacgacggtggttgggcgcgcggaggccacagccatccttgaggctgatgccacttggtggctctacgaattggcccgctgccacctctctgccaggggcgcccctgtgggaacgcctgatggcggagggcaggcgcgggacgcgcaaacctggctgcgggcccttcaccgctatggcacctcagacacgcgacgggcactcgggggcctctacaccgccgtcacccgggttctcctccacgcggccgctgacctaggactgacctgggcttatgcagacgagttcatcctgggctttgtggcaacaacctccgcccatccttcagaggagccactagcacaggtgaggagcggggctgggtgggagagcgcggcccccggggtttgcccaactcttattatgggcggagaggccaccgtggcccgcagacacattcgggtgaaggctcgacgcgggcccgcgtgcctactgatggccatctttcagggggatctttacgtgggtggatgtagggagcactcggggccctttttggtctggcacgaagccttctcctggaccctggaccaactagcggcgagacccgaggcagacaaggccccgccatcccacgaccacctgttgaccctggtccgcgacctgacccggagactggcccctgggcggcgccgaaacaggttttgggctcttccgcgagcctggcttcagcggctgcggagggctgggctgcgcctctctggaagccacgtgtgtctcctggacaaggatggagcgcgcccggccccctgccagacggccactgagcatggtctcagccccaccgcctactttcgagagattatggcctttctgcttgatgtgatatcggccctccaccccggctacgccatgcctatggaaatcactcgagagacagatttactgatgactgttctcagtttattctag

SEQ ID NO: 10394 - DNA, 24 bp, unidentified
  misc_feature 1..24: note = Synthetic
  source 1..24: mol_type = other DNA
atgctacgagaatctaacagctga

SEQ ID NO: 10395 - DNA, 168 bp, unidentified; identical to SEQ ID NO: 817
  misc_feature 1..168: note = Synthetic
  source 1..168: mol_type = other DNA

SEQ ID NO: 10396 - DNA, 81 bp, unidentified; identical to SEQ ID NO: 818
  source 1..81: mol_type = other DNA
  misc_feature 1..81: note = Synthetic

SEQ ID NO: 10397 - DNA, 1605 bp, unidentified
  source 1..1605: mol_type = other DNA
  misc_feature 1..1605: note = Synthetic
aagccaatcacattcctggatgttgaagagggtgacatgtgtttgcatactttggaaaaggtggaccccctggttgacaacgatcgctacccctcccacatagcctcctttgtgctggcctggacgcgcgcctttgtatcagagtggtcagagttcctgtacgaagaagaccgaggcactccactggagaagaggcctgtaaaatcagtctacggggacacggacagcctgtttgtcactcaacgaggacacgaactcatggagaccaaagggcgccaagcgacagaagttttcgaccagcaggatgagtctgaagcgcaccctggcaagcgcccaagcaggcgcacaccccttcactgtgacggaaacaaccctgactcgaacactgagaccctggaaggaccgaaccctggcagcgctggacgcccatcgtctcataccctattccaggagccgtccaaacccgcgaaacgaggaggtctgctggatcgagatgccatagaacacatcactgaactgtggaacagactagaacttttgcagcaaactctctccaaaatgcccatggctgacggtctgaaaccgctgaaaaacttttcctcactacaagaacttctatcactaggaggagagcgcctcctaatggatttggtgcgggaaaatatgcatgtaagggaaatgatgaacgaggtggcccccttgcttcgagaagacggcagttgccgttccctaaactaccacctgcaacccgtaatcggaatcatttatggccccaccggatgtggcaaatctcaattgctcagaaatttgctatcatcacaattaatcacccccgccccagaaacggtgtttttcatagccccccaggtggacatgattccaccctcggaactgaaagcttgggaaatgcaaatctgtgaggggaactatgctccggggcccgaaggaacattcataccccaatctggtactctccgccccaaattcattaaaatggcttatgatgatttaactcaggaacataactatgatgtgtcagacccacggaacgtgtttgcccgcgccgctgcccacggccccattgctattatcatggatgagtgcatggaaaatcttggaggacacaagggtgtctccaaatttttccacgcttttccatccaagctgcacgataaatttcctaaatgtaccggatacaccgtcttggtggtccttcataacatgaacccaagacgggatcttggcggcaatattgccaacttaaaaatccaatccaaaatgcacataatttcaccccgaatgcacccatcccagctcaaccggtttgtaaacacctacaccaagggcttatctgtggcaatcagcctacttctaaaagatattgtgcaacaccatgcactgcgaccttgttatgactgggtgatttacaacactaccccggagcatgaatcccttcaatggagctatctccaccccaaagacggcctaatgcccatgtatctaaacattcaatcccacctctataggatcctggaaaaaatccaccgagttctcaatgatagagatcggtggtctagggcataccgtgcgcgaaaaatgaaataa

SEQ ID NO: 10398 - DNA, 84 bp, unidentified; identical to SEQ ID NO: 820
  source 1..84: mol_type = other DNA
  misc_feature 1..84: note = Synthetic

SEQ ID NO: 10399 - DNA, 1605 bp, unidentified
  misc_feature 1..1605: note = Synthetic
  source 1..1605: mol_type = other DNA
aagccaatcacattcttggatgtggaggagggggacatgtgtttacataccgtagagaaggtggaccccctggttgacaacgaccgctacccctcccacgtggcctcctttgtgctggcctggacacgcgcttttgtatcagagtgggctgggttcctctacgaagaggaccgaggcactccgctcgaggacaggcccataaagtcggtctacggggacacggacagcctctttgtcacccagcggggacacgaactcatggaaaccaaagggcgccaatcggcagcggttctcgaccagcaggatgagtctgaagcgcaccctcgcaagcgcccaaccaggcgcgcaccccttcaccgtgacggaaacaaccctgactcggacgctgcgaccatggaaggatcggaccctggcagcgctggacgcccatcgtctgattccctactccaggagccgtcccaacccgcgaaacgaggaggtctgctggatcgagatgccatagagcacatcaccgagctctgggaccggctcgagctcttgcaacagactctttccaaaatgcccatggctgacgggctgaagccgctgaaaaacttctcctcgctccaggagcttctatcccttgggggagagcgcctcctaacggacttggtgcgggaaaatatccatgtaagggaaatgatgaacgaagtggcccccctgctccgggaggacggcagctgtcgttccctaaactaccatctgcaacccgtaattggggtcatttacggtcccactgggtgcggcaagtctcagctgcttaggaatttgctctcgtcccagttaatcaccccggctccagaaacggtattttttatagccccgcaggtggacatgatccccccctctgaactgaaagcctgggaaatgcaaatatgtgagggaaactatgctcccgggccagagggaactttcatcccccaatctggcaccctccgcccaaagtttattaaaatggcttatgatgacctgactcaggagcataactatgatgtttcagacccccggaacgtgttcgcccgtgccgctgcccacggccccatcgctatcattatggatgagtgcatggagaatctggggggtcacaaaggcgtctccaaattttttcatgcttttccctctaagctgcatgataaatttcccaagtgcaccggatacactgtcttggtggtcctgcacaatatgaacccgagacgggatctaggcggcaacattgccaacctcaagatccagtccaaaatgcatataatttcaccccggatgcacccgtcccagctcaacagatttgtaaacacctacactaagggcctccccgttgcaattagtctgctcctaaaagatattgtgcaacaccatgcactccgaccttgctatgactgggtgatttataacactaccccggagcaagaggctcttcaatggagctatctccacccccgagacggactaatgcccatgtatctaaacattcaatcccacctttacagggtactggaaaagatccaccgcgttctcaatgatcgagaccgatggtccagggcataccgcgcgcgaaaaatcaaataa

SEQ ID NO: 10400 - DNA, 27 bp, unidentified
  misc_feature 1..27: note = Synthetic
  source 1..27: mol_type = other DNA
aagatgacctttgccttcacaccctag

SEQ ID NO: 10401 - DNA, 162 bp, unidentified
  misc_feature 1..162: note = Synthetic
  source 1..162: mol_type = other DNA
atggtccgagatcttgtacgcagaggacagaggcacaccgttggaacagcgtaccctcaaatcagtttacggagacacagacagcttgtttgtcaccgaagccggataccgcctcatggaaacacgagggcgaagacgcgcgttttcacaccagcaggatga

SEQ ID NO: 10402 - DNA, 222 bp, unidentified
  misc_feature 1..222: note = Synthetic
  source 1..222: mol_type = other DNA
atgaattcctctattgccacacgcgctacgaaacttttctgcgggtcatgggcgactttcagggcatctttgagtgccagtacagcgccgacgtgcttcgcgactgggtccgtaaccacgtcgaccaggtgttgtcgctcggcattccgcacaactggttcctgcaggtgcggcccggcagcaccatgccggagctgcgcgaccaactgctggacgacgtaa

SEQ ID NO: 10403 - DNA, 1380 bp, unidentified
  source 1..1380: mol_type = other DNA
  misc_feature 1..1380: note = Synthetic
attgtcagatattttgcagccatggcctctgcttcaattccaaccgacccagacgtgtctactatttgtgaagactttatgaatttgctaccagacgaaccttcggatgactttgcattggaagtcaccgattgggcaaatgatgaagctattggctccactccaggcgaggactccacaacgtctagaactgtgtatgtggagcgtactgcagatacagcatataatccacggtattccaaacgaaggcacggaaggcgtgaaagctaccaccacaatcgcccgaaaactttggttgttgtattacccgattcaaaccatcatggaggaagagacgtggagactggatatgcacgcatcgaacggggacatcgacgatcatccagatcttataacactcaaagttcaagaaaacaccgtgatcgatccctgtcaaatcgaagacggcgtcctacaacgcctcctgcaatgaccacgggagaaagaaatgatcagacacatgacgaatcgtacaggttgcgattttccaagagagacgcccgccgagagcgtattcgaaaagagtatgatatcccggtcgatcgaattacgggccgtgctattgaagtcgtctccaccgcgggagccagcgtgaccattgactcggtacgccatttagatgaaacaattgaaaaactggtagtccgatatgccacaatacaagagggtgattcatgggcttccggtggatgttttccggggataaaacaaaacacatcttggccggagttgatgttgtacggacatgaactttatcgtacctttgagtcatataaaatggactcacgtattgcccgcgcgttgcgtgagagagtcatacgtggagaatctttgattgaagcgttggagtctgcggatgaactgttaacgtggattaaaatgttagcggcaaaaaacttgcccatctacacaaataatcccattgttgcaacctcgaagtcacttttggagaatttaaagttaaagctggggccttttgtaagatgtcttcttctaaacagggacaacgatttggggtctcgtactctccccgaactgttgcgccagcaacgttttagtgatatcacgtgtattactacttatatgtttgttatgattgcccgcattgctaatatagttgtccgtggctctaaatttgtggaatatgatgatatcagttgtaacgttcaagtgttacaagaatatacacccgggtcatgtctggccggtgttttagaggccctaatcacccaccaacgcgagtgtggtcgtgttgaatgtaccctctcaacttgggccgggcatctttctgacgcccgtccatacggtaaatattttaagtgtagtacctttaactgctaa

SEQ ID NO: 10404 - DNA, 378 bp, unidentified
  misc_feature 1..378: note = Synthetic
  source 1..378: mol_type = other DNA
acgaaccttcggatgactttgcattggaagtcaccgattgggcaaatgatgaagctattggctccactccaggcgaggactccacaacgtctagaactgtgtatgtggagcgtactgcagatacagcatataatccacggtattccaaacgaaggcacggaaggcgtgaaagctaccaccacaatcgcccgaaaactttggttgttgtattacccgattcaaaccatcatggaggaagagacgtggagactggatatgcacgcatcgaacggggacatcgacgatcatccagatcttataacactcaaagttcaagaaaacaccgtgatcgatccctgtcaaatcgaagacggcgtcctacaacgcctcctgcaatga

SEQ ID NO: 10405 - DNA, 663 bp, unidentified
  misc_feature 1..663: note = Synthetic
  source 1..663: mol_type = other DNA
atctcattcagttgtagcatagtcatgaaaaaaacatgcaacaccactgacaaaatgaacatcatccgtaagatagtaaaaagctgcaaagaggaggaggagcaaaagcccagtccggtttcagccccccccgatgacgatgacctgtggcttccccctccagagtatgtccctctgtcagagatcgccaataagaagaacatgaggaatttctgtgtcaatggtgaaattaaagtgtgtagtccgaacgggtattcttttcgaattcttaggcacatcttaagatcctttgaaggggtatattcagggaacagaagaatgattggactggttaaggtggtgattggattggccttgtcaggggcacctgtccctgatgggatgaactgggtttacaaaattagacgcactttaatatttcaatgggcagactcatcaggccctcttgatggtgaggaacttgaataccctcaggaaataacttgggatgatgattccgagtttgtaggactgcaaataagagtgagtgcaagacaatgtcatatccaagggagaatttggtgtatcaacatgaactcacgggcgtgtcaactctggtctgacatgtctctcaaaacccagcagtctgatgaagacaagaacacctctctcctgttggaatga

SEQ ID NO: 10406 - DNA, 1095 bp, unidentified
  source 1..1095: mol_type = other DNA
  misc_feature 1..1095: note = Synthetic
atgactacatctactacaactaccactaatatcatgctacaggtgagcaacgtaacgaatcacaccttgaatagcaccgaaatttatcagttgttcgagtacactcggttcggggtatggttgatgtgcatcgtgggcacgtttctgaacatgctggtgattaccaccatcctgtactaccgtcgtaagaaaaaatctccgagcgatacctacatctgcaacctggctgtagccgatctgttgattgtcgtcggcctgccgttttttctagaatatgccaagcatcaccccaaactcagccgagaggtggtttgttcgggactcaacgcttgtttctacatctgtctttttgccggcgtttgttttctcatcaacctgtcgatggatcgctattgcgtcattgtctggggtgtagaattgaaccgcgttcgaaataacaagcgggctacctgttgggtggtgattttttggatactggccgcgctcatggggatgccacactacctgatgtacagtcataccaataacgagtgtgttggtgaatttgctaacgagacttcaggttggttccccgtctttttgaacaccaaagtcaacatttgcggctacctggcgcccatcgtgctgatggcgtacacgtacaaccgtatggtgcggtttatcattaactacgtgggtaaatggcacatgcagacgctccacgttcttttagttgtggttgtatcttttgccagcttttggttccccttcaatctggcactatttttagaatccatccgtcttttatcgggaacgcaaaacgagactctccaaaccgttattactttctgtctatacgtcggtcagtttttggcctacgttcgcgcttgtctgaatcctgggatctacatcctagtaggcactcaaatgaggaaggacatgtggacaaccctaagggtattcgcctgttgctgcgtgaagcaggagataccttaccaggacattgatattgagctacaaaaggacatacaaagaagggccaaacacaccaaacgtacccattatgacagaaaacatgcacctatggagtccggggaggaggaatttctgttgtaa

SEQ ID NO: 10407 - DNA, 1644 bp, unidentified
  misc_feature 1..1644: note = Synthetic
  source 1..1644: mol_type = other DNA
atcattaattctttgatcggtggggatgactctattaaacggtctaatgtcttcgcggtcgatagtcaaattccaactttgtatatgccgcaatatatttctctatccggagttatgacaaacgatggtcccgacaatcaggctattgctagcttcgaaattagggatcagtatattactgcgcttaatcatttggttatgagtttggaacttccagaagttaaaggaataggaagattcgggtacgtaccatatgttggatataaatgcattaatcacgtatctatctcttcgtgtaacggtgttatttgggaaattgagggcgaagaattatataataattgtatcaataacacaattgctttgaagcattctggatattctagtgaacttaatgatatttctattggcctaactcctaacgacactattaaagaaccatctacagtatacgtttatattaaaactccgtttgatgtggaagatacattcagtagtcttaaactatccgattcaaaaattaccgtaacggtgaccttcaatccagtatccgatatcgttattcgtgactcttcgttcgactttgaaacgttcaacaaagaatttgtttatgttcctgaattgagctttattggatatatggttaagaatgttcaaattaaaccatcatttatagagaaacctaggagagtaataggtcaaataaaccaaccaacggcgacagtaaccgaagttcatgcggcaacatctctctctgtttatactaaaccttattatggaaatacggataataagtttatttcgtatccgggatatgcacaagacgaaaaagattatatagatgcatatgtgagtagattgttggatgatctagttattgttagcgatggtccaccgactggttatccggagtctgccgagatcgtcgaggttccagaagatggtattgtttctattcaagatgctgatgtgtatgtaaaaattgataatgttcctgataatatgagtgtttatcttcatactaatctgctaatgtttggaacccgaaaaaattcttttatatataacatttctaaaaagttttccgccattactggaacatatagcgacgccaccaagagaacagtctttgctcacatatcacatactatcaacatcatcgatacatctattcctgtaagtctttggactagtcaacgtaatgtctataacggagataatagatcagccgaatcaaaggccaaggatttgttcattaacgatcccttcatcaagggaatcgattttaagaataagaccgatattatttctagactagaagttagatttggaaatgatgttctatattcagagaacgggcccatctcgagaatttataacgaactactgacaaaaagcaataatggaacaagaaccctaacttttaactttacaccaaagatattctttaggccgacaactattacggccaatgtatctagggggaaagataaactatctgttcgagtagtttattccaccatggatgtcaaccatccaatctattatgtacaaaaacaattggtagttgtatgtaatgacctgtataaggtatcttacgatcaaggggtaagtattaccaagattatgggagataataactaa

SEQ ID NO: 10408 - DNA, 99 bp, unidentified; identical to SEQ ID NO: 832
  source 1..99: mol_type = other DNA
  misc_feature 1..99: note = Synthetic

SEQ ID NO: 10409 - DNA, 126 bp, unidentified; identical to SEQ ID NO: 838
  source 1..126: mol_type = other DNA
  misc_feature 1..126: note = Synthetic

SEQ ID NO: 10410 - DNA, 1569 bp, unidentified
  misc_feature 1..1569: note = Synthetic
  source 1..1569: mol_type = other DNA
atgtgtctgcacacggtggaaaaggtggaccccctggtggaaaacgaccgctacccctcgcacgtggcctcctttgtcttggcgtggacgcgcgccttcgtctcagagtggtccgagtttctttacgaggaggaccgcgggacgcccctgcaggacaggccaatcaagtccgtctacggggacaccgacagcctgtttgtcaccgagcgcggacacagacttatggagacgcgagggcgaagaccgtgcccgtttcagcaccagcaggatgagtctgaagcgcacacttgcaagcgcccagcccggggcccacccattcaccgtaacggagaccaccctcacgcggaccctgagaccctggaaggacatgacgctggccgcgctggacgcccatcgtcttgtgccctacagtcgcagtcgtcccaacccccgaaacgaggaagtctgctggatccagatgccgtagagcacgtcaccgagctctgggaccgcctggagctcctctcgcagaccctcgccaagatgcccatggccgacgggcttaagcccctaaaaaactttgcttccctgcaagaactgctctcgctgggcggggaccgcctcctcagcgagcttgttcgggaaaacctccaagtcagagacatgcttaaccaggtagcccccctcctccgggacgacggcagttgcatctccttgaactaccacctgcaacccgtcatcggggtcatctacggcccaaccgggtgcggcaagtcccagctgttaagaaacctgctctcctcgcagctcatcacccccgccccggaaaccatttttttcatcgccccgcaggtggacatgatccccccctccgagatgaaagcctgggagatgcagatctgcgaggggaacttcgccccggggcccgagggaaccatcgtcccacaatctggcaccctccgccccaaattcattaaaatgtcttatgatgatctcacccaagagcataattacgatgtctctgaccccagaaacgtctttgccaaagccgcagcccacgggcccattgccatcatcatggatgagtgcatggaaaacctgggcgggcacaagggcgtctccaaattcttccacgcattcccttccaagttgcatgacaagttccccaagtgcacgggctacattgtcctggtggtcctgcacaacatgaacccccggcgggatctgggcggtaacatcgccaaccttaagatccaggccaaactacacatcatctccccccgcatgcatccctcccagctcaaccgctttgccaacacctacaccaaggggctccccgtggccatcagtctcctccttaaggacatcatccagcaccacgcccagcgcccctgctatgactggatcatctacaacacaaccccagaacacgaggccatgcagtggtgctacctccacccccgggacgggctcatgcccatgtacctcaacatccaatcccacctctaccgggtcctggaaaaaatccaccgcactcttaatgatcgggagaggtggaccagggcctaccgcgcgcgaaaaaataaataa

SEQ ID NO: 10411 - DNA, 483 bp, unidentified
  misc_feature 1..483: note = Synthetic
  source 1..483: mol_type = other DNA
atgcggaggagggggacatgtgtctgcacacggtggaaaaggtggaccccctggtggaaaacgaccgctacccctcgcacgtggcctcctttgtcttggcgtggacgcgcgccttcgtctcagagtggtccgagtttctttacgaggaggaccgcgggacgcccctgcaggacaggccaatcaagtccgtctacggggacaccgacagcctgtttgtcaccgagcgcggacacagacttatggagacgcgagggcgaagaccgtgcccgtttcagcaccagcaggatgagtctgaagcgcacacttgcaagcgcccagcccggggcccacccattcaccgtaacggagaccaccctcacgcggaccctgagaccctggaaggacatgacgctggccgcgctggacgcccatcgtcttgtgccctacagtcgcagtcgtcccaacccccgaaacgaggaagtctgctggatccagatgccgtag

SEQ ID NO: 10412 - DNA, 135 bp, unidentified; identical to SEQ ID NO: 841
  misc_feature 1..135: note = Synthetic
  source 1..135: mol_type = other DNA

SEQ ID NO: 10413 - DNA, 111 bp, unidentified; identical to SEQ ID NO: 842
  misc_feature 1..111: note = Synthetic
  source 1..111: mol_type = other DNA

SEQ ID NO: 10414 - DNA, 111 bp, unidentified; identical to SEQ ID NO: 842
  source 1..111: mol_type = other DNA
  misc_feature 1..111: note = Synthetic

SEQ ID NO: 10415 - DNA, 111 bp, unidentified
  source 1..111: mol_type = other DNA
  misc_feature 1..111: note = Synthetic
atgaaaaatatgctccgtgtgataacaatgttatttacgataacaacaaaacaattatatcatttgtatattgcatgttgtttatttttggactattgggtaatttgttag

SEQ ID NO: 10416 - DNA, 1575 bp, unidentified
  source 1..1575: mol_type = other DNA
  misc_feature 1..1575: note = Synthetic
attccaactttatatatgccgcaatatatttctctatccggagttatgacaaacaatggtcccgacaatcagactatcgctagcttcgaaattagggatcagtatattactgcgcttaatcatttggttctaagtttggaacttccagaagttaaaggtatgggaagattcggttacgtaccatatgttggatataaatgtattaatcatgtatcggtctcttcgtgtaatggtgttatttgggaaattgagggcgaagaattatataataattgtatcaataatacaattgctttgaaacattctggatattctagtgaacttaatgatatttctattggcttaactcctaatgacactattaaagaaccatctacagtatacgtttatattaaaactccgtttgatgtggaagatacatttagcagtcttaaactatccgattcaaaaattaccgtaacggtgaccttcaatccagtatccgatatcgttattcgcgactcttcgttcgactttgaaacgttcaacaaagaatttgtttatgttcctgaattgagctttattggatatatggttaagaatgtacaaattaaaccatcgtttatagagaaacctaggagagtaataggtcaaataaaccaaccaacggcgactgtaactgaagttcatgcggcaacatcgctctctgtttatactaaaccttattatggaaatacggataataaatttatttcgtatccagggtactcacaagatgaaaaagattatatagatgcatatgtgagtagattgttggatgatctagttattgttagtgatggcccaccaactggttatccggagtctgccgagattgttgaggttccagaagatggtatcgtttctattcaagatgctgatgtgtatgtaaaaattgataatgttcctgataatatgagtgtttatcttcatactaatctgttaatgtttggaacccgaaaaaattcttttatatataacatttctaaaaagttttccgccattactggaacatatagcgacgccaccaagagaacagtctttgcacacatatcacatagtatcaacatcatcgatacatctattcctgtaagtctttggactagtcaacgtaacgtctataacggagataatagatcagccgaatcaaaggccaaggatttgttcattaacgatcccttcatcaagggaatagattttaagaataagaccgatattatttctagactagaagttagatttggaaatgatgttctatattcagagaacgggcccatctcgagaatttataatgaactactgacaaaaagcaataatggaacaagaaccctaacttttaactttacaccaaagatattctttagaccgacaactattacggccaatgtatctagggggaaagataaactatctgttcgagtagtttattccaccatggatgtcaaccatccaatctattatgtacaaaaacaattggtagttgtatgtaatgacctgtataaggtatcttacgatcaaggggtaagtattaccaagataatgggagataataactaa

SEQ ID NO: 10417 - DNA, 93 bp, unidentified; identical to SEQ ID NO: 846
  source 1..93: mol_type = other DNA
  misc_feature 1..93: note = Synthetic

SEQ ID NO: 10418 - DNA, 1644 bp, unidentified
  source 1..1644: mol_type = other DNA
  misc_feature 1..1644: note = Synthetic
atcattaattctttgatcggtggggatgactctattaaacggtctaatgtcttcgcagtcgatagtcaaattccaactttatatatgccgcaatatatttctctatccggagttatgacaaacgatggtccagacaatcaggctatcgctagcttcgaaattagggatcagtatattactgcgcttaatcatttggttctgagtttggaacttccagaagttaaaggtatgggaagattcggttacgtaccatatgttggatataaatgtattaatcacgtatctatctcttcgtgtaacggtgttatttgggaaattgagggcgaagaattatataataattgtatcaataatacaattgctttgaaacactctggatattctagtgaacttaatgatatttctattggcctaactcctaatgacactattaaagaaccatctacagtatacgtttatattaaaactccgtttgatgtggaagatacattcagcagtcttaaactatccgattcaaaaattaccgtaacggtaaccttcaatccagtatccgatatcgttattcgtgactcttcgttcgactttgaaacgttcaacaaagaatttgtttatgttcctgaattgagctttattggatatatggttaagaatgtacaaattaaaccatcatttatagagaaacctaggagagtaataggtcaaataaaccaaccaacggcgactgtaactgaagttcatgcggcaacatcgctctctgtttatactaaaccttattatggaaatacggataataaatttatttcgtatccagggtactcacaagatgaaaaagattatatagatgcatatgtgagtagattgttggatgatctagttattgttagcgatggtccaccgactggttatccggagtctgccgagatcgtagaggttccagaagatggtatcgtttctattcaagatgctgatgtgtatgtaaaaattgataatgttcctgataatatgagtgtttatcttcatactaatctgctaatgtttggaacacgaaaaaattcttttatatataacatttctaaaaagttttccgccattactggaacatatagtgatgccactaagagaacaatctttgctcacatatcacatagtatcaacatcatcgatacatctattcctgtaagtctttggactagtcaacgtaacgtctataacggagataatagatcagccgaatcaaaggccaaggatttgttcattaacgatcccttcatcaagggaatagattttaagaataagaccgatattatttctagactagaagttagatttggaaatgatgttctatattcagagaacggacccatctcgagaatttataatgaactactgacaaaaagcaataatggaacaagaaccctaacttttaactttacaccaaagatattctttaggccgacaactattacggctaatgtatctagggggaaagataaactatctgttcgagtagtttattccaccatggatgtcaaccatccaatctattatgtacaaaaacaattggtagttgtatgtaatgacctgtataaggtatcttacgatcaaggggtaagtattaccaagattatgggagataataactaa

SEQ ID NO: 10419 - DNA, 93 bp, unidentified; identical to SEQ ID NO: 846
  source 1..93: mol_type = other DNA
  misc_feature 1..93: note = Synthetic

SEQ ID NO: 10420 - DNA, 1599 bp, unidentified
  misc_feature 1..1599: note = Synthetic
  source 1..1599: mol_type = other DNA
atcaccttcctggatgtggacgagggggacatgtgtttgcatacactggagaaggtggacccgctggtggataacgaccgctatccctcccacgtggcctccttcgtgctggcttggacccgggccttcgtctcagagtggtcgggtttcctctacgacgaggaccgcggcgtcccactcgaggaccgacccataaagtcggtttacggggacacggacagcctctttgtcacccagcggggacacgagctcatggagaccagagggcgccgatcgggagcggttctcgaccagccggatgagcctgaagcgcaccctcgcaagcgcccagcccggcgcgcacccctttaccgtgacggagaccaccctgacgcggacgctgcgaccctggaaggaccggaccctggccgcgctggacgcccatcgtctggcgccctactcccgcagtcgccccaacccgcgaaacgaggaggtctgctggatcgagatgccgtagagcacatcaccgagctctgggaccgcttggaactcctgcaacagaccctttccaaaatgcccatggccgacgggctcaagccgctgaaaaacttcgcctcgctccaggagctcctctcgctgggcggagagcgactcctggcggaactggtgcgcgagaacatgcacgtgcgccaaatgatgaacgaggtggccccccttcttagggaggacggcagctgtgtctccctcaactaccacctgcagccggtcattggggttatctacggccccaccggctgcggtaagtcccagctactccgcaacctgctttccgcccagctcatctcccccgccccggaaaccgttttctttatcgccccgcaggtggacatgatccccccctcggagcttaaggcctgggagatgcagatctgtgagggaaactacgcccccgggattgagggtaccttcgtcccccaatcgggcaccctccgccccaaattcattaaaatggcctatgaagatctcacccaggaccacaactacgatgtgtccgacccccgaaacgtctttgcccaagccgccgcccacgggcccatagccattatcatggatgagtgcatggaaaacctgggcggccacaagggcgtctccaaattctttcatgccttcccttccaagttgcatgacaaattccccaagtgcaccggatacaccgtgctggtggtcctgcacaacatgaatcccaggcgggatctgggcggtaacatcgccaatctgaagatccaggctaagatgcacctcatctccccccgcatgcatccctcccagctcaacaggtttgtaaacacctacaccaaagggctgcccgtggccatcagtctcctcctcaaagatattgtgcaacaccacgccctgcgtccctgctatgactgggtgatttacaacaccacccccgagcacgaggccctgcaatggagctaccttcacccccgggacgggctcatgcccatgtacctcaatatccaatcccacctctaccgggtcttggaaaagatccaccgggtgctcaatgatcgaggccggtggtccagggcctaccgtgcgcgaaaaatcaaataa

SEQ ID NO: 10421 - DNA, 183 bp, unidentified
  source 1..183: mol_type = other DNA
  misc_feature 1..183: note = Synthetic
atgtggacgagggggacatgtgtttgcatacactggagaaggtggacccgctggtggataacgaccgctatccctcccacgtggcctccttcgtgctggcttggacccgggccttcgtctcagagtggtcgggtttcctctacgacgaggaccgcggcgtcccactcgaggaccgacccataa

SEQ ID NO: 10422 - DNA, 1599 bp, unidentified
  misc_feature 1..1599: note = Synthetic
  source 1..1599: mol_type = other DNA
atcaccttcctggatgtggacgagggggacatgtgtttgcataccctggaaaaagtggacccgctggtggacaacgaccgctacccgtcccacgtggcctccttcgtgctggcctggacccgggctttcgtctcggagtgggcggggttcctctacgaggaggaccgcggcacaccgctcgaggaccggcccataaagtcggtctacggggacacggacagcctctttgtcacccagcggggacacgagctcatggagaccaaagggcgccgatcgggagcggttttcgaccagccggatgagcctgaagcgcaccctcgcaagcgcccagcccggcgcgcaccccttcaccgtgacggagaccaccctgacgcggacgctgcggccctggaaggaccggaccctggctgcgctggacgcccatcgtctggtgccctactcccgcagtcgtcccaacccgcgaaacgaggaggtctgctggatcgagatgccgtagagcacatcaccgagctctgggaccgcttggaactcttgcaacagaccctctccaaaatgcccatggccgacggactcaagccgctgaaaaacttcgcctcgctccaggagctcctatctctggggggagagcgcctcctggcggaactggtgcgcgagaacatgcacgtgcgcgagatgatgaacgaggtggcccccctcctccgggaggacggcagctgtctctccctcaactaccacctgcagccggtcatcggggtcatttacggccccaccggctgcggcaagtcccagctgctccggaacttgctttcggcccagctcatctcccccgccccggaaaccgtgttctttatcgccccgcaggtggacatgatccccccctctgagctcaaagcctgggagatgcagatctgtgaggggaactacgcccccgggatcgagggtacctttgtcccccagtccggcaccctccgccccaaattcattaaaatggcctatgatgacctcacccaggaccacaactatgatgtgtccgacccccgaaacgtctttgcccaggccgccgcccacgggcccattgccatcatcatggatgagtgcatggaaaacctgggcggacacaagggcgtcgccaaattctttcacgccttcccttccaagttgcatgataaattccccaagtgcaccggatacaccgtgctggtggtcctgcacaacatgaaccccaggcgggatctgggcggtaacatcgccaatctcaagatccaggccaagatgcacctcatctccccccgcatgcatccctcccagctcaacagatttgtaaacacctacaccaaagggctgcccgtggccatcagtctcctcctcaaagatattgtgcaacaccacgccctgcgcccctgctatgactgggtgatttacaacaccacccccgagcacgaggccctgcaatggagctacctccacccccgggacgggctcatgcccatgtacctcaacatccaagcccacctctaccgggtcctggaaaagatccaccgggtgctcaatgatcgagaccggtggtccagggcctaccgcgcgcgaaaaatcaaataa

SEQ ID NO: 10423 - DNA, 1569 bp, unidentified
  source 1..1569: mol_type = other DNA
  misc_feature 1..1569: note = Synthetic
atgtgtctgcacacggtggaaaaggtggaccccctagtggacaacgaccgctacccctcgcacgtggcctcctttgtcttggcgtggacgcgcgcctttgtctcagagtggtccgagtttctctacgaggaggaccgcgggacgcccctgcaggacaggccaatcaagtccgtctacggggacaccgacagcctgtttgtcaccgagcgcggacacagactcatggagacgcgagggcgaagaccgtgcccgtttcagcaccagcaggatgagtctcaagcgcacccttgcaagcgcccagccaggggcccaccccttcaccgtgacggagaccaccctcactcggaccctgagaccctggaaggacatgacgctggccgcgctggacgcccatcgtctcgtgccctacagtcgcagtcgtcccaacccccgaaacgaggaagtctgctggatcgagatgccgtagagcacgtcaccgagctctgggaccgcctggagctcctctcgcagaccctcgccaagatgcccatggccgacggactcaagcccctgaaaaactttgcttccctgcaagagctcctctcgctgggcggggaccgcctcctcggcgagctcgttcgggaaaacctccaagtcagagacatgctcaacgaggtggcccccctcctccgggacgacggcagctgcatgtccttgaactaccacctgcaacccgtcatcggggtcatctacggcccgaccgggtgcggcaagtcccagctgttgagaaacctgctctcttcgcagctcatcaccccagccccggaaaccgtttttttcatcgccccgcaggtggacatgatccccccctccgagatgaaagcctgggagatgcagatctgtgaggggaacttcgccccggggcccgagggaaccatcgtcccccaatctggcaccctccgccccaaattcattaaaatgtcttatgatgatctcacccaggagcataattatgatgtatctgaccccagaaacgtctttgccaaagccgcagcccacgggcccatcgccatcatcatggatgaatgcatggaaaacctgggcgggcacaagggcgtctccaaattcttccacgcattcccttccaagttgcatgacaagttccccaagtgcacgggctacaccgtcctggtggtcctgcacaacatgaacccccggcgggatctgggtggcaacatcgccaacctcaagatccaggccaaactgcacatcatctccccccgcatgcatccctcccagctcaaccgcttcgccaatacctacaccaaggggctccccgtggccatcagtctccttctcaaagacatcatccagcaccacgcccagcgcccctgctatgactggatcatctacaacacgaccccagagcacgaggccatgcagtggtgctacctccacccccgggacgggctcatgcccatgtacctcaacatccaatcccacctctaccgggtcctggaaaaaatccaccgcactctcaatgatcgggagaggtggaccagggcctaccgcgcgcgaaaaaataaataa

SEQ ID NO: 10424 - DNA, 36 bp, unidentified; identical to SEQ ID NO: 854
  misc_feature 1..36: note = Synthetic
  source 1..36: mol_type = other DNA

SEQ ID NO: 10425 - DNA, 51 bp, unidentified; identical to SEQ ID NO: 855
  misc_feature 1..51: note = Synthetic
  source 1..51: mol_type = other DNA

SEQ ID NO: 10426 - DNA, 756 bp, unidentified
  misc_feature 1..756: note = Synthetic
  source 1..756: mol_type = other DNA
atgtacaatagtatgttgccgatgtttatgtgtaataatatcgtagatgatatagatgatatagatgatatagatgatatagatgatatagatgatatagatgatatagatgatatagatgatatagatgatatagatgatatagatgatatagaagataaggctagcaataatgatcacaactatgtatatccacttccagaaaatatggtatatagatttaacaagtccactaacatactcgattatctatcaacggaacgggaccatgtaatgatggctgttcaatactatatgagtaaacaacgtttagacgacttgtatagacaattgcccacaaaaactagatcatatatagatattatcaacacgtattgtgataaagttaataatgattataatagggacatgaatatcatgtatgatatggcatctacagaatcatttacagtttatgacataaataacgaagttaatactatactaatggataacaaggggttgggtgtaagattggcgacaatttcattcataaccgaattgggtaaacgatgtatgaatccagtagaaactataaaaatgtttactctactatcgcatactatatgcgatgattgttttatagattatataacggacatttcaccgccagataataccatccccaacattagcacgcgtgaatatctaaaacttattggtatcacagctatcatgtttgctacatataagactctcaaatacatgataggataa

SEQ ID NO: 10427 - DNA, 27 bp, unidentified
  source 1..27: mol_type = other DNA
  misc_feature 1..27: note = Synthetic
atgaagaaactctcaaacaacgactaa

SEQ ID NO: 10428 - DNA, 42 bp, unidentified; identical to SEQ ID NO: 860
  misc_feature 1..42: note = Synthetic
  source 1..42: mol_type = other DNA

SEQ ID NO: 10429 - DNA, 246 bp, unidentified
  misc_feature 1..246: note = Synthetic
  source 1..246: mol_type = other DNA
gtggtgttcgccggcatcgcgctgctggtgctcgcctgcatctttgccttcgtggagtttagcaaggtcacgacgagcgactacacctggcgagcgctctgcattgtgtgcttcatcaccgggatggtctcgctgctgggcatcgtgctcttcgcgggatacgggcgctattgcgcggcgcccgcgaaaaacgtgactgagggcgctcgatttaactctagcgagatcgaacttaacggccaataa

SEQ ID NO: 10430 - DNA, 738 bp, unidentified
  misc_feature 1..738: note = Synthetic
  source 1..738: mol_type = other DNA
atgtcggagtggtccaggattgcagtggagtttggtgagcagcagctcaatttgactgagcttgaggacttcgcgagagagctggcctatgaaggccttgaccctgctttgatcatcaagaagctgaaggagacaggtggagatgattgggtgaaggatacaaagttcatcattgtctttgccctgactcgaggcaataagatcgtcaaggcatcagggaaaatgtcaaactcagggtccaagaggttgatggcactccaagagaaatatggactggttgagagggcagagaccaggctctcaatcactccagtgagggttgcgcagagccttcccacttggacatgtgctgctgcagcagctctaaaggagtatctcccagtagggccagccgtcatgaacctgaaggttgagaattatccccctgagatgatgtgcatggcctttggatccctgattccaactgcgggggtatctgaagccacaaccaagaccctgatggaggcctactctctgtggcaagatgccttcaccaagactatcaatgtaaagatgcgcggagccagcaagacagaagtttacaactccttcagggaccctcttcatgctgctgtgaactctgtcttctttcccaatgatgttcgggtaaagtggctgaaggccaaggggatccttggcccagatggggtccccagcagagctgctgaggttgctgctgctgcttacagaaacctgtaa

SEQ ID NO: 10431 - DNA, 783 bp, unidentified
  misc_feature 1..783: note = Synthetic
  source 1..783: mol_type = other DNA
gtgagaccaagctcctgcttcctggggctcccgtcagttaactatgtggcattcaacaagatggccacttttgaagcatgcaaagtgaatggtgctgagatccctttgaagcacttgaagctatgctatgataagagaccaacactttttgatttcttgaggaacagggaggtgccagtatcttggggagatcatacagatgatcaaatactcaatagaagtccaagaacttttgagggacttatgtttggcttgtctgagattgaagaggtggagtatgggaggtataatgagccttatttaaagaaagctgtctcttggcctcttagttatccatcccatactttctttaatcttgctgttcgaaaaacagaaatggggaactggctgcattctagcatgtgggcaactatgatgctgagaatgtctcacactgacaatctcgaggagtctatcattaaagtcagaaaaaggataatagaaaaggccaatgatatgggactggatctctctctctttacaggggaaaatctcatccttgagattgcacatttgcagtgcctcaggttgatatatgcttcaagaaaagaaagagagagaggagtgaatcattcaaaaacttattcaattgtgagatcttatgattgcttctctgttatctcagatgtcaattttgatcccatgatagctgattccctttttggatctaatgatggcacaatgtctggtgagtctgatgttgaccaactgagagtagacttagaaagatatctatcactatga

SEQ ID NO: 10432 - DNA, 831 bp, unidentified
  misc_feature 1..831: note = Synthetic
  source 1..831: mol_type = other DNA
atcattaaaatgtcactaaaatacctctgtgaccgtattactcctacatatgactatccagtcattggagaagtagtcgtcagttttgaggctgtgaacagtcaggtggatcttcctgtgtgcgtctatgatgacctggagtttgagcttgcaggcttcagactaagtctggcctacaagaacacgctctacgagtttattgataatgatgagattccatggagatggggccctcacatgtgggagtctagagtcactatggatgagataccacttctggattcactcatgaagacattccaaggccttccagtgactgacttgatggatcctagactgcatttcaccaggaatgctctcagttggccaatcggacgtccctccctgaaagcattcaggatactgtacccttgcagatttgtggggttcagctgttccaaaagagagctggcagaatacatctttgaggtaacaaaggcggtcaacttggagtgtggtatcgtccagatggctaagatgatcaggtcaactgctcagtcaatgggagtccaggagtcactcgttccatgcaaggatatggtcaaatgcatctgcatcctccaattcatcaagatgataaagggatttcaactggacaagactagaaatgtattgtttggaggcgctctcataccctttctgcatgcctgtactgaggccctcaccagagactttcctggcttgtggagagcatggaatcctcaggctgatattatggatttaataacagctgatccctacgattctggtatatccactgactcagaattcgactcagatatagaggtatga

SEQ ID NO: 10433 - DNA, 804 bp, unidentified
  misc_feature 1..804: note = Synthetic
  source 1..804: mol_type = other DNA
atgatcaacaacaacatgatgaacagccagtacatgtttgactacccggcaattaacattgatgtgaggtgtcatagactcctctccagtgtgtcttatgttgctcacaataagttccacactcatgacgtttcaacgtatgagcattgtgaaataccactagagaagttaagacttgggtttggacgcagaagctcactgtctgacttttactctcttggagagttgccagcttcttggggcccagcatgctacatcagttctgtaaagcctatggtgtacaccttccaaggcatggcaagtgacctctctagatttgatcttacaagcttttctaggagagggttgccaaatgttctgaaagctctcagctggccactaggtatccccgactgtgagattttcagcatatgcagtgataggtttgtaagaggtctacaaacaagagatcaactaatgtcttacattctgagaatgggagattcacacagcctggatgagtgtatagttcaggcacataagaagatactgcaagaagctagaaggttgggtctcagtgatgagcattataatgggtacgatctgtttagagagataggatctctggtttgtctcaggcttatcaatgcagagccttttgacactgccttctctggggaggcacttgacatcagaacagtgattagatcttatagagcaagtgacccttctgctagtcttactgaatatggcaattctctttggaccccaatacatagtcatgtagatgaaaatgatgagagctcatctgactctgacttttga

SEQ ID NO: 10434 - DNA, 900 bp, unidentified
  source 1..900: mol_type = other DNA
  misc_feature 1..900: note = Synthetic
atgtccttgtctaaagcctctcagcccagcgtcaagagtgcctgcgttaggcttcccatcgtggttcttgagcctaatctggccgagctcagcacctcatatgttggcctggtctcatgtaagtgctcagttcttacatgctccatgatgaggaaaatgaaggccttcaccaatactgtctggctgtttggcaatcccaacaatcctctacatgctctagagccagctgttgagcaacttcttgatgagtactctggggacttaggctcttatagccagcaggagaagagtgcattgaggtggccgagtgggaaaccgtcagtccatttcttgcaggctgctcatttattcttctccctcaagaacacctgggcagtcgagacaggtcaggaaaattggagaggtttcttccacaggataacatctgggaaaaaatacaaattcgagggggacatggtcattgactcttgctacaaaattgatgagagacgtaggcgaatgggtctgcctgatactttcataacaggactgaacccaataatggatgtggctctcctccaaattgagtcacttttgcgtgttaggggtctcacactcaactatcaccttttcacatcatccttccttgacaagcctctccttgattccttatattttgccatctggagagacaaaaagaaagatgatgggtcatattcccaagatgagggggcccgccaggatgaccctctcaaccccttggatgagctcttgtacctgtctgacttgcccaaaccactagcacattatctaaataaatgccctctccataatataatcatgcatgatgaggaggtcagagaggcctatctaaatcccatctggggaaaggactggccagcactttccagctccccttag

SEQ ID NO: 10435 - DNA, 747 bp, unidentified
  misc_feature 1..747: note = Synthetic
  source 1..747: mol_type = other DNA
atgtccagccaggaagattttgcgaggattgcggttgagtttgccaatgaggctgttgataccaaccagatccttgagcttgtgagggagtttgcttaccagggatatgacgctgctagggtcattgagctggtaaggtccaaggggggagaaaattggaaaaatgatgtcaagaccctgattgtcattgctctgactcgtggcaataagccaagcaagatcctaagcaagatgacccctgatgctgggaggaaatttagggagcttgtgatgcgctatgggctgaagagtggcaacccaggccgtgatgacttaactcttgcgaggattgcatctgcctttgcagcatggactgttcaagccattaaggtggttgaacagtatctacctgtaacaggcacagcaatggatgacctgtcaccgggctatccaagaccgatgatgcatccttgctttgcaggattgattgacaacacccttccagaggaaacttatagggccatactgagggctcatagtctcttcttggaccagttctcaaggaccatcaatccgcagatgagaggcaagcctaagtccgaagtagccaagagctttgagcagccccttcaagcggctgtcaacagcagatttctgagttctgagtcgaagaggaagatactgaggtcaactgggatcattgattctaacctcaagccggctcctgcagttgagcatgctgccaagaaattcttggaaatggcttag

SEQ ID NO: 10436 - DNA, 18 bp, unidentified
  misc_feature 1..18: note = Synthetic
  source 1..18: mol_type = other DNA
atgagatttttgggctag

SEQ ID NO: 10437 - DNA, 66 bp, unidentified; identical to SEQ ID NO: 876
  source 1..66: mol_type = other DNA
  misc_feature 1..66: note = Synthetic

SEQ ID NO: 10438 - DNA, 744 bp, unidentified
  misc_feature 1..744: note = Synthetic
  source 1..744: mol_type = other DNA
atggttgcatacactgatatccttaaggagttcggtgaggacatcattgatgatgaggttgttggtggactggaggcattatttgcctatcaaggatttgatccaacaaggatgttgaagaggatggctgacattgataaggatggctggaaagatgatgccaaagtcatcatcgtttttgccctaacaaggggcaacaaaatgtccaaggccatggctaagatgtcagaagagggtcagactagactgaaggccctcaaggccaaataccggatgaaggagaatcctgagtctagggatgacatcaccccaacaagagtggcagctgcactgcctacttggactgtccgggcggcaaaggccctccagaactctcttcccatgggcccagacaacatcaaggccctgtgcagtgttgaggcacctgcagaaatctgttgtgcagcttttgccagcctgatcccaactagtgagctgactgagaagcaaatagagcagctcactcatgccttctatctctggcaattctacttcacccaactgatcaacccaaaggtgaggggcaagggcaaagccattgtccttcagacctttgaaaatgctgtgaaagcagcaatgaactcgaccaactacccagataagtctcgggtggccttcctcaagaagataggcatcttcaacaagaagaatgaaattaacgggaacatccaggccatggctgcagcctgggagaagcttgagtga

SEQ ID NO: 10439 - DNA, 882 bp, unidentified
  source 1..882: mol_type = other DNA
  misc_feature 1..882: note = Synthetic
atgtcgctgagcaaatgctccaacgttgacctcaaatctgtagcaatgaatgccaacactgtcaggcttgagccatctctaggagagtaccccactctcaggagagacctcgttgagtgctcttgtagtgtgttgactctgtcaatggtcaagaggatgggtaagatgaccaacactgtttggttatttggcaacccaaaaaatcctcttcaccagcttgagcccggacttgagcagttgttggacatgtactacaaggacatgaggtgctactcccagagagagctgagtgctctcaggtggcctagtggaaaaccatctgtatggttcctacaggcagctcacatgttcttctccatcaagaacagctgggcaatggaaaccggaagagagaactggcggggcctcttccacaggattacaaaaggccagaagtacctttttgaaggggacatgatattagattctcttgaagccattgagaagcggaggcttagacttgggttacctgagatcctaataactggactatccccaattctggatgtggccctcctccagatagagtcacttgcaaggctaagaggcctgagcttgaaccaccacttattcacttctccctcattgcgtaagcctctattggactgttgggacttctttattcctgtccgcaaaaagaagacagatggctcttacagtgtcttggatgaggatgatgagcctggagtccttcatggttacccacatctgatggcacactatttaaataggtgccctttccacaacctcatcaggtttgatgaagagctgagaactgcagccctgaacaccatctggggaagagattggccagccattggtgacctcccgaaggaggtctaa

SEQ ID NO: 10440 - DNA, 822 bp, unidentified
  source 1..822: mol_type = other DNA
  misc_feature 1..822: note = Synthetic
atgtcttacttcactatccagaacgaggatctcccccagggcttcacttttcgtcctcatgacaagatctacgactcgctctgggagatgatggatgatggctactttcctagcacaattcctctgaagactaccatcaacggtgtggatatgccgtcagtgggttggcttgaggtggatgagggcctgtatgacatcctgattgatggtttagatgtccttagaccgactgatgaagaaatgattgtgtcagcaactggatggcctctggagaagaatcgagctctcatcctcaatttcttcaggaacttgagaatggatatcatcgggacttatactttgcaaaggtccttcataacgatcatgagcattgttttgttcggtgatcagaaccccaggctgagacggaagaagagatccagggtctctcttgggaagatgctgtttgatctcgctctcagaatgagatcaaaaataaggagaatgaagctcactgaggttcaggtcactgggcagaatctggtgaaggatctgtgccttctccacattcttgatctccagaaaagactagtcacaagggggaccattgcagagaaaaggttcttcactgcaattgagcaagcaccttgcaactatgaacctaagcgttatgggatgaagaagaagcacatgaacttcatgtttgaatcagatcggaagaaccttactgtccatccaactctagtcaaccttgaggagcactggatcacctttgagagtgctagggagcgactgctggacaccacattcaccaaggattggccagtcgtaggatcactgtag

SEQ ID NO: 10441 - DNA, 69 bp, unidentified; identical to SEQ ID NO: 883
  source 1..69: mol_type = other DNA
  misc_feature 1..69: note = Synthetic

SEQ ID NO: 10442 - DNA, 6279 bp, unidentified
  misc_feature 1..6279: note = Synthetic
  source 1..6279: mol_type = other DNA
atggattctatattatcaaaacagctggttgacaagactggttttgttagagtgccaatcaagcattttgactgtacaatgctaactctggcacttccaacatttgatgtttccaagatggtagatagaattaccatagacttcaatctggatgatatacaaggagcatctgaaataggctcaactttgctaccctccatgtcgatagatgtggaagatatggccaattttgttcacgatttcacctttggccacttagctgacaagactgacagactgttaatgcgtgagtttcccatgatgaatgacgggtttgatcatttgagccctgacatgatcattaaaactacatctggcatgtacaacatcgttgagttcaccacctttaggggagatgaaagaggtgcattccaggctgccatgactaaactcgctaagtatgaggttccttgtgagaacagatctcagggcaggactgttgttctttatgttgttagtgcttatcggcatggtgtatggtctaatctggagctagaggactctgaagcagaggagatggtttataggtacagacttgctcttagtgtgatggatgagctaaggaccttgttcccagaactgtcatccacagatgaggaactagggaagactgagagagagttgctagccatggtctcctccatccaaataaattggtcagtcacagaatctgtgtttccacccttcagcagagaaatgtttgacaggtttagatcctcccctcccgattcagagtatatcacgaggatagtgagcagatgcctaataaattctcaagagaaactcatcaatagttccttctttgctgaagggaatgataaggctctgagattttcaaaaaacgctgaagagtgttccttggcagtagagagagccttaaatcagtatagagcagaagacaaccttagggacctcaatgaccacaagtcaactattcagctgcctccctggctgtcctatcatgatgtcgatggcaaagatctgtgccctcttcagggactagatgtgagaggggaccatcccatgtgcaacttgtggagggaagtggtcacctctgcaaacctagaggagattgagaggatgcacgatgatgcagcagcagaacttgagtttgccctttcgggagtaaaggacaggccagatgagagaaacagataccatagagtccacctaaatatgggctcagatgatagtgtctacatagctgctttaggagttaatggaaagaagcataaagcagacactttagtgcaacaaatgagagacaggagtaaacagcctttctccccagaccacgatgtggatcacatatctgaatttctctctgcatgctctagtgacttgtgggcaacagatgaggacctgtacagccctctctcttgtgataaagagcttagattggcagcccagaggattcatcagccatccttgtcagaaaggggtttcaatgagatcataacagagcactacaaattcatgggaagtaggataggttcatggtgccaaatggtcagcttgataggagctgagctatcagcttctgttaaacaacatgtcaagcctaactactttgtgattaaacgactactaggttctgggattttcttgctaatcaagcccacttccagcaaaagccatatatttgtgtcttttgcaattaagcgctcttgctgggcctttgatctctccacttccagggttttcaagccctacatagatgctggggatctgttagttactgactttgtttcttataagctaagcaagcttaccaacctctgcaagtgcgtttcattaatggagtcctccttctcattctgggcagaagcatttggaattccaagctggaactttgttggtgacttgttcaggtcttcagactctgcagcaatggatgcctcatacatgggcaaactttctttattaacccttttggaagacaaagcagcaactgaagagttacagactattgcaagatatataatcatggagggctttgtctcgcccccagaaatcccaaaacctcacaagatgacctctaagtttcctaaggttctcaggtcagagctgcaggtttacttattaaactgcttatgcagaactatccagagaatagcaggtgagcccttcattcttaagaagaaggatgggtctatatcctggggtggcatgttcaatcctttttcagggcgtccactgcttgatatgcaaccactcatcagctgttgttacaatggttactttaaaaataaagaagaagagactgagccttcgtccctttctgggatgtataagaaaatcatagaacttgagcaccttagaccacagtcagatgccttcttgggttacaaagatccagaacttcccagaatgcatgagttcagtgtttcctacttgaaggaggcttgcaatcatgctaagctagtcttgaggagcctctatggacagaatttcatggagcagatagacaaccagattattcgagagctcagtgggttgactctagaaaggttggccacacttaaggccacaagcaactttaatgagaattggtatgtctataaggatgtagcagacaaaaactacacaagggataaattattagtgaagatgtcaaaatatgcctctgagggaaagagcctagctatccagaagtttgaggattgtatgaggcagatagagtcacaaggatgcatgcatatttgtttgtttaagaaacaacagcatggaggtctgagagagatctatgtgatgggtgcagaggaaagaattgttcaatcggtggtggagacaatagccaggtccatagggaagttctttgcttctgataccctctgtaacccccccaataaagtgaaaattcctgagacacatggcatcagggcccggaagcaatgtaaggggcctgtgtggacttgtgcaacatcagatgatgcaaggaagtggaaccaaggccattttgttacaaagtttgccctcatgctgtgtgagttcacctctcctaaatggtggccgctgatcattaggggatgctcaatgtttaccaggaaaaggatgatgatgaatttgaattatcttaagatcctggatggtcatcgggagcttgatattagagatgactttgtgatggatctcttcaaagcttatcatggcgaggcagaagttccatgggcctttaaaggcaaaacatatttggaaaccacaacagggatgatgcagggaatactgcattatacttcctcactattacacaccattcaccaagaatacatccggtccttgtcctttaagatattcaacctgaaggttgctcctgagatgagcaagagcctggtttgtgacatgatgcaaggatcagatgatagtagtatgctaatcagcttcccagctgatgatgagaaggttcttaccagatgcaaagtggccgcagctatatgcttccgcatgaagaaggagctgggagtgtaccttgccatttacccctcagagaagtccacagcaaacacagattttgtgatggagtacaattctgaattttatttccacacccagcatgttagaccaacgatcaggtggattgcagcttgttgcagcctgccagaagtggaaacactagtagcccgccaggaagaggcctctaacctaatgacttcagttactgagggaggtgggtcattctccttagctgcaatgattcagcaagctcagtgtactctccattacatgctgatgggcatgggagtgtctgagctattcttagagtataagaaggcagtgctgaagtggaatgaccctggcctgggtttcttcctgcttgacaatccttatgcgtgcggattgggaggtttcagatttaatctcttcaaagctatcaccagaactgatttgcagaagctatatgctttcttcatgaagaaggtcaagggctcagctgctagggactgggcagatgaagatgtcaccatcccagaaacgtgtagcgtgagcccaggtggcgctctaattcttagctcctctctaaagtggggatctaggaagaagtttcagaaattgagagaccgtttgaacataccagagaactggattgaactaataaatgagaatccagaggtgctctatcgggctcccagaacaggcccagaaatattgttgcgcattgcagagaaagtccatagcccaggtgttgtgtcatcattgtcttctggcaatgcagtttgtaaagtcatggcctcagctgtatacttcttatcagcaacaatttttgaggacactggacgtcctgagttcaacttcttggaggattctaagtacagcttgctacaaaagatggctgcatattctggctttcatggtttcaatgatatggagccagaagatatattattcttattcccgaatattgaggaattagaatcactggattctatagtttacaacaagggagaaatagacatcatcccaagagtcaacatcagggatgcaacccaaaccagggtcactatctttaatgagcagaagaccctccggacatctccagagaagttggtgtcagacaagtggtttgggactcagaagagtaggataggcaaaacaaccttcctggctgaatgggaaaagctaaagaaaattgtaaagtggttggaagacactccagaagcaactctagctcacaccccactgaataaccatattcaagttaggaatttctttgctagaatggaaagcaagcctagaacagtcagaataacaggagctccagtaaagaagaggtcaggggttagtaagatagctatggttatccgtgacaatttctcccggatgggccatcttcgaggtgtagaagaccttgctggcttcactcgtagtgtgtcagctgaaattctcaagcactttctattctgtatactacaaggtccatacagtgagagctataagctacagctaatctacagagtcctaagctcagtgtcaaacgttgagataaaggaatcagatggtaagacaaaaaccaacttgattggaatccttcagagatttctagatggtgatcacgttgtccccataattgaagagatgggagccggaacagtgggtggattcatcaagagacaacaatctaaagttgtgcagaacaaagtggtctattatggagttgggatttggagaggcttcatggatggatatcaggtccatctagagatagaaaatgacataggacagcccccaaggcttaggaatgtcacaactaactgtcagagcagcccatgggacctgagtattccaataaggcaatgggcagaagacatgggggtcacaaacaaccaggattattcctctaaatctagcaggggggccagatattggatgcattcattcaggatgcaaggacctagcaagccatttggatgcccagtttatattattaagggtgatatgtcagatgtcatcagactgagaaaggaggaggtggagatgaaagtacggggctctactctcaacttgtacaccaagcaccattctcatcaggacctacacattctatcttacactgcatcagacaatgatctcagtccaggcattttcaagtcaatatcagatgagggggtggctcaagccctgcaattatttgagagggagccaagcaactgctgggtgagatgtgagtctgtagccccaaaatttatatcagccatccttgagatatgtgaggggaagagacagataaagggaattaacagaaccagactctcagagattgtgagaatttgttctgaatcttccctaagatcaaaagtcggatctatgttctcatttgtcgccaatgtcgaggaggcccatgatgttgattatgatgcgttaatggatctaatgatagaggatgccaagaacaatgcattcagtcatgttgttgactgcatagagttggatgttagtggcccttacgagatggagtcttttgatacatctgatgtcaatctctttgggccagcccattacaaggacatcagttcattatctatgattgctcatcccttaatggataagtttgttgattatgctatttctaagatggggagagcctcagttaggaaagttctagaaacaggtcggtgctccagcaaagactatgatttatcaaaggttctcttcagaactctacagagaccagaagaaagcattaggatagatgatctggaattatatgaggagacagatgtggcggatgacatgctaggctaa

SEQ ID NO: 10443 - DNA, 6273 bp, unidentified
  source 1..6273: mol_type = other DNA
  misc_feature 1..6273: note = Synthetic
atggacgagatactcatcaatcaacccgaactgaagccaggattcaacaggagagctcttgataactaccatgataccctcatgtctatagagcttcctgaattctcgctggaaaaagagcagaattctctgagaatcgagatatctttagattctttagatcccagctcaaccattggttcaactttgagagataatcctggcataattgtggaatcagaaaagctgactaacctagttcacgacattacagttggccaccttgccccgaatactgataagatgtttagctctgtttttcctgttaagaatgacggctttgatggttacacccctgacatgataattaagacaacagcaggtgcacactacattatagagttcacaaccttccgtggtcttgaggctggtgctgctcaagctgcaatgtcaaagcttgcaaagtatgaaatcccctgcatcaacaggtcttctgaatccactttatccttatgtgtaattgctgtgcacagatcaggagttgtcagcaatctgattttgaaagaggatgaagtcaatgagttagtattcagattcaggctagcagttgccatcttttatgaggcaatgaagttgtgccctgaattaacagatgatgactctgaactgtcaaaagcagaaaaggagataattggcacaatctctatgatttcaatggattggagaagaacagaaaagagcttccccttcttcagagaggatgtgcacaatttctttatggacactccacctgacgaggactatatgacaaacatcatatcatctactatagaaaaagcacataaagacctactaaactcatcattcatccggaatgaacttagttacgatgatcgaataatcctgaactctgaagagtgtaagattgcaatatctgagctggaatcaggtttgagagcagcaacacatagaagtatattcaggtccaaggcaactgttcaactccctggctgggtgactcggaaaggccctggaggaaaggacttgatgtgcatgaaatcactgaactgtgaaggagatcatccaatgctcaagatatggagtaaggttctatctcaatctagatttgaggctattgacagaatgtatgacgactcagaagcagagttggattatgccctaaagggtgggccagatagagcggatgaaagatgcagataccacagagtgacagtagatctgagcaatgaggagattgagtatgcagcttctctgggtgtcaatgggaagaaatattctgatctcaattctgtgaaaaaagcaagggagatgagcaaagagtgctttagtatagatcatgatatacgtcatctagaagagttcttaatatcacatgataggagtctgtttgacacagatgaggaattgtactcgccttatgatgaagactatgagctgaggttagcagcccaaatgatccatcagccagactacagcttaaaaaaaggcccaaatgaattcctgaaaaatcataatgaatttatacactcagctattggctcctggtcgcagatggtctctttaataggatctgagctgtcagcatcagttaagcagcatgtaaaagagagatcatttgtggtaaagaggttgctaggttcaggagtgtatcttcttataaaacccacaacatcaagtagtcatatatttgtttctttggcagtagacaaatcttattttgtaagagatctttgcaagaatggggtctttaagtcatacttggacgggggggatatctatgtgacagaatttgtctcgtacaaattgagcaagttaacaaacttatgtaaatgttgtcctctcttagaatgctccatatctttctggacagaggtttttggattttatccttgggaatctgttttccttttgagtcgagaaagaagtccaagtatgaaagaagctttctctatgataaagctttccttgctcaccctgatggaggacaaagccactactgaagaaatccaaaccttgatgagatatattgtgatggaagggtttgtgtctcaaccagaattgccaaagcctcataagatggtccctaagctacccacaattctaagatctgagctacaggtctacttaataaaaagagctctctcaagtatgctgactatttcaaaacagccattctcactaaataagagaggaggtcaagtgacctggtctcatcttttcaatccccttactggtctgcctcttaaggatcttcagccactgattagctcttgctataatggatacttcaaaaataaggaggaagagacagagccatcagcattatcaaaaatgtacaaaaagatcatagagctggagcatttgtgcccagagaccgatgagaatctaggggtgggtgaccctttagagcccaagatgcatgaatttagtagaagttatttaaaaagctgcattgaacatgccaaacacctgctgaaaaggactcatggcagcagttacatgaaaatgatagattctcaaataatgagagagttatcctctctaactttagaaaggttagccacactaaaagcaaccagttgctttaacgagtcttggtactcttttaaagaagtaaaagacaagagttatagcagagataagctcatagtaaagatgtctgaatttgctaattcggggaaaacactagcaattcacatgtttgagcaatgcatgaacttaatagagcagagaggagctatgcatatttgcttatttaagaaaatgcagcatggaggtttgagggaaatttatgttatgggagcagaggaaagaatagttcaatctgtagttgaaaccatttctcgctgcataggctgtttctttccttcagacactttatgcaatccagctaacaaatccaggataccagaaagtcatggcatgagagctagaaaacattgcagaggccctgtatggacatgtgcaacatctgatgatgctaagaaatggaatcagggtcattttgtgaccaagttctcactaatgctttgttctttcactagtccaaagtggtggccaataatagtaagaggttgttctatgttcacaaataagttcatgatgatgaacatgagatacattgagatcctgcacaatcatagagatctaacagtgaatgatgagtttgtaaatcagctatattcagcttatcatggggatctagaagtgccatggattagtcctgggtgcacgtacctcaaaacaaagacaggcatgatgcaaggcatacttcacttcacatcttctttgctacatacgatacaccaggagtacatcagatccttaagtttcaagataatcaacatgaaagtccacccagaagcatcttataaagttgtgtgtgacatgatgcaaggctctgatgatagtagcatgataatgagtttccctagttctgacctggccatgctagctcgcttcaaggtcgcagcagcaatctgcttcagagttaagaaagatttgggtatctatattgggatatacaaatccgagaagtgcacatcaaacacagattttgtgatggaatataattcagaattctacttccattcacaacatgtcagacccaccattcgctgggtagcatcctgctgcaacctgccagaggtagaaacactggtagcaagacaagaggaagcttcaaacctgatgacatcaatatcagaaggaggtgggtcttttgcattgtctgctcagatacaacaagcccagtgcacattgcactacatgctaatggggatgggtgtgacagacctctttaaacattacaaagttgctataatgagatggaaagatccagggctaggcttctttctgttggataatccttactgtgccgggttaggaggattcagattcaatctttataaagctataaccaggacacagctccagaaattatatgcatacttcttgagaaaagtgaggaaaaatagtgatgatggagatcagttggagacctgtagtgtcagtcctggtggagcactaatcatgagctcatcactcaagtggggctctagacagaagttcttaaaattaagatctagactgaacattcctgaagactgggttgatagaattaacgaaataccagacattctatatagggctcctagaactgggaaagaaatcatactgagaattgcagagaaagtccacagcccaggagtggtgtcgtctctttcttctggaaatgcagttgctaaagtgatggcatcctctatatactttctctcagcttctatttttgaagatagtggaagaccagagttcagcatagcatcatcctcaaaatacagccttctccagaagatggcagcgtttgagggctgtcatggtatcaatgacataacagatgatgatttaatgtttctatttcccaatattgaggaactaaaccagctagactctattgtctttgacagaggagagattgaagttataagaagacttaacactagagaggccacacagacaagagtagtcatttttgatgaacatcacatcatgagagtcgcacctgaaaaattggtgtctgataaatggtttggcacacagaaaagtaagataggaagagaggccttcaaaaatgagtggaagaaattgaaaacagtggtaagatggctagatgatgatccaattagcacattggagaaatcccctctctcaaaccacattcagataagaaatttctttgccaggatggaaaataaatcaagagtagtgagagtgacaggagcaccagttaagaagagatctggtgctagcaagcttgctatggtgatacgtgacaactttacaaaattggggcatctaaaaggaattgatgacttatcaggtcttataagaagccatgcagcagaagttatcaagcatgcactcttctgtgtactccaagggccatttagctcagatgcaaagctccaattctctcagaagattttatttatgtctccagaaattgatttaaaggattctgacggtaagacaaaaaccaacctgataggactgatgcagagattcataaacggagacggcaacctgatcagagagatggagctaattggggctgggacagttggtggtttcacagttcgtcagaaaagttctatgggaagtgatggaaagatatgctattatggcccaggctcatggagaggcattatggatggacaccaaattcagatagacataaataataagcaagggcttcctccgcacataacatctgtttcaataagtgataaagtgagtccctgggatctatgccagagcataaaagcatgggccgaagatatgggagttaagaatttgacagatatatctactacccacaaaagatggttgtgcaaattctggatgtacgattttaagatgttcggatctgataaaccatttggctgtccagtgttcaccataagagagagaatgacagatctccacttcgtcaaaacagaggatatttgcatgaaagttagagggtcaacaataaacttgtttatacccttccaaaggtctgacatgcacatactatcatatactgccactgattatgatataagcccatcatgtttacgatctaatgatcccttctgtaaagatgtatcagacatgttccaacatgagcccagcaaatcatggatgaggtgctcttcattgccatatgactttacaggagctgtcttgaacctgtctgaagggaaaatcaaaagagaccacattgacaccaagcgattaagagaaatcatcaagacatgcactgaatcttcactaagatctagagttggaacaatctattcggtcataccaggagctaatgagtcccatcaagttatggattcagaccagctgtttgagctcctgattgaggactttagtccatcaatgtttgaagatacagtgagatgcttagaggatgatttaattgaaagtctagaggatgagcaatttgatgtgactgatttagacttgttcggcccagctcattataaagaagtttcagacttggctatggtatctcaccctcttatggatgattttgtagagtacttagtgaagaaaatggggaggagggagattcgaagggtgattgaacaaggtaagtgtgtaagccgatttaaagattattcagtcagattaatgagagctctctccttggatccttctaaccttattgtgatagatgaggactcagatgagccacttgaggtagatgaggacttaataggataa

SEQ ID NO: 10444 - DNA, 21 bp, unidentified
  misc_feature 1..21: note = Synthetic
  source 1..21: mol_type = other DNA
atgataccctcatgtctatag

SEQ ID NO: 10445 - DNA, 765 bp, unidentified
  source 1..765: mol_type = other DNA
  misc_feature 1..765: note = Synthetic
atggctatgccggagaattgggtgcgctttgcgattgaaatctcggatgctcagtgggaggaggaagagatccgagagttcatcaatctcttccagtatcaaggctttgatgcagccgtggtgctgagcaggatttttgagttggccaaaaaggctgatctctcccgggaccagatgctgagggacatcagggctctgatcaccctccatctgaccagaggtaacaagctctccagcattgagaagaggctgtctgaggagggcaagaaagaattcgccctgctgaaggccaggtaccagcttgtggacaaggccaaggaggctgcagatctgacactctcccgcattgcgatcgccaatgccgggctgacgtgccgcattctgccgcaagtggtggcccacacagccgtgactaggtcacggatggagagtctgagcgcagactatccagtgtgcatgatgcacaatgcctttgctggcctgatcgatgagaccctccctgaggactccatcaaggccctggtcgatgcccacaggctctatctgctggagttctccaggaccatcaacgtgaagcaccgcggaatggaggccaaggagatcttggatgccaatgactctgctctgcaggctggtctggcaagctccttcctgactcccagtcagaagagagcttacctgctgagcttcaagctggtggacggaaatggcaaagtgaataaagccgtccagcaggctgcaactgtcctcagatcattgatctga

SEQ ID NO: 10446 - DNA, 81 bp, unidentified; identical to SEQ ID NO: 893
  misc_feature 1..81: note = Synthetic
  source 1..81: mol_type = other DNA

SEQ ID NO: 10447 - DNA, 951 bp, unidentified
  source 1..951: mol_type = other DNA
  misc_feature 1..951: note = Synthetic
atgcaatccagagctgtcatcttgaagtatagatctggttcaggccacaagaggtctttgcccaggttctacatagactgtgatttggacacctttgattttgagaaggattgctctctgattgagaatgagttccccatttacataaacaattataaggtggtctataagtcaaagccaactctctcacatttcctcattgagaaggagtttcctgctgtgctggggcctggtatgatcagtgcagttcgaaccagactttacgagccaactatgagagagctctaccaggaatcgattcaccaactaaagaggagcaacaagaaataccttttgtctgctctcaggtggcccacagggattcctactctagagtttatagactattacttcgaggagctcctgttcttgtcagagtttgacccggggtctatccagagatacctgaaattactggttaaggcctctgggctttacaactccactaatgaggagcagatagtggagattcacagacgagtgctcatagaaggcaaaaagcacggattgactgcttttgatctcccaggaaatgacatccttggagacatctgtgtggtccaagcagcacgggtgacaagactggttgctaagacattctctaagatgaccagagacacccatctgatgatatacttctcgataagcccagttgagttggttttgagtaaacttgataagaaaggggacaagagggctaaagcaaaagggttgatgtctatgagtgccgctaggtcttatgactattttatgagaactgacttgggattcagagagactgctctttccaccttttgggctaaggactggcctaccccacaagagaccattctatctgacaaacgatgccttaaagaagacatgagagtgacaaagtggctgcctagtcccccccactacccacccttatga

SEQ ID NO: 10448 - DNA, 21 bp, unidentified
  source 1..21: mol_type = other DNA
  misc_feature 1..21: note = Synthetic
atgagttccccatttacataa

SEQ ID NO: 10449 - DNA, 6312 bp, unidentified
  source 1..6312: mol_type = other DNA
  misc_feature 1..6312: note = Synthetic
atgcttttagcgatttgctcgaggaccatccgacaacagggtcttaactgccctccagctgtgacctttacctccagccatatgagaccgccaattccatcatttctgctctggactgaggggtctgatgttctgatggattttgatttggacaccatcccagctggatcagttactggatcatccattggtccaaagttcaaaatcaaaacacaggctgcttcatcttttgtgcatgatttcacctttgcccactggtgcgatgcgtccgacatgcccctcagagaccacttcccgctggtcaatgacacttttgaccactggactcctgatttcatctcgcagaggctagatggaagcaaggtggtggttgagtttacaaccaaccggtcagaccaggaacaatctctgatcagtgctttcaacaccaaagtaggaaagtacgaggttgctcttcacaatcgatcgactaccagcagcatactatttggagtggttgtggtcagtgagacaacagtagtcaccaacttgaacttaaatcagcaagaggtagatgagctctgctttaggttcttagttgctagagctgttcacctggagatgaccaccaagatgatcattccagagtatgatgatgaggatgaagacaagagaagccgagaagtgaaggcagccttccactctgtacagccagattggaatgtgacagaagccaactttgcccctttctccagaaggatgttctccaactttgcccaaatggagccagacaaggagtacctggctcacatcatattggactctctgaagcaagcacaggcggatctggatggcaatcattacctcaatgagagtttgactgagcaagccagacttgataggaacagagaggagagcttgaacatggttaaggacttcgaacgagacttcaacaatgcagcccagcggtcagcttggagccacaagtccactgtgccttttccaggagtgatcccgaaggtgagcggagacaccacatccctttctagacttgtcgagctaccagtgatcaccgggggatcagacgcaacaatcagggcttggaggtcagcctatggatcagtgagcaacggaacagttgaaaggtgtgatgaggatgtggaaagagaaaggagggcagccctgtgctctctcactgtggaggagctagaagagtccaaggctctgaggatgaaataccacaggtgcaagatagacaatggaatgatggacaagttggatttagcaatgcaaggggttgaggctaaagagttcaagaatcacccatccatcatcaagaagagatcaaagtcgaagaagacctttcctctgactgcagacactcgagacatcgacttgttcctccatcatgatgacttgatgttcaacaatgagcactcccagacacctccagcagccatgattgaggctgtcaaggctggggctgatgcacaatcactgcatgggttggacaagagtgcaaatccatggtacgcctcagctctctggttccttgggctccccataggactatggcttttcatgtgcacctgcatcggagtggagttaagcatcagtctgaaacaacactgtggcaggcaaaagttcatcattaagaagctaaggttctttgacatcttcctcctgatcaagcccacgaattctggaagtcacgtcttctactcaattgcatttccagagtcagccattcttgggaagttgcacagatcccagtgttttaagggcttgcagtttgaggatgggtggttctggactgagttcagctcctttaaaatgtcaaaactgactaatgttgtgaaatgcctgtccactgggttcaacttgttttggttctggagagattactatgaagtacccttctgggctgggaatgagaaagacttccaaacagggaaacagagagccaacaaaatgttcaagttttgcttgctaatgctgttagaggacaaagccaggacagaggaaattgctacgctgtctaggtatgtcatgatggaagggtttgtcagtcccccttgcattccaaaaccccagaagatgatcgagaagttgcctaatctggctaggactaagttccaggtgtggctgatatccagaatgctgcagacaattattagagtgtcagattacccgttcaaaatcacagcaggacacaaatcagccaactggacaggcatgttcaactgggtcacaggagaaccaattgaatcaacgcagaagctaatttccctgttctacttgggttaccttaagaacaaagaggagtcccctgagagaaatgcaagcattggaatgtacaagaagatactggagtatgaggacaagcaccccggaaggtacacctacctagggcttggggaccctcctagtgatgacactcgtttccacgagtactccattagcttattgaagcatctctgcatccatgctgagcatgatttgaggcggaattggggggaatctttcaaagccatgatttctcgagatattgtggatgccattgccagcttggatctggagagactggcaactctgaaggcttccagcaacttcaatgaagagtggtatcagaagaggggtgatggaaagacctaccatcggagcaaggttctggaaaaagtcagcaagtatgtcaagaagagtagctcacatgtccaccatatcatggaagaatgtcttcggaaggttgagagccaaggttgtatgcatgtgtgtctgttcaagaaaccgcagcatggtggtctgagagagatatatgttcttggatttgaagagagagtggtccagctggtgatagagaccattgcaaggcaaatctgtaaacggttcaaatctgaaaccttgaccaacccaaagcaaaaactggccattcctgaaacacatggtcttagggctgtcaagacatgtggcattcatcatgaaacagtggcgacatcagacgatgctgccaaatggaatcagtgccatcatgtcacgaagtttgctttaatgctctgccatttcacagatcctttgtttcatgggttcatcattagaggatgttccatgttcatgaagaaacgcataatgattgatcagagtctgattgatatcatagactcccacaccacactggagacatctgatgcatacctccaaaagatccacagagggtaccatgggagtcttgatgaccagcctagatggatctctagaggcggggcctttgtgcagacggaaactggtatgatgcaaggcatacttcattacacctctagtctactccacaccttgctccaggagtggcttagaactttctcacaaagattcatcaggacaagggtttcagtcgaccagcgcccagatgtcctagtggatgtcttgcagagctcagatgattctggcatgatgatctccttcccgtcaacagacaagggagccactgggaagtacagatacttgtctgcccttattttcaagtacaaaaaagtcattggcaagtaccttggcatctactcatctgtaaagtccactaacaacaccctccacctactagaattcaactcagagtttttctttcacatcaaccacaacaggcctctactaaggtggatcacagcttgtgacaccatctcagagcaagaatctctggcttcaaggcaagaagagatgtacaacaatctgacatcagttctcgagggtggtggcagcttttctctggtttccttttgccagtttggtcagttgctcctacactacactctattaggcatgacagtttccccactgttccttgagtacataaagttggtgtcagaaataaaggacccttccctgggctacttcctgatggatcacccgttcgggtctggtctatcaggattcaagtacaatgtctgggtggctgttcaaaacagcatactaggatccagatatagatccttgctggaggctatacagaattctgacagtgctgctccaaagaaaaccttggatacaacaacttctgggactttcgtgcagtccacaatcatcaggtttggagatagaaagaaatggcagagactggtggacaggttgaacctcccagaggactggctggatgtgattgacaagaatcctgagattgtgtatcgtcgaccccgagatggctttgaagtgagcctgaggattgcagagaaggtccattctccaggagtctctaactccctgtccaagggcaactgcatcatcagggtcatctcatcatcagtgtacatcctgagcaggagcattctaagtgatggtctggcttggctctatgatgaagaagaggaggtcaaacgccctctgctgtacaaggttatgaatcagcctgagctggacctccattccaggttgactccggcacagctgtcaacgttgtttcccatgatggctgaatttgagaagttgcagacccatcttaggagttatatgaaaattgaaggtgagttcatatcaaagaagaaggtcataactcagactagggtcaacattcttgagactgagagattccttagagcacgacctgaggacttgattgcggataaatggtttggcttcaccagaacaagaatgactccaaggactttcaaagaggagtgggagaatctgacttctgtgtttccatggctaacaggaaacccctctgagactctggaactttctcctttccagcaccatgtccagctaagaaatttcttcagtagactggacctcaaggggagagacatcagaattataggagctcctataaagaagtctagtggtgtgagcaacgtctctacagccattagggacaacttcttccccaggtttgtcctgactcacataccagatgaagctgcaatggaaagaattgaagcagcaggcattctgaaacatgctctcttcctcacagtgacaggaccttacaccgatcagtcaaagctggatatgtgcagggattttatcactagctcagagcccatcactcttaaacctaaccacggaaaaaccaggaccaacgtgctttccctttttcaggattacttctccaagagggggccagacatcatcttcaacagaattcagatggctaactgtggagtgatcggaggattcacatctcctcagaagccaaaggaggttgacggcaagattgtctacactggtgatggtgtgtggcgaggaattgttgacggttttcagatccagctggtcattacctacatgccaaagcagaagtcaaatgagctaaaatccataactgtcaactcagacagatgcatctctgccttgagcagcttctgccagtcgtggtgcaaagaaatgggagtgttcaacaccgaggatttttccaagacccagagattctcaaaagcgtccttcttcatgcacaagttcaagatctctggttcaaagcagactctaggtgctccgatcttcatcgtcagtgagaagatcttccgacccatctgctgggacccatcgaagctggaatttagagtgcgcgggaacactctaaatctcacttacaaggaagtcaatccaggtgctggccagagaatgttcaacattctcagttacactgtcaaggatacagatgtctctgatgagaatgctttcaagctcatgtcattgtcgcctagacacaagttccatgggcgggagccgagcacttcttggatctgcatgagagccctgcctatcagcaccattgacaagctgctagagagaatattgaacagggagagaataagtggatcaatcgacaacgaacgcctggctgagtgtttcaagaatgtgatggagtcaaccttgaggcgtaagggagtgtttctatctgaattctcaagggccactcaaaagatgctggatggtctcagcagagatatgttggacttttttgctgaggctggcctcaatgatgatctcctgctggaagaggagccatggctgagcggtttagacacttttatgctggatgatgaggcatacctggaagagtacaatcttggtcctttcggtgtgttcagtgtggagcaggagatgaacaccaagtactaccaccacttgcttctggactccctggttgaggatgtaatccagaaattgtccctggacgggttgaggaagttgtttcaggaggaagaagctccattggaatacaagaaagaggtgattcgactgctcaacatcttgcaaagggatgcgagtcagataaagtggaagagcagagaccttttgtcagagaacatgggtcttgacgttgatgatgacatgtttggttga

SEQ ID NO: 10450 - DNA, 3228 bp, unidentified
  misc_feature 1..3228: note = Synthetic
  source 1..3228: mol_type = other DNA
acgccagctatcaagatgatgttctctcgtgttatgcaattggcactgatatgtgctgtgacttgtgaagacaacccttgtctctgggagaggtttaccaattcaagagacattgagttcatgattcctgttgtcaatctatccacctctagaaggttgtctatgtctcaaagaatatgcatggttagtatgggcaaacactggtcccgcatctttagtgagggagaggaggatagagggatgaaagaccttgaccccctgctcatgtccagtctaaactggagaggtacagcaaaaaccagaagctcaaactcctttaattttgacatcctggatggcatctttcttggttttcttgacttggtgaagtggggtgaggaagccgacaggcacacacccatccatcccgaatgcataaaatcaaaagtttgtggattcatgacagcatctggccctaggatcaagacatgcacaggaaagtttagaggagcagacagacatggccactgcactaacagggcaacaccccatgaggcaacaaatgtgatatcagtcggagtacagcatgctcaggaggccaaccaggtagatgagcatgaggcacgctacatttctgaagccagaaaatcaattaatcctgagatctgcagcattgatggggtagaaatcaatcaatgtgatcttgcttctccagggaggtggcttatgctacactatgctagcttcaggctgcaagaaggcagtttggtgtatctttctcctggactcaacataaaatggagccagataaacgtgcctgcgtctgatttttattgcatcaatgtctctgaccacctgaacactcattataggccgtgtgaagtcaactgcactgacaactgtcagggggatgagctttactgctcagttcaccagtgtgcccgatctgctgaatgcaagtgctctttcatagggagcaggggcatggctgaagtccagattggtgatagatggttcaagccagctgtggtaggaagccagcagtttttcgtgaaggaggatgtccctgtccttcaacaaccctctgccgactgcaccacatgctcaatgacctgcacagcggaggggattgccattagcagcataaaggatgaactcaaggatgtgacagtctgcgttgagggcttctgctctaccagagtgagcaaaggctccaaagtatggaagattgagttccacaaccaatatccttcttctggttcagtggctctggcaagagggacaactgtgagtggagaaacctttgagctaactgctgagtgtgggagaagaacaggatgtgagcagatcaattgcctcttctgcagggaaatgctgtctaaccctcaatgttacccttatggaaagtggtttttattgttcttgattttggctactctctacattattgttgctctccttaagacaatcatgagaatcttcatggcttgcctgtcagtcctttatggccctttcatcataataataaaaatctcaagatgcttgggtagactcgggaaaaggaaaggggagaggacatatgttaggcttatggaggccttagatgatgagagaaaacctgaggtggtgagagcaccagtttcattaggtaggacaaaacaacctcgcatagtcttattcattgtgttggcccttctggtccacatggccctctgctgtgatgagagcagactcgtagaggaaacctctgtgacatgtaatcctggcccagacaacatcttctcctgctcaacaaaagaaatgatcactgtgaaagaactgagggcagggaaaacaatatgcgttagcctgaaaggacccggaggaagcctgtcaagcccaattaagatcaaaatgcttgacattgtaggaaggtctgaccttcttgacatttatttcactttcaatggacatgcaaactgcaaatcagtccgcaggtgccggtgggctgggtcctgtggtaattcaggatgcttgggtgtaggaaaggaagactatgacagagaattaggagatcaggaatcctcactgcacccgaactggagagactgctatgacggttgcggaggggctgcctgtggttgtttcaatgcggctcctagctgcattttcttgaagaggtatgttaccaatgcagattcaagggtattcaaggtgtttaagccctcagcttggtttttgtctacaaagatagttgtggagactacttctcacaaggaggatgttacattgaaaagtggtgaggccaaggtgattgacaaggtgtcattccattataggactgataaaaacttgtttgctgggatgtcaatccctcccatagtgacagaagtcaagagagaaggtaaacctcttagcttcttcctggaaaaccaaggacaacacccaaaatgcaaagatgaaaactctgcaaggacatcatctgcatctaactgcatagttgaccagaacacaatttcagctaatgtgagagtcgatgacgtgtcttgcagaagcaatctggttagcatatcaggaatgagcacgttgaagcctctaccacaaagagtgggggatttcctaatccagttacataatgatgagcctgtacttctggctactggggactctggtgttgttgagggagagctgcagatagacttgtcgcataagaagatctctatcaaggttgataccacagtctgcagaggaacagtgaaagaactgaaggggtgtgttggctgtaccaaaggggcctttgcctcactggaaattcactctacatcagcaggatcagcaagtcttcaatgcagcttgagtagctgttacatggaggttcagaagggagtcaacaatgtgaactgctctctcagattctcaaaagcagttgtggaggaaacatgtgtacttgcctgctcaggctcaaaagagcagctgagcataaaaggaaacctcataattggaggagacttcaagaaattgaccgaggattctgcaacaagcttctctcacactgattcaaaagacacccgaatccatttgcagaccggattgatgaactggctggacacattgttcggcgccagccttcttgggaagatactagggataggattggccatcttatccccattcattctaattttgatcttaagatggattttgagggtcgtcctcaggagatccagaattagacgagagcctaagtatgaaatggctaagtacagctaa

SEQ ID NO: 10451 - DNA, 4017 bp, unidentified
  misc_feature 1..4017: note = Synthetic
  source 1..4017: mol_type = other DNA
acggcatattatctgaacatttatattttgttaactgagagtaagtgtacaaacatgaagattttacacttattgactaatataatgtatgccctaggggcttacattataactggatggagcatggaagggaccaccagagtgtgtctctccaatgagtctccattagaaggaatagtctattattgggaaaccgagaggaaacgaaggggaatggaatcatcttctaatcttgattgcagggtaggagaaggtgaactgaagaggattagcaataagaccttgatcagacttatagaggaagtgcagttgtctacttatgagctaaaggttagttgtgaaaagtcttctaatgatactggattgtctattgattttaatggtttggatgacactgaacctggtcatcatattgttgattgtgaaaagatgagatatgtatcagatctaggtgttactgtgggagatggtttggcttgggattcaagatataatgaaagctacaagcaggagttattgaggaaagatgaaaagctaagagaatttgaaaatgaattaagtcacctcaagcttacagggattgatgacaagaatgaaatcatgtccctgattagagaaaatcaaatgttgcagcatagaatctccaatttaacagggtccaatgagaacaaaaataacagtctaaggatattaaaaaatgagctaatgcaggcagaatctcacagagataatctagagagggaaatcctaaatcataaagacaggcatgctaaacttgagggtgactttattaaattaaagagctcaatgtttagtgtccaggttgttactactgttttaccacttctgtctctggttgggaccagtcttgctgcaacaccaataatgctacaaaacccgtatcctcatgtaaaaaatagggtgggaagtggactatatagattcactgagaatgaagatgatccaacttgtgccaagcttgactatggtcatgcgtgtgctgggtttgattatatgataaggccagacaagtacccattcttcaattcccatgtgatgcaccacactcctcttgaggcttatgttgataaaatcctcgagtcatcaggtgagagctgtgaaatagccgcagggaaggacataaaatgcttggaacagagaaaatacatgaaagggcattgcccgaatggcattaatggtgtctactttataaatgacaaggggaagctgagtcatgcaagatgcaaagctgaagatcatgaaataacagaggactgcacattttgcaggagaatgaagaagaaaaacaacaaatctgttgtgatgaaaacatcagtatccctacaggatgccttttgccagaataactctgaaagctacactggtccacagatacctttcaaaggtgtgtgcagtattggatcattcgaatacaaaaggtgtgagcaatccacttctaactttatgaccattccttttgtagtatttaaaaataaagggaaaatatatctagaaaagctaataacaaaaaatatagaagtagttgagagcatcccgtttatttgtttcactcacaaaggtcaagacaatcaagaggtggagataagtagtctgaagagagtccaaatgtctgaatgcaaaaacataaataattccaaagaaaaatactgtacaggtgatcacaccttctgtgaaaaatacggttgttcaggaacttacccagaatacaaatgcattatggcacctggtgctgggcctgttcttgtgaacatcttaggaaactgggttaagcctcaatgcattggttatgagactgttctagtgaaaaaagaggtgaaggtgaaacgagtggaggcacctacagaatgtgaaacatgtatttataactgtgagccagatggcctgaaaataacctctactggatttcagattacatcaggagtttcctgctcccatgggtcatgtatttctcagcatcaagagccttctacttcaattaagattccttaccctgggatgttttcagcaatgggagggcatattggcatacacctatctcacacagacgactctttgagtctccacatgagggcttattgtgaccctcaagatgtgtgtgagactcatcactgttttttctgtgtcaatggaatagttaattatcagtgtcactcaatcctaagctctcttatagtgtcaatcctgttatcaattatcatatattttgttttgatcataattggcaagatgttatacttcttcaaagtcatcccaaagaagttgagaagtcctttcatgtggctagccctattatttagatgggtgattgacttggtcaggagcactttatccaagctcaagaccagacttaatagatctattggctgggatggtcaagatagaggcaatgaactgagggaagtcagagtgaggaggcccatccctaggtttgccgcaactctgtccataatttgcttgctcaccactggtgccctggcctgttcagaaacgttaatctcgaattcaaaacaaaccaaatgtgtgcagtcatctgataaggtgaaatgctctgtgtcagccacggtgaccttaaaagctggcattattggtgctgagtcatgttttattttgaagggtccaatggagaatcagagaaagacaatacgtataaaaacattatcaagcgagctagtgtgtagagagggcaatagcttctggactagtcactatagtcccacatgtttgagttctcgcagatgccacctgatgagtgactgtactggcaatagatgccagagatggactgatgaagaggtttctcaagagtttaaaggagtcaatgacaatatggttatgaatgaaaacaaatgctttgaacaatgtggggcagctggctgtggttgttttaatatcaatccttcttgcttatttgttcattcttcttttaggagtgttagaccagaggccataagagtgttttcttgtgctgactgggtgcacagattgtcctttttggtttatggacctaatagggaaagagaagagatatctctaggctcactaggcacaaagtttttgtcatgggggaccatttctttatccctagatgcagaaggaataactggcacaaactctattagtttccttgagagtagcaaaggaggatttgctttacatgatgaggctttttctgaaattccacgtgagggtttccttggtgagatcagatgttcttctgaatcagctgccatatcagcacactcttcgtgcatcagggcacccaacttaataaagtataaacctatgacagaccaaatagattgtacagcttctctggttgacccatttgctgcctttgtaaaaggctctctacctcaggtgagaaatggaatgacatttacaagttctaaggacaaaaaaactattcaagcatttaatagtgggtccattaaagcaatggtgacgattaacttggatgactatgaaattgaatttttgtccgacatagccaaatgtgaagcaacatttgtcaacttaacaggttgctattcttgtaactatggggctagagtgtgcgttagagtgaaaactgatagagatgcagattttgttgccactcaggttgaccaagagttccacttagcttttgctgtttggaatggtgttcaagactattgccaaacaatacacttcaataaacctgagatagattcaataaccaaatattcatgtggaggtgaagaaagaatgctacatataaaaggacttttaatttctttaggtgttcaggatcttagaaattcaacaggtggggcttcaattgtagtgaatccctctgattcttcttggagtctaactggctgggcaagtggtctgatctcatggttgggaggttcttggatggcagttctaaagattattggttttttactattaggattcctgtgcgcattcattatgctgtccttaataaaattcttaggcatatcttatctaagaaagaaaaaactaacatga

SEQ ID NO: 10452 - DNA, 3978 bp, unidentified
  misc_feature 1..3978: note = Synthetic
  source 1..3978: mol_type = other DNA
acggcgcatattttaatgaaaaactacaatatcttatttttattgagtatagtggctgctagactggtcttgcactactctacaccacatctcaacaacaagatctgctttagctcaggaactccggagctacacatcaccaactactggatggaagccatggagaaatttcctgttgacaataagaagtgtgagctgggagatggggtcttttcatcagtcacactggatgatatgcctcctttcattaaagcaatgacaacttctgatgaagccctaagatttacgtgtataggatccaacgatagctacatagctgagctgacaacagacggcgatgttattcctggagagagccattctatcatagattgtaagactggcgaaacagaagttgtactgtctcctgttaatgtggcaccagcaggccttaaggtccaagacttggtcgatcatgacagagaggttgatgcagtgttgctacaaagagaccagttgatagaggagttacgtactagactaagagacagcaaaatcagagaagagtcagcaaaagagaagagtaagcagctgactgaggagctagacactatgaagaaagacatagacaaattcaaggggaggacagatgaactaatcttgcacttagaaagtgagaggttggagagtagaatcagtaggaacaagtcacgatggcttgaacatgaactaaaggatgcaaaagaagatgtgataagattacagaatgatatgctcagagaaccgaaaaagaaatccagctctgaaaggacaaccaaagcatccctcaagacggttctgttatatacaacaacgatgatacctctgctactaggacagaccgacgccaccaaggctcttgggaagactagggcgaaatgctcgcatgctagaaacagaataggtagtgggaagaattctattactggtataacatcaccaacttgctcatctatagattatgaattacgctgtgactccctagaaattctgatgatggatgacatatatccctttgcatcatctcacatacataaacaaacaatacttgaagctgtcaatgatgggtttatcgagcaagtcaatgatggggtatgccagttagataacgacaggcccccaaagtgtttcgaaaatagaagtaaaatgagaccacactgcccaaatggcttccgtgcctctcactatctagatgatgagggtaaacttagagggctgtactgtaaagaagactcagaagtcacagaagactgtttgaactgcagaaagctgaagtctaagcctcagaagcagggaagcattcaaatgcaagatgccatgtgccaaaatgtcacagtgccatacaaaggacctttgcctgctccaaggggttattgcaaggttggccttaagaaatacaaaagttgtaagacatcccatactgaggtcaggcatgttccattcatgatactaaagggatcaggaaaagtgtacttggactccttaatcctaaaaaacaatgaggagtctgacatttcttcattcctttgttataagaacaaaggtcaatacaacacaggtgatggagtggaagctcgtgtttataagtctgtcaaaattactgaatgctccaatgttgactcttcaaaaactacaaaatgtacaggagaccatgttttttgtagtaagttcaagtgtgaggagacatatccagaagtgcaatgcattgttgccccaggagcaggccctgtcatggttaggtatgctggaggatgggtcctgccagtatgctttggttacgagaataccatagtggagctggacatacaaactggatcacaactcactgaggaagaatgtgattcctgcgtgtacagctgcgaccctgatggtgtaaggataaggacaactggattcaaggtggatgctgtgatagcttgtgctagtggacattgctcaacctactctcagaagccttccaccaatgtcttttttcagtatcccggaatgtcttatggtgatgggtcaacaattggagttcatctgtcgcatgatgatgacacaatcagctctcatatgatagtgcaatgtgaagcgaaagatccttgtatgatcaacacatgtatcatatgcacacatacgctaattaactaccaatgccacacctttttgagtgcatttgtgtgtaccctgcttttgctgtctatagcactaataatgcttttgataataaagagaaccacaaaaactgtgaaatctttgcccaggatgatgacagcaccaatacattggctaagattgctaattaaatgggtatctaacagagtcaggcaatgtttcagaaggcaagtggagaatataaatgccgaaattggttggagaggccctccacagagggttgttccaatccctcgatatacagggttcatggctattatactatttctgattgtggttgtagatgggtgctcagaaacagtgatctctgactctaaaataactaagtgttcctcagttgggtcagtaacaacctgtattctgactgggtcagtggtcctgcaggctggaacgataggtacagagtcttgtttgatagtgaaaaccccctcaggtcaaaagtctcacatgtcaatcaaaactgtgtcaagtgagcttgtgtgcagagaaggggattcctactggacatcaaattatgttcccaagtgtttaagctcaaggaggtgctactgggttggcgaatgccattcaaccaattgtcaagcatggtccaatgacatggtatcatctgaattcttgaagtttggtaacgaaaccaaattaagtgaaaacaggtgttttgaacaatgtggtgggatttcttgtgggtgttttaatatgaatccttcatgcctgtttgtccactcaaacctggaatcaatatcaagaaaggcactacgagcattttcatgctcagactggtctcacagagtgacgtttgaaatcacagacataaagggcctgaaggaaaaatttaccttatttgacacaggttccaagttcttttcatggggatccgtgagtctaggattagatgcagagtccattacaggatctaattccttctcctttctgcatgatcctagttcaggatttgccctgatagatgaggaattctcaaccaccccaaggtcaggatttgtaggagaagttaggtgttcatctgaactggcagctgtctcagctcataagtcatgcaaatgggcacctgatctcattaagtatagacctgtgacagattatgtagagtgctcctcaaatctgattgacccctttgtgctgtttaaaagaggatttctgccacagtcaaggaacggcaagatgtacactcagtccatagataagaaatcagtgcaagcagtgtctgcccttagtataagggctacgttacggttgttaatggaaggtctagaagttcactttgaagaaagggtagccaactgcaaggctgctatgaggaatattacaggatgctactcgtgcaatgaaggagcaaaaatttgcttaagcatatcaactgatcagaattccagcttatatgcagaatctagctctggtattcacattgcattccctgtttctacaggagtgagtgattactgtagcatagttcactttaatgacccatctgttgaagaaattctgaagtactcgtgtggaggaacagataaggagctacacatttctggaacactattgtcagtagagccccataatgatagaaacaagcagtcatctgggtctgttgttgtgaacccacgtgaggttagctggaatttcttttcttgggtctcaggattgatcaaattcttaggagggccattgaaaactgctatgatagttataggactgattattctgtcctgtattgtgatagcaatcatcatctttgcagcccgtagcggtctcctaagtggactgttttctaaagccaaggctctataa

SEQ ID NO: 10453 - DNA, 2982 bp, unidentified
  misc_feature 1..2982: note = Synthetic
  source 1..2982: mol_type = other DNA
acgcctttcttcaatcacctgatggatgtgacccgtcgcttactagactccagcaacgcaacctggcagagagaccagcctgacacgcaccgattgtcaaggctggatgctcatgtcatgtcaatgttaggggttggttcacacattgatgaagtcagtgtcaatcacagccagcacctccacaactttaggtcctacaattgtgaagagggaaggaggactttaaccatgatggatcccaaatcaggaaagttcaagcgcctgaaatgtaatgaaaaccagactctgtccaaggattgtgcctcttgcatagaaaagaagtcctccatcatgaagagtgagcatctggtctatgacgacgccatttgccaatctgattacagcagtcctgaggcaatgccagaccatgagacacatctttgcaggatcgggccattgcacatccagcattgcactcacgaggctaagagggttcagcatgtctcttggttttggattgatgggaaactgagggtgtatgatgacttctcagtctcctggactgaggggaaattcctgtctctctttgattgcttaaatgaaacatccaaggaccacaactgcaataaagcagtctgtttggagggcagatgttctggagatcttcagttttgcacagaattcacatgctcatatgcaaaggctgactgcaactgcaagagaaaccaggtttctggggtggcagtagtgcataccaagcacggctccttcatgccagagtgtatgggtcagtctctttggtcagtgcgaaagcctttgtctaagagatcagtaacagtgcagcaaccttgcatggattgcgaaagtgactgcaaagtagaccacattttggtgatagtcaggcacttctacccagaccattaccaggcatgtctgggctccacatgtctcactggtcgagcaaaggacaaggaattcaagatcccatttaagatggcagacaggctctcagattcacacttcgagatacgtatctgggataaggagaggtccaacgaatatttcttagaatctaggtgtgagtcagttgatgcctgtgctgccattacatgctggttttgtagagcaaattgggccaacattcactgcttttctaaagagcaggttctaattctagttgcagtgagctccttgtgcattttactgctagctagtgttctgagggctctcaaagtcattgccaccttcacctggaaaataataaagcccttttggtggatcctttccctgttgtgcagaacttgctccaaaagactgaacaaacgggcagagcgactaaaggagagcatccactccctggaagaaggactgaataatgtggatgaaggacccagagagcagaacaaccctgcaagagcagtggcaaggcccaatgttcgacaaaagatgtttaacttgaccagactaagcccagttgttgtaggcatgctgtgtctggcttgcccagttgaaagttgctcagactccatctctgtaacagcctccagtcagaggtgctctactagctcagatggagtgaactcctgttttgtcagcactagctctctgcttcaggtcagtcctaaggggcaagagagctgtctgatcctaaaggggccaactggaacagcagtggactctattaggatcaagaccactgacatcaagctggagtgtgtcaggcgagatctgtattgggtccccagggtaacccataggtgcatagggaccaggcgatgccatctcatgggagcctgcaagggagaggcctgctctgagtttaagataaacgattattctccggagtggggtcatgaagaggagttgatggctcagctaggctggagctactgtgttgagcagtgtggcggagccctttgtcaatgcttcaacatgaggccctcttgcttctacttgaggaaaacattttctcatctatcccaggatgctttcaacatctatgaatgctcagaatggtcataccggataaatgtgcttgtatcgacaaattcaactcactcaaatttaacattaaagcttggtgtcccagactctatccctcatggtctgattagcttgtctagcgtgtcccaaccgccagccatagcatactcagagtgctttggggaggatctacacggcacaaagttccacacagtctgcaacagaaggactgattacactctaggcagaataggggagatacagtgccccaccaaagctgatgccctggcagtctctaagagatgcattagcagcgactccataattttctccaaggtccacaaggattcagtggattgtcaatcatcaatcatagatcccatgacaatcaggaatcggaacaaattgccatccactgtaggttcagtcactttctggccaacagaaaccagtgttgaggcagccatccctgacttggcatctgccaccatgttaatcaggttagatggttataccattcagttcagatctgattccaataagtgtagcccaagattcttatcattatcaggctgttacaactgtgaggctggagcaaagctggaactggaacatgtaacagactttggaacagccttgggaatcctcgaatgcccaagcctaggctacacaacatattatgaggtgaagaacacgcttgaaaagtccataaggacaatgcatttaaacggatcacacgtggaggccaagtgctactttcggtgccctaactctgagagtcagctaactataagaggagaactgatctatcttttcaatgatgacatcagacaccacaatcagaccttgtccccaggcctgagtccgaagtcagggtctggatgggatccttttggttggttcaaagcctcctggttgagagcaatttgggccatcctgggtgggactgtgtctctgataattggagtggtgatcatatacatggtgttcacactctgcttgaaagttaaaaaatcgtga

SEQ ID NO: 10454 - DNA, 4038 bp, unidentified
  source 1..4038: mol_type = other DNA
  misc_feature 1..4038: note = Synthetic
ctggtgcatcaaatgtttgaaataacaatcttgttgatagtccttgccaccttgtttatactggtggttgggaatcttaaacttgagtccaaaatggggaacagccttacatcaacttgcttctcccagaacactgggccagggataattgagagatactgggggtttgagatggccaaaatgccaggctttgacttgcattgccgctttaatgaagaaggtgactccagatacatgacacatgagaatgccatgaaacagattaagattgtcacaacagctccagacaccatgaagttctcctgcagagatgagacagagtctttagggctatccataacaaatgatgggacaaaaaatatgatggggcctgccattatttactgtgataccaaagaatttattaggaatataactacaggtgagcagcctccaagagttgattatgagaagctaaagaagaacgcagaagagaaagatgctactattcagagaaagaccaaagagatggaggaggtgagagccgttctagattccaggatccaaatagcacaccatgagatccagcagaaggagaatgaaatccaaaagctaagaaatgaccttagagatgctattaagaagggccaagagcatgagtcaatgaaactcagagttgaggagtctgatgctagggtgaggggtctgaaggaagagctgaagcaattgacttacaaaatctttgaccaccaagcgacaaaagatgagcttcaacgtgctaaatcagagatgcaatccctgagaaagaagattaaggactttgagtctgttccccaggcaaaaaaaccaagcaacagctctgttgcacttgtaaccacagcagtgttgtcactattaggatcctcaatggctgcttctcctgaagcaggtatgaatgcagctatacacataaataatagaccaggccttgggaagtttgccctgctaacaacaggaactgaggatgagcattgtaaaaagatcgattatggcgtcacctgcagtagatttgaccatttgaagtctctggataggtaccctttcttcaattcacactatcatcacagagcactattagaagcacactatgataacattgtgaaggtgagttctactacctcctgtaatgagacaaaattcaaagatgctgagtgctccaaagaaatcaggaaattggcttacaagtgcccaagaggagtttcagggataatatatgctgactctaaaggggaaattggaggcatctactgtaaggaaaatgaggaattaatggagaactgcatccaatgcaggaaagtgcagaggaagaagccccagaaaggtcttctgatgcagctgcaagatatggtgtgccagccagactcaattgattacactggccccaaacaaattctaaaaggttactgcaagataggaatggttaattacaggcattgtgagcatttcgccagcatggaggaggttgttcctttcgcgatattcaagaacaaagggaagctatacatggatagtatgagaattaggaataaggatgtcctagagaaagagaacttcatttgttatggagcaaaggagaatgcagatgctgattcttcaaatcatgggggcaaagtttcagtgaaggtcacagagtgtaagaatgttgatccatcacaaagcaagatctgctctggtgatagcactttctgttccaagtttgcatgtgacaatgagttgcctgaggtccattgtgaagtggctccgggagctggcccaatcgaggtctattacggaggagtctggatacagcccatgtgcttagggtatgagagggctgtggtgttgagagaaatgccacctccagtcgaaacctcagaagacacttgtgacagctgctactctgagtgcttagacagtcatatacttgtcaggtctaccgggttcatgatatctggtgcagtggcatgctctcacggagcatgcacttcgctaactataatgccttcaactgagataatgatcccttatcctggtatggcgtcatcaattggtggtgacattgggatacacttgtctcatgatgaggttcaagtcagttcacattatagagttcactgtgagcctaaagatccatgtgttgctcactcttgtgtcatttgtgctgagggagtcatcaactaccagtgccacacagccctaagcgcattcgttgttgtaacattggtagtgctagttgtcttgatgtctctaattgtgttgaagaggtgtttagtgttgttcagggtggcacctgccgtcttgctgattcccttttcatggataatcaagctggcatgctggacatctaggaagttgaaattaagtactgaaagaagaatagccagaataaatgaagaaattggatggaggccagaggaagccagggctacacataggatgagagacagagacagaaggcctatacctaggtcagcagtttacctggcaatcctgttccttatcagtgtgacaagcgcatgttcggatcacaccattgcgagctcaaagatagtcaaatgtgttgctaagggttctaaaagtgtttgcactatctcaggactggtcaatgtaaaggcaggtcctattggctctgagacttgtgttactttaaaaggacctgactcagctgacaagaaattcctgaccatcaagaccattgccagtgagttgatctgctcagaaggtcagtcttactggacaagtcagtatggagttgaatgtttaagctcaagaagatgccatggggtcgccgaatgcaaaggtgatgcttgccagaggtggaacaacactcttgtctcaagagaatttcaggggataaccaacaattcagtcatttctgaaaacagatgcatcgaacaatgcggaggggttggctgtgcttgcttcagtgtttatgcctcatgtctatttgtccatgctagactaagagcaacaaagagagaagcaataaaagtcttcaattgcattgactggagccatagactggtccttgaaatcaccgacttcaatgggaaaaaggaaaaagtctcaatgacgggcatgacaacacaattcttcagctggggttccatgactctagccctagattttgagggtataaccggaacaaactcatacagctttctcaggtcttcttcaggagccttctccctggttgatgaggccatgtctatggaacctagaagaggcttcctaggggaaattagatgttcttcagaagcagccgctctcacagctcacaaaagctgtattgtagcacctgacattatccggtacaaaccaatgactgacattgtggattgttccacttctctcattgatccatttgcagtgttcttgcgaggggctttaccacagaccaggaatgggaagacatttagtagctctatagacaaaaagactatacaggcattcacctctggcattgtgcatgcctctatgtctctgagctttgacaactttgaagttgagttcgaagaggagagggtttcttgcctggccagctttgtcaacatcacaggctgctattcttgtaatgagggtgccagagtgtgtatacaggcagcagcagacaaaaacacaacactccacgtacatactttggacaactcactaactatagtgatggatgtttttagtcctaagtccactgactgtagagttgtccacctttctacacctcaagtcaaaatggatgtggtttatagttgcgatggttactacaaggccatgtctattgttggaaccttggtagcaatgaacccttttgatgatagaagacatgaagagacaaattctgttgttgtcaaccctaaaactggcagatgggacttctccaattgggcatctggcttggtagactggcttggggggccactaaggacagcaggcgtaatacttggctatataatactggcaattgtattcttagttgtgctggtgctgtgtgtgccaaaattggtggggttgattagaactgccctgctcaagaaaaagctgtaa

SEQ ID NO: 10455 - DNA, 12 bp, unidentified
  misc_feature 1..12: note = Synthetic
  source 1..12: mol_type = other DNA
ctggtgcattaa

SEQ ID NO: 10456 - DNA, 4080 bp, unidentified
  source 1..4080: mol_type = other DNA
  misc_feature 1..4080: note = Synthetic
atgagtgaaatatttttaatagtcttggtggtagcatcagctttgctgcttgctcttgctgacgtccgactggactccatatcatcagggaaggaggagtcaatctgtttctcacaaaacacaaaggttctctggattgagagctactggggctacgaaatggccaagatgccaggatttgacctttactgtagatacaatgatgacggagactataaattcatgactaatgagaaggccagacagcagattcctcttgtttctggggctccagactcaatgaggttttcctgcggcgacaagaacggggaattttcagtcacactaacaaatgatggaagaaacaacatgatggaaggagctctcataaaatgtggcaccaaggaattcatcaagtctctacctgatagtgtaagtgttcccacgacagaggcttctgtgagcattgtgaatggcacgtgggagaaggagctggagaaagcagaaaatgctagaaagcagggtgctagacttcatgaagaggtcaaggcatctcttgaaggcaagctttctgctttaaaacatgaactagaaaagaaagaaaatgatcttgagagaacaaagagtgaacttgagtccgttagaatgtctattgggaggaagatggaggcagaagataagctacaggatgcacaatacatcatagagcaactgagagagaaggttgcctcactcacatctcgggtggctaactcagagacagacagggaagacctcttaagagcaaagaatgagatgaaggaactaagaaggcaagtgaagacaatggaggatgagactaatgaaatccgcagagccttcatgcaaagacctgaaaccactaaaagctcaccacttattgcgacaacaatgttggcactcctcagcacagctacaattgctggggggactgagccaggtcagagatttaatagcgacccgcacatcaataataggccaggtttaggaagttttaagctgttcgacaatgacagcgatgctacttgctctaggattaattatgggctggtttgtgcaaaatttgactatctgaagtcactgacaagatatccattcttcaactctcacttccatcatagaccaatccttgaggcataccacgatagcatcattacaaaaagtgacaagactttctgtgatagtgctaaattctcctctaaggacccaaaatgcgttaaggaaataagaaggatggcatataaatgtcccaggggagtaccttcaatccactatattgattccgaggggaagattggcagcctgacatgtccaaccgatgaagagttaatggacaactgcatgcactgtagaaaggccttaaagaagccagtgacaaaattttcaatgcagttacaagatgtggtctgccagcctgattcaagtgagtattcaggaccaatggagaatctcaaaggctactgtagaattggcatgaagcaatttaagagttgcgagaagtcaatggagaaagaggaggttgtccccttcatagtcataaagaataagggaaaattatacctgtcgacactgcgattgaggaacagagaggaaatggagaatgacaattttatgtgctatgaagcaaagccaaatgcaggatcagacacaaacacaaatcatggaggaaaacaggctctgaatataaaagagtgtaaggtggtagactcacagaagaccaaaatctgcactggagatgggactttttgctcaaagtatgcatgtgacaatgaaatccctgatgctcactgtgaggttgcacctgggtctggtccacttgaagttatgtatgggggggtgtggataaagccaatgtgtgttggattcgagaaagcaatagtgagaagagaactaccccctgatgtgaacacaaatgaggtagagtgtgatagctgctactcagagtgtagagaggatgggatactggttagatctacagggttcatgatttctgctgcagtagcctgctcacatgggtcttgtgtatcaactcacaatgatgcctccacagagatcttgataccctatcctgggatgtctgcctcagtgggaggtgatataggcatacatttgtcacatgatgacgtacaagtcagttcccactataaggtacactgtgagcccagagatccatgtgtgatgcattcttgtctgatctgcgctgaaggattgataaactatcaatgtcatactgcactgagtgcctttgtggtttgtactgttcttgtgtctgcaagcatgataataatcctgatactgaagaaaatccttaggtgcctcaggattgcccctgctgtcctgctgacacccgctctatggataatcaggttggcaggatggatgggaaggagtataagacgaaagacaggtgagaagattgaaaagctaaacaaagaaatggggtggcaagcgaacactgagctgccagctaggcctactggtgtcaatagagagaggaggccaattccaaggtctgcagtgtatatggcactaatacttgttatcagtccagcttttggctgttctgataacataatagctagctcaaagattgtgaagtgtgttaacagggacagcaaggatgtgtgcaccgtttcaggagttgtgaatgtaaaggcagggcccattggatctgagacatgtgttgtggttagaggacctacagatagcgacaagaagttcctgactatcaagactgtggctagtgaactcacttgtgtaaagggacagtcctactggacttctcaatatggtgtaacttgccttagctccagaaggtgccacctggtggctgaatgtaagaaagacaattgtttggcatggaatgacacaatgatatcagctgagtttgctggaatgaccaacaacactgttataagtgagaataagtgttttgaacaatgtggtggaataggatgtggctgctttaatgtctacccctcctgcctttttgttcattctcaactgaaagctaccaagagagaagccatagaagtgttcagctgtgtggactggaatcatcgattaatacttgaggtttctgatttccaagagaacaaagaaaaagtcataatgtcaggcatgaccacaaaattcacaggttggggctctttaacattagctctggactttgatgcaataactggtacaaattctctgagtttcctgagatcatcatctggagcgttttcccttgttgatgaggctctgtctacggagcctagggcggggtacataggtgaagtcagatgctcttcagaagcagcagcactttctgcccacaagagctgtaaggttgctccagggataatacattataagccaatgaccgacatcatagaatgctcaacatcattaatggatccctttgctattttcctgagaggagcattacctcagacaagaaatgggaagacattcacgagctccatagataagaaaacagtgcaagctttaacatctggggttgttaaggcttcaatgactctgaactttgacaatcatgatattgagtttgaagttagtaaaacaacatgttttgcaagcttcataaatgccacagggtgctactcttgcaacgagggtgcaagaatatgcatacagacagcagctgtgaagaatactaccttatatgtacacaatccagacaatagcttagtattgatcatggaagtcgttgccccacagtctacaagctgcagaaccatccatgtgagcaaaccccagctcaaagaggatgtcgtctacacatgtgatggcacagaaagggctatgaccataacaggtacactcatagcactgaacccttttgatgacagaaaaacagaagcgtctaaatccattgtggttaatccaaagtcaggagactggagcctatggagttggtctagcggattgatgaattggcttggagggccactaaggacagcaggcatcatagtaggttatatcctgctggcaatagcccttgttctaatatttgccgctgtagtccctcgaataagctccatagtcatggcaaccataataaagaaggagaaataa

SEQ ID NO: 10457 - DNA, 60 bp, unidentified; identical to SEQ ID NO: 910
  source 1..60: mol_type = other DNA
  misc_feature 1..60: note = Synthetic

SEQ ID NO: 10458 - DNA, 6291 bp, unidentified
  misc_feature 1..6291: note = Synthetic
  source 1..6291: mol_type = other DNA
atgaatgaactactagctaaacaagccaacctacgtccagggtttacaagtggagctctgatacactatgatgatgagactctacatttgccaatccctgagttctttataaagaagactgttgaaggtattctaattgatctatctcttgaccaattggactctggatcaactgttggctcctctctaatgccaaatgtagacataaaggctgcgttcattcccaacttcatccacaacttcacttttggtcacctttcttctactactgaccagccttttagctccaagttccctgtcataaatgatggatttgatgatcttactcctgatgtcattgtccagtctacagcaggcagctaccatgttgttgagttcaccactttcagaggtagagatgagccagctagaggtgcagcagctctgaagatagccaagtacgagcaagcttgtagaaatagaagtgtagacagaagtgtaggcctatatgccatagctgtgcatcgtggtggaatctggacaaatatgataatgggaaaggaagatgttgatgaactatgctacaggatgagattggcagaagccattgaagcagaaatccagattttgtgtcctgagagcaggatgtgtgacgaagaggctagcaaactagagagggagatgctgggcatagtagcagctataggaatggattgggaaagaacagagagaactttcccatccttcaagaaggccatgttcgacaagttcaagtctgctcctgccgatcaggagtatgtgaaagacatcctagaaaaagtgattagcaaggctcagtctgacctgatttcttcttctttcatcaaggagggaaagccactggctgagcgtctggagatgaatggtagggagtgtgattatgctattagtgctctcatcacagaattgcgcagtaggcacaatctcaggcacacaaatgataataagtccactgttcaactgccaccatggctatttagccgtggtccaccagggaaggacctgcagcctttgaaggggctgatgcctgaaggtgaccacccaatgtgctctatatgggctaaggtctgtgtatctgcaattgaggagaagattgacagaatggatgatgatccagctagtgagtttgagtatgcaatgtctggaactcgaactagggatgatcaaagaagcaggtatcacagagttcgtgttgatctgactcaggatgaggccgagtatgcagcaactcttggagtcaatgggaagaagtataagggccatcaatcagttgttgatgctagagagaggagtaagaggatcttctctcctgaccatgatactagtgatctagaacagtttttgctcaatcaggattatactgactttgaaccagatgttgggctatacgaccctctgcttgaggatatggagctgaggcttgatgctcaggcaatacaccagccaacttacagccaccatgaaggagagaacgagttcctcagcaaccataggaagataatggaatcacctcttggctcttggactcagatggtgagcttaattggagccgaactgtctgcatcagtaaagcaacatgtgaaaccaaactccttcgtagtaaagaggctagtaaattcacctctgtacatgctagtgaagccaacctcctcaaagagccacatctttgtgtcatttgctctaatgaaagaacactggagaggagatctcaagtgttcaacaatattcaagagttatattgatgctgggccaatgttcattacagagtttgtttcctacaagctgagcaaactgaccaatttgtgcaagactaattctttatatgaagctagcttagtattctggatggagagttttggtcaatgctcatgggaagctggtgatttgtgtgagaaaccacactctccagcactaagggaggtggtttacatgactagactatctcttctcactctgttagaggacaaggcaactactgaagagctgcagacactgttgagatacatagtcatggaagggtttgtctctcagccagaattaccaaaaccacacaagatgatttcaaagctacctacaaagctgagatccgagctgcaggtctatctgctgcacagatgtctactgagcatgagtagaatctcgagacaaccattcagactcgcacggtatgatgctcaaattaactggtctggattattcaacccattgtctggctctgaaattagagatattcaccctctcataagtgcatgttacaatggttacttcaagaataaggaagaggaaacagagccatcagccctctcagcaatgtataaaaagataatagagttagaacatctgagacctgagactgatgagtttctagggtggggagaccctaaggagccggcgatgcacgaattcagccgaagctatctcagagaggctatcgatcatgctaaatcttttttaagaaagatctatggtcagaatgtaatggatcagattgagcaggacataatcagagagttaggttccctaactctggagaggctggcaactctaaaagccacaagcaatttcaatgaggactggtatgtttataaggatgtgagggacaagaattacacccgagacaaactaatagtgaagatgtccgaatttgcagcagaaggcaaatccctggccattgaaaagtttgaagcatgtatgagcaaaatagaagaaagaggttcaatgcacatatgtcttttcaaaaaacagcaacatggtgggctgagagagatctatgtgatgggggctgaggagagaattgtgcagagcgtggtagaagccatagcacggagtattggtagattcttctcctctgacacattgtgcaaccctgctaataagatgaagatcccagagagccatggcttaagagccaggaggcactgtcgaggccctgtgtggaccactgcaacctctgatgatgcacgaaagtggaatcaaggccactttgttactaaatttgcattaatgctttgtgaatttacaagtccaaagtggtggcctatcatcgtcaggggctgctctatgttcacaaataaacacatgatgatgaacctcgacttcttgagaatactggacagccatcgcgaactgaatgtggaagatgattttgtgcagactctgtttgaagcataccatggcaatgtgcaggtgccttggctaattgccgggaggacttatctgaaaacatcaactggcatgatgcaaggaattctacactacacttcttctcttctgcataccatccatcaagaattcattagatctttaaccttcaaagtattcaacatgaaggtaaattcagacatgagcaaacagatcgtctgcgacatgatgcaaggctcggatgatagcagcatgttaatcagcttcccctgtgattctgaggagatcctcacaaaatgcaaagtcactgcagcaatttgtttcagaataaagaaactgttgggtgtttatcttgctatatatccatctgaaaagtcaacatccaacacagactttgtgatggagtataactctgagttcttcttccactcacagcatgtcagaccaaccataagatggatagctgcatcatgtagtctgccagaagtcgagactctcgttgccagacaggaagaagcggcaaatctcatgactgctgtttcagaagggggaggatcattctcactggcagcatgtgtgcagcacagccagtgcaccatccactatatgttgatgggaatggggacctcaatgttgtttgaccactacaagaaggcaatattgaagtggaaggatccaggtctaggttacttcctcttagacaatcctatagctgcaggcctgtcaggattccgttacaacctgttcaaagcaataacaaccacaaacttacagaagatatatgcattcttcatgaagaaagtgaagggtactaccggctatcaggaagaggctggtgtaattccagagacatgcagcgttagtcctggcggagccttgattcttagctcatcattaaagtgggggtcgaggaagaagtttcagaaactgagggcaagactcaacatccctgatgactgggttgagcaaatcaacaccatcccccagatcttatatagggctccgcgctctggactggaaattactctaagaatagctgagaaagtgcacagtccgggagtagtctcctcacttagcacaggcaatgctgtcgccaaggttatggcatcagctgtctattttctttctgcaactatctttgaggactcagggagaccagagtttaacttcttagaggattctaaatacagcctactatgcaagctggctgcctatgacggatttaatggagtagatgatatcgagcctgaagacatattgttcctatttccaaatgtggaagaattccatcagctggacaccctaatctacaacaggggtgggctcaacataacccacaggtccagctcaagagaagcaacccaaactagggtggtagtttttgaccaccttcagacatcaagatgctctcctgagaaactggtctctgacaagtggtttggcactcaaaaatgcaagattggcaggacagcaatggagcaggaatggacaaagctcaaagctactgttaaatggctgagagatactcctgcggagacacttgaggcaacaccactacatagccacatacaaataagaaacttctttgctagaatggaaggaagggctagaactgtgcgagtgacaggagcaccagtgaagaaaagatcaggaataagtaagcttgcaatggtaatccgggataatttctgcaagacagcaattttaaacgggatagaagatgaggtgggcttgaccaggtctgtagcggccgaactttctaaacattgcttgttttccgttctaaatggtccgtacacagaagaaacaaagttgagcatggtcatgaacatgttggttgagctaccagatgttttggtcaacccctcagatagaagatcaaggactaacatgattggagtgatgcagcactttgctaggtatgggaagggaaccgtcaagatgttggaggaaataggagccggcacaatcggggcttacgttcgaccacaaaaatcacagaaggtaaatgggaaagtgacctattatggccctggcatctggagagggacaatggatggcatacctgtacagattgaggtagatggtgcacccgggatgccaccacagatgactaaaatactggtcagcagaactagagaaccttgggttcttgggccaagcataagagcctgggcagatgacatgggagtgctaaacaccagggacatgaaagacaaggtcactgaagtagttaagcattggatgttcaacttcaagctctttggctccagtcatgcgtacgggtgcccgctgattgttgcaaaaggtgatctaattgactttagagaaattgatgatcgagatgtgttcctaaaggtaaggggctctgtgatcaacttattcacaaggacaaagggagtgaatagagacctgcacatcctatcatattcaacctcagagaatgacatcagctctagtagcatcctgtcaatagttaatgcacagctggaaaagggggtcccagagatctgtatgcagcctagcagctcttggataaagtgtgaaccactgccacttgaaatgataaggccagtgctagaggttgctgaggggtcacgatcaatactcaagatagattctgagagactaaaagagattataaggatctgcaccgaagcagccatacgatcgaaggttggcactattttcacatttgttcctgtctcatcagaattggcagcacctgtggacatgagcgcaatgattgatctaatgttagaggatgatgattttaatgatttccaagaggtcgtggacaaagtaatggaggatgttgacatcatgaccacctatgagacagatgacttttcttcagtcaatgttcatctctttgggccagcccacttcagagagatctcaaatctagcagccatttcacacccattgatggacagattagtggatgcagccattagccagatgggaaaggcgggagttagaaaactagtagaatcaggacggactggtcataaagatcttgatatatcaagattggtctacagggctttgggcagagatcccacatctattaagacggaagattttgagcttgagctcagctacgaggtcacagatgacatgcttgggtga

SEQ ID NO: 10459 - DNA, 42 bp, unidentified; identical to SEQ ID NO: 885
  misc_feature 1..42: note = Synthetic
  source 1..42: mol_type = other DNA

SEQ ID NO: 10460 - DNA, 783 bp, unidentified
  source 1..783: mol_type = other DNA
  misc_feature 1..783: note = Synthetic
atgaatagtcaatacttgtttgactatcctgtggtaaagttagactctagggtccatagggctttgtctactgtcaactacatggctttcaacaagtttcattactgtgacatttcaacatatgagcactgtgaattcccactggagaagtactctagagggtttggcagaagaggcagcctttctgacttttatctctataaagagttgccagcttcatggggtcctgcatgcaccatcagctctgtcaaaccaattgtttacccatttagagggttggccaatgacctttcacaatctgacatgcaatccttctcagttccaggtcttcaaaacatcagaaaggcactgtcttggccttttgggttccccgacctggaaatctttgagatctgcagtgaagggtacaagagggggctagacaccagaaatcagcttatgtcatacatcctgagaatggctgactccaagtatttagatgagtgtattgtccaagcacataagaagatactctctgaatgcagagctttgggtcttcaggatgagcactttaatggttatgatctattcagagaaatttctacccttgtctgcactagacttatcaatgcagagccatatgactctacgtctagtggatcaggcctggaaataaagtgtatcatcagatcttacaaaataagtgatccatcttcctgtgttggagtttacggatctggattctgggagcctgtgaacgaaccagaggaggacacttatgaagactcagactcagagttttga

SEQ ID NO: 10461 - DNA, 3546 bp, unidentified
  misc_feature 1..3546: note = Synthetic
  source 1..3546: mol_type = other DNA
atggctaacgcactaggagtattagaggggaagatgttctgttctattgggggcagatcattagaagaggatgatgaaggggtccttgctgttgtgcagggcctccaagacagtcagcaagaggaggagataagctgtcatggcactcccaaaggaaagctagtgaagtataaaagacatcctaggaaagcttcaggtaaaaaaggagcagtggactgtgtgtcaggaaaagaactgaaacctcaaaaaaagaggggagatttagcacacatttcggaacacttccaagctgatgaagtgaggagctctagtgtgaatatttcaactacactgaaaactatattggtggctgcactcttaacttctgctttggttaatggagacccgcacattgataataggccaggaaaaggtgattatgcgagggatgcttctagatcaggaaataactgctctccccttaagtatggtgcagcttgcaaggcatggacttatcagaaggatgtgtccacgtatcctttcttcaacaccttcccttacaagtattccttgatagaagccctctcagaagggttcattcagatggatgaacaaaatacatgcaagttgacaacaacaagcccagtgactagtgagagctgcctaaagtcattgcggggaataaagcacacatgcccaccaggatttagatcagccctatttgcacattcaactgggaaagttagagggatcatctgtgacaatcagtatcaagtgactccagactgcaagttctgtcagtcaacagagaacaatgcagaggttaaaaatgaaattgtgattcaagacattgtatgtcaacaaaatggaactgaatacaatggacctatcatcaaaatccctggttactgtggcattgaagatgtcaagtacagagattgctctgacaaagatgtaagctttgagaaagtggcttttgccctaatgaagaacaagaaattgtatttaccatccatggtgctaaagtatgtagatacagtttcagctgatcactttagatgttttagacacaagaaagctcatggagtaacaggcagcaacacagatgcgactgattatgtcagagttaaaccgagggagtgcaagcagttagactctagtaagacaaccaaatgtacaggagatgaagtcttttgcagttattataattgtgataaagaacgttctgatgctttctgctttcatgcaaatggctctggaataattcaagtccagtatgggggaagctggctgcagccctcatgtgtagggtttgaaactgtcatggtaactaagcccagattgtcgcttccattatctgcaaatttgaactgcccttcttgtgttgcgaagtgtcatcagaattccttggaaataaactccaatggatttctgatcacatcagctattgcttgttctcatggagagtgcaagacaaaaactcaaaaaccaagacacagcattataatgcagaagccatcctctttgaagatatctggaggagaagtaggagtacatttgtctacagaaggagaagagccctcatataagctgagcattcactgtgacccaatcaatcaatgtgatgcatattcctgcactttctgctgggagaatgttctcaacttccactgccataccctaatatctagttttgtgttggctttgatgataggctcagtggcctcctgtgccttggctataatggtcaaaatatcaaagggcaccaaaagtgtaattctaaagagcagaaatcctgtactgtgggtcattaagctggttaaatggctctggctccagatctggaaagccttaaacaaaggaatgacgaccctatcaaggaaaataaatgatcaaacagatttagaagttggctccaatcaaagtttcaagaatggcataccactgagagaagtggtcgttcagaaaagaactggaggaacacgaattaagccagtgaactactatctctacggatcaacaattgtcctaggcttgattacaggttcatttagctgcacagaaaatctgattgcttcctctaaaataagttcttgctttattgagtcagggcgacatgtgtgtaaactgtctggggtggttaatttgagagtaggaacaatagggtctgagtcatgcttaattgtgaaaggacccctagatggtcaaacacaagcactcaagattaggactaaatctagtgaactagtctgtcaagaggggcaatctttctggactaatcattttacaccaaagtgttactcttcaagaagatgtcatctggttggagaatgccaagcctcaaactgcttagagtggaatgcttccactgtgtctcaagagtttagatcacagtatgagcctggcatgattgttgaaaatgtctgctttgaacaatgcggaggcattggttgctcttgtttcaatgtgaacccctcctgcctatttgggatgactattctcaaacccacttatgacaaggctataaaagtttttcagtgtgcctcctggactcacagaattactttggagtttgaaggacctggaatcacggcaaaacaagtgtctctaacttctatgtcaacacaagtagctgaatggggaagcataactctatctgttgatgctgattccactatagataacccaaacattagcttcttgaaaacaagagaaggggagtatgctcttatagaagagtcaataaccacttcaccacaaaaaggaagactgggagaaattcgctgccagacagaacaacaagccgcaattggttctccctcttgcctacaggcagataagctagttgattatagacctcaatatgatacactggagtgtatatctaagctaattgatcccagagcaatactaaagcgaaatgggcttccacagtctagagggaagtatctctataccccatccttaggctcagatacagttcaagctgtatctagaaacaccattgaagcaactatgaccttaaccctagacaactatgaggtgtctttcttgtctgaaaaaacagaatgcctagcatcctttgttaacatatcaggctgctactcctgtcatagcggagctagtatttgctttaaagtaaccagcaagactcctgcatccatctacatcagagatgagaaagaaactaagattataagcaagagtatcacagcaggagagaaagttatttgctcagtgttgcactattctaagcccattgttgatgaaatttttgaatacacctgtggttcagaatggaagaagattcaagtccatggaagtttgatcttactgtcattgatagatgatcataaagaaggtggttctaccattgttgttggtccctcttcctctagtttctcagttggagactggaccacaggtcttttgtcctggtttggtgggcctatcaaaactctaaccctcttaataatttatgttgttgcaacaattattgtaatagccttggttgtggcgttaatcaagcttgcattgaagactatgattttaaagaaaaatgtttaa

SEQ ID NO: 10462 - DNA, 12 bp, unidentified
  source 1..12: mol_type = other DNA
  misc_feature 1..12: note = Synthetic
acggtgcattaa

SEQ ID NO: 10463 - DNA, 3594 bp, unidentified
  source 1..3594: mol_type = other DNA
  misc_feature 1..3594: note = Synthetic
atgtatgttttattaacaattctaatctcggttctggtgtgtgaagcggttattagagtgtctctaagctccacaagagaagagacctgctttggtgactccactaacccagagatgattgaaggagcttgggattcactcagagaggaggagatgccggaggagctctcctgttctatatcaggcataagagaggttaagacctcaagccaggagttatacagggcattaaaagccatcattgctgctgatggcttgaacaacatcacctgccatggtaaggatcctgaggacaagatttccctcataaagggtcctcctcacaaaaagcgggtggggatagttcggtgtgagagacgaagagatgctaagcaaatagggagagaaaccatggcagggattgcaatgacagtccttccagccttagcagtttttgctttggcacctgttgtttttgctgaagacccccatctcagaaacagaccagggaaggggcacaactacattgacgggatgactcaggaggatgccacatgcaaacctgtgacatatgctggggcatgtagcagttttgatgtcttgcttgaaaagggaaaatttccccttttccagtcgtatgctcatcatagaactctactagaggcagttcacgacaccatcattgcaaaggctgatccacctagctgtgaccttctgagtgctcatgggaacccctgcatgaaagagaaactcgtgatgaagacacactgtccaaatgactaccagtcagctcattacctcaacaatgacgggaaaatggcttcagtcaagtgccctcctaagtatgagctcactgaggactgcaacttttgtaggcagatgacaggtgctagcctgaagaaggggtcttatcctctccaagacttgttttgtcagtcaagtgaggatgatggatcaaaattaaaaacaaaaatgaaaggggtctgcgaagtgggggttcaagcactcaaaaagtgtgatggccaactcagcactgcacatgaggttgtgccctttgcagtgtttaagaactcaaagaaggtttatcttgataagcttgaccttaagactgaggagaatctgctaccagactcatttgtctgtttcgagcataagggacagtacaaaggaacaatggactctggtcagactaagagggagctcaaaagctttgatatctctcagtgccccaagattggaggacatggtagtaagaagtgcactggggacgcagcattttgctctgcttatgagtgcactgctcagtacgccaatgcctattgttcacatgctaatgggtcagggattgtgcagatacaagtatcaggggtctggaagaagcctttatgtgtagggtatgagagagtggttgtgaagagagaactctctgccaagcccatccagagagttgagccttgcacaacttgtataaccaaatgtgagcctcatggattggttgtccgatcaacagggttcaagatatcatcagcagttgcttgtgctagcggagtttgcgtcacaggatcgcagagtccttccaccgagattacactcaagtatccagggatatcccagtcttctgggggggacataggggttcacatggcacacgatgatcagtcagttagctccaaaatagtagctcactgccctccccaggacccgtgcttagtgcatgactgcatagtgtgtgctcatggcctgataaattaccagtgtcacactgctctcagtgcctttgttgttgtgtttgtattcagttctattgcaataatttgtttagctattctttatagggtgcttaagtgcctgaagattgccccaaggaaagttctgaatccactaatgtggatcacagccttcatcagatggatatataagaagatggttgccagagtggcagacaacattaatcaagtgaacagggaaataggatggatggaaggaggtcagttggttctagggaaccctgcccctattcctcgtcatgccccaatcccacgttatagcacatacctgatgttattattgattgtctcatatgcatcagcatgttcagaactgattcaggcaagctccagaatcaccacttgctctacagagggtgttaacaccaagtgtagactgtctggcacagcattgatcagagcagggtcagttggggcagaggcttgtttgatgttgaagggggtcaaggaagatcaaaccaagttcttaaagataaaaactgtctcaagtgagctatcatgcagggagggccagagttattggactgggtcctttagccctaaatgtttgagctcaaggagatgccaccttgtcggggaatgccatgtgaataggtgtctgtcttggagggacaatgaaacttcagcagagttttcatttgttggggaaagcacgaccatgcgagagaataagtgttttgagcaatgtggaggatgggggtgtgggtgtttcaatgtgaacccatcttgcttatttgtgcacacgtatctgcagtcagttagaaaagaggcccttagagtttttaactgtatcgactgggtgcataaactcactctagagatcacagactttgatggctctgtttcaacaatagacttgggagcatcatctagccgtttcacaaactggggttcagttagcctctcactggacgcagagggcatttcaggctcaaatagcttttctttcattgagagcccaggcaaagggtatgcaattgttgatgagccattctcagaaattcctcggcaagggttcttgggggagatcaggtgcaattcagagtcctcagtcctgagtgctcatgaatcatgccttagggcaccaaaccttatctcatacaagcccatgatagatcaattggagtgcacaacaaatctgattgatccctttgttgtctttgagaggggttctctgccacagacaaggaatgacaaaacctttgcagcttcaaaaggaaatagaggtgttcaagctttctctaagggctctgtacaagctgatctaactctgatgtttgacaattttgaggtggactttgtgggagcagccgtatcttgtgatgccgccttcttaaatttgacaggttgctattcttgcaatgcaggggccagggtctgcctgtctatcacatccacaggaactggatctctctctgcccacaataaggatgggtctctgcatatagtccttccatcagagaatggaacaaaagaccagtgtcagatactacacttcactgtgcctgaagtagaggaggagtttatgtactcttgtgatggagatgagcggcctctgttggtgaaggggaccctgatagccattgatccatttgatgataggcgggaagcagggggggaatcaacagttgtgaatccaaaatctggatcttggaatttctttgactggttttctggactcatgagttggtttggagggcctcttaaaactatactcctcatttgcctgtatgttgcattatcaattgggctctttttcctccttatatatcttggaagaacaggcctctctaaaatgtggcttgctgccactaagaaggcctcatag

SEQ ID NO: 10464 - DNA, 84 bp, unidentified; identical to SEQ ID NO: 918
  source 1..84: mol_type = other DNA
  misc_feature 1..84: note = Synthetic

SEQ ID NO: 10465 - DNA, 96 bp, unidentified; identical to SEQ ID NO: 919
  source 1..96: mol_type = other DNA
  misc_feature 1..96: note = Synthetic

SEQ ID NO: 10466 - DNA, 42 bp, unidentified
  misc_feature 1..42: note = Synthetic
  source 1..42: mol_type = other DNA
ctggaatcgaccgtgcacaagtggaaccaaaacatgaattaa

SEQ ID NO: 10467 - DNA, 42 bp, unidentified; identical to SEQ ID NO: 10466
  source 1..42: mol_type = other DNA
  misc_feature 1..42: note = Synthetic

SEQ ID NO: 10468 - DNA, 51 bp, unidentified; identical to SEQ ID NO: 922
  source 1..51: mol_type = other DNA
  misc_feature 1..51: note = Synthetic

SEQ ID NO: 10469 - DNA, 2676 bp, unidentified
  source 1..2676: mol_type = other DNA
  misc_feature 1..2676: note = Synthetic
atcggtgctgagacaatggaggcagccttgcttgtgtgtcagtacaccatccagagccttatccaactcacgcgtgatgatcctggttttttcaatgttgagattctggaattcccattttacccagcgtgcaatgtttgcacggcagatgtcaatgcaactatcaatttcgatgtcgggggcaaaaagcataaacttaatcttgactttggcctgctgacaccccatacaaaggctgtctaccaacctcgaggtgcatttggtggctcagaaaatgccaccaatctctttctactggagctccttggtgcaggagaattggctctaactatgcggtctaagaagcttccaattaacatcaccaccggagaggagcaacaagtaagcctggaatctgtagatgtctactttcaagatgtgtttggcaccatgtggtgccaccatgcagaaatgcaaaacccagtatacctaataccagaaacagtgccatacataaagtgggataactgtaattctaccaatataacggcagtagtaagggcacaggggctggatgtcacgctacccttaagtttgccaacatcagctcaagactcgaatttcagcgtaaaaacagaaatgctcggtaatgagatagatattgagtgtattatggaggatggcgaaatttcacaagttctgcccggagacaacaaatttaacatcacctgcagtggatacgagagccatgttcccagcggcggaattctcacatcaacgagtcccgtggccaccccaatacctggtacagggtatgcatacagcctgcgtctgacaccacgtccagtgtcacgatttcttggcaataacagtatactgtacgtgttttactctgggaatggaccgaaggcgagcgggggagattactgcattcagtccaacattgtgttctctgatgagattccagcttcacaggacatgccgacaaacaccacagacatcacatatgtgggtgacaatgctacctattcagtgccaatggtcacttctgaggacgcaaactcgccaaatgttacagtgactgccttttgggcctggccaaacaacactgaaactgactttaagtgcaaatggactctcacctcggggacaccttcgggttgtgaaaatatttctggtgcatttgcgagcaatcggacatttgacattactgtctcgggtcttggcacggcccccaagacactcattatcacacgaacggctaccaatgccaccacaacaacccacaaggttatattctccaaggcacccgagagcaccaccacctcccctaccttgaatacaactggatttgctgctcccaatacaacgacaggtctacccagctctactcacgtgcctaccaacctcaccgcacctgcaagcacaggccccactgtatccaccgcggatgtcaccagcccaacaccagccggcacaacgtcaggcgcatcaccggtgacaccaagtccatctccacgggacaacggcacagaaagtaaggcccccgacatgaccagccccacctcagcagtgactaccccaaccccaaatgccaccagccccaccccagcagtgactaccccaaccccaaatgccaccagccccaccttgggaaaaacaagtcccacctcagcagtgactaccccaaccccaaatgccaccagccccaccccagcagtgactaccccaaccccaaatgccaccatccccaccttgggaaaaacaagtcccacctcagcagtgactaccccaaccccaaatgccaccagccctaccgtgggagaaacaagtccacaggcaaataccaccaaccacacattaggaggaacaagttccaccccagtagttaccagcccaccaaaaaatgcaaccagtgctgttaccacaggccaacataacataacttcaagttcaacctcttccatgtcactgagacccagttcaatctcagagacactcagcccctccaccagtgacaattcaacgtcacatatgcctttactaacctccgctcacccaacaggtggtgaaaatataacacaggtgacaccagcctctaccagcacacatcatgtgtccaccagttcgccagcgccccgcccaggcaccaccagccaagcgtcaggccctggaaacagttccacatccacaaaaccgggggaggttaatgtcaccaaaggcacgccccccaaaaatgcaacgtcgccccaggcccccagtggccaaaagacggcggttcccacggtcacctcaacaggtggaaaggccaattctaccaccggtggaaagcacaccacaggacatggagcccggacaagtacagagcccaccacagattacggcggtgattcaactacgccaagaacgagatacaatgcgaccacctatctacctcccagcacttctagcaaactgcggccccgctggacttttacgagcccaccggttaccacagcccaagccaccgtgcctgtcccgccaacgtcccagcccagattctcaaacctctccatgctagtactgcagtgggcctctctggctgtgctgacccttctgctgctgctggtcatggcggactgcgccttcaggcgtaacttgtcgacatcccatacctacaccaccccaccatatgatgacgccgagacctatgtataa

SEQ ID NO: 10470 - DNA, 93 bp, unidentified; identical to SEQ ID NO: 925
  misc_feature 1..93: note = Synthetic
  source 1..93: mol_type = other DNA

SEQ ID NO: 10471 - DNA, 93 bp, unidentified; identical to SEQ ID NO: 925
  misc_feature 1..93: note = Synthetic
  source 1..93: mol_type = other DNA

SEQ ID NO: 10472 - DNA, 93 bp, unidentified; identical to SEQ ID NO: 925
  source 1..93: mol_type = other DNA
  misc_feature 1..93: note = Synthetic

SEQ ID NO: 10473 - DNA, 21 bp, unidentified
  source 1..21: mol_type = other DNA
  misc_feature 1..21: note = Synthetic
atgcgaacccgtacccagtaa

SEQ ID NO: 10474 - DNA, 21 bp, unidentified
  source 1..21: mol_type = other DNA
  misc_feature 1..21: note = Synthetic
atgcgaacccgtacccagtaa

SEQ ID NO: 10475 - DNA, 204 bp, unidentified
  source 1..204: mol_type = other DNA
  misc_feature 1..204: note = Synthetic
atacctttaactatatcgatgtggaaattaatctgtatccagttaacgaccactaccggtctcagcgaatccatctcaacgtcggaactaactattactatgaatcataaagactgtaatcccgtatttcgtgaggaatacttctccgtccttaataaggtagcaacttcaggtttctttacaggagaaaggtgtgcactctga

SEQ ID NO: 10476 - DNA, 204 bp, unidentified; identical to SEQ ID NO: 10475
  source 1..204: mol_type = other DNA
  misc_feature 1..204: note = Synthetic

SEQ ID NO: 10477 - DNA, 69 bp, unidentified; identical to SEQ ID NO: 929
  misc_feature 1..69: note = Synthetic
  source 1..69: mol_type = other DNA

SEQ ID NO: 10478 - DNA, 3222 bp, unidentified
  misc_feature 1..3222: note = Synthetic
  source 1..3222: mol_type = other DNA
atgatgaaagtcatctggttctcctctctgatctgcttagtcattcaatgcagtggggattcgggcccaatcatctgcgcaggacccatccactcaaacaagagtgctggcataccccacctgcttggttactctgagaagatttgtcagatagatcggctgatacatgtttcgtcatggctcaggaaccactcgcaatttcaaggctacgttgggcagcgaggtggacgctctcaggttagctactacccagctgagaattcttactcgaggtggagtggacttctaagcccctgtgatgctgattggcttgggatgcttgtcgtgaagaaggctaaggagtctgatatgatagttcctgggccttcatacaaggggaaagtcttttttgaacggccaacttttgatggatacgtaggctggggctgtggcagtgggaagtctaggactgagtcaggagagctctgcagttcagactcagggacaagttctggtcttctgccctcggatagggttctctggataggtgatgttgcttgtcagcctatgacacccatccctgaggagacatttctggagctgaagagttttagccaaagtgaattcccagacatatgtaaaattgatggcattgtgttcaaccagtgtgagggtgagagtctaccccagccctttgatgttgcatggatggatgttggccactctcataagatcatcatgagggagcacaagaccaaatgggtacaagagagctcatccaaggattttgtgtgctacaaggaagggactggaccttgttctgaatcagaagaaaaggcttgtaagaccagtggatcatgcagaggggacatgcagttttgcaaggtggcaggttgcgaacatggagaggaggcatctgaggccaagtgtagatgctcacttgtgcacaagcctggggaagtcgttgtgtcatatggagggacgcgtgtcagaccaaagtgctacggtttctccagaatgatggcaacactggaggtgaacccaccagagcaaaggattggtcaatgcactggctgccatctagaatgcataaatgggggtgtgaggctaatcactctaaccagtgagctcaggtcagctactgtctgtgcttcccacttttgcagttctgcctcaagtggtaagaaaagcacggagattcatttccactcaggatcattggttgggaaaacagctatccatgtcaaaggggcattggtagatggaactgaattcacatttgagggtagttgcatgttcccagatggatgtgatgcagtggactgcacattctgtcgtgagtttctaaaaaatcctcagtgctaccctgcaaagaagtggctgttcatcattattgtcatcctccttggatatgcaggcctcatgttactcaccaatgtccttaaggcaattggggtctggggatcatgggtaatagctccagtgaagctaatgtttgccatcataaagaaactaatgagaactgtgagctgcttggtggggaaattgatggataggggaaggcaagtgatccatgaggaaataggggagaatggggagggcaaccaagatgatgttaggattgagatggcaagacccagaagggtaaggcattggatgtactcacctgtcatcctgaccattctagcaatagggcttgcagagggctgtgatgagatggtccatgctgattctaaacttgtttcatgcagacaagggagcggaaacatgaaggaatgcataacaactgggagggcgcttcttcctgcggtgaacccaggacaagaggcatgtctgcacttcacagcacctgggagtccggactcaaaatgtctcaaaattaaggttaagaggatcaacctaaaatgtaagaagtcatcatcatattttgttcctgatgcccggtccaggtgtacatcagtgaggagatgtcgttgggcgggagactgccagtctgggtgcccccctcatttcacatccaactccttttctgatgattgggcaggtaagatggacagggctggtcttggattcagtggctgctctgatggatgtggaggagcagcctgcggctgctttaatgcggccccttcatgcatcttctggaggaaatgggtggagaatccacatgggatcatctggaaagtgtctccatgcgccgcatgggtcccatcagcagttatagagctaacaatgccctcaggtgaggtgaggacattccaccccatgagcggcatccccacacaggtcttcaagggtgtgagtgtaacttacttgggctcagatatggaggtgtctggcttgactgacctgtgtgagatagaagagctcaagtccaaaaagctggcattagctccctgcaaccaggctggcatgggggttgtaggcaaggttggagagatacagtgcagtagcgaggagagtgcccgtaccataaaaaaagatgggtgcatatggaacgcagacctcgtgggtatagagctacgagtggatgacgctgtgtgctactctaagattactagtgtggaggcagttgcaaactactctgccatacccaccactattggggggctgaggtttgagagaagccatgacagccagggtaaaatatctggtagccccctggacatcacagctataagaggatccttttctgttaattatagaggccttcgattaagtctctcagaaattactgctacttgcacaggggaggtgacaaatgtgagtgggtgctattcctgcatgacaggtgccaaagtctccatcaaattgcatagcagcaaaaatagcactgcccatgttagatgcaaaggggatgagactgcattcagtgtcttggagggagtccatagctacattgtccgcctcagctttgaccatgcagtagtcgatgagcaatgccagctgaactgtgggggacatgagagtcaagtgactcttaaaggcaacctcatcttcctggatgtcccaaaatttgtggatggcagctacatgcagacatatcacagtactgtgccaacaggggcaaatatcccaagccctacagattggctgaatgccttgtttggcaatgggctgagtaggtggatcctgggggtgataggggttctactggggggattggctctctttttcttgatcatgtttttgctcaagctgggaacaaaacaggtatttcgatcgaggacgaagctggcttag

SEQ ID NO: 10479 - DNA, 15 bp, unidentified
  misc_feature 1..15: note = Synthetic
  source 1..15: mol_type = other DNA
acggctatacattaa

SEQ ID NO: 10480 - DNA, 3231 bp, unidentified
  misc_feature 1..3231: note = Synthetic
  source 1..3231: mol_type = other DNA
atgattgtcccgattgtcctgtttctcacgctctgtccgtccgaactcagtgcctggggctccccaggagaccctattgtttgtggtgtgaggactgaaacaaacaaatccattcagattgagtggaaggagggaagatcagagaagctatgccagattgacaggcttgggcatgtcacaagctggttaagaaaccactcatctttccaggggcttattggtcaggtgaaggggagaccaagtgtttcctacttcccggaaggggcttcttacccaaggtggagcggcctattaagcccatgtgatgctgaatggctgggactgatagcagtgagcaaggctggagacacagacatgattgtcccaggcccaacttacaaagggaaaatctttgttgagagaccaacatacaacggttacaaaggctggggttgtgcagatggaaagtcactaagccactcaggcacatattgtgaaactgacagctcagtgagttctggtttaattcagggagatagggttctctgggttggggaagtagtctgtcagagagggacccctgtgccagaagatgtatttagtgaactggttagcttgagtcaaagtgagttcccagatgtgtgcaagattgatggtgttgcactgaaccagtgtgagcaggagagcatcccccagccactggacgttgcatggattgatgttggaaggtctcataaggtactgatgagagaacacaaaactaaatgggtccaagagagctcagcaaaggactttgtgtgtttcaaggtgggtcaggggccatgttcgaaacaagaggaagatgactgcatgagtaagggcaactgccatggggatgaggttttctgcaggatggcaggatgctctgcccgtatgcaagataatcaagaaggctgcaggtgcgaactgcttcaaaaacctggagaaatcattgtgaattatggaggcgtctctgtgagaccaacctgttatggattctccagaatgatggcaacattggaagttcacaaacctgatagagaattaacagggtgcacgggttgtcacctagagtgcatagagggaggagttaaaattgtaacgcttacaagcgagctgagaagtgcaacagtttgtgcttcacatttttgtgcatctgcaaaggggggctcaaagacaactgacatactcttccacactggtgctctcgttggacccaattccattagaataactggtcagttgttagatgggagcaagttctcctttgatgggcactgcatattcccagatgggtgcatggctcttgactgcaccttctgtaaagagttcctgagaaacccgcaatgttaccctgtaaagaaatggctcttcctggtggtagttataatgtgctgctattgtgccctgatgctgcttactaacatactgagagctataggtgtttgggggacatgggtttttgctccaataaagttggctctagcattagggttgaggcttgccaaactgtcaaagaaggggctggttgctgtggttacaaggggccaaatgatcgtgaatgatgagctgcaccaggttcgagtggagagaggtgagcaaaatgagggaagacaaggttatggcccaagaggccccatccgtcactggctatactcacctgccctcattctcattctcaccacttcaatttgctctggatgtgatgagcttgttcatgctgagagtaaatccatcacatgcaagtctgcatctgggaatgagaaggagtgctcagtgacaggcagagctttgctcccagctgtcaatccagggcaggaggcctgcttgcactttagcgtgccaggaagcccagactccaagtgccttaagatcaaagtgaaatcaataaatctcagatgtaagcaagcctcttcatattatgttcctgaagcaaaggcaagatgtacatctgtcagaaggtgcaggtgggcaggtgactgtcaatctgggtgtccaacatatttcagctcaaactcattctcagatgattgggcaaacaggatggacagggctgggctcgggatgagtgggtgctcagatgggtgtggtggagctgcatgtgggtgttttaatgcagcgccatcctgcatcttttggagaaagtgggtggagaacccatccaatcgtgtctggaaggtgtcaccttgtgcatcatgggtgctagctgcaaccattgagttgactttgccatcaggagaggttaagactctagagcctgtcacagggcaagcaactcagatgttcaagggtgttgcaatcacatatctgggatcatccattgagattgttggcatgaccaggctatgtgagatgaaagagatggggactgggataatggcactggccccctgcaatgatccagggcacgccataatgggaaatgtgggtgagatccaatgcagtagtatagaaagcgcaaagcacatcaggtctgatgggtgcatttggaatgctgacctagttggaatagaattgagggttgatgatgctgtgtgtttctcgaaactcactagtgttgaggcagttgcaaatttttcaaaaatcccggcaacaatttctggggttcgctttgatcaagggaatcatggagaatcacgtatctatggtagcccattagatatcacgagggttagtggggaattctcagtgtcattcagagggatgaggctcaaactatctgagatatcagcaagctgcacaggtgagataacaaacgtctctggttgttactcctgcatgactggggcctcagtcagcataaaattacatagcagtaagaacacaacaggtcatcttaagtgtgattcagatgagactgcattcagtgtcatggagggaacacacacatataggcctcacatgagctttgataaagcagtaatagatgaggagtgtgtgctaaactgtggtggccactcatcaaaactgttgcttaaagggagccttgtttttatggacgtgccaaggtttgttgatggaagttatgtccaaacatatcacagcaaggtgcccgctgggggaagggtcccaaatccggtagactggctcaacgcactgtttggagatggcataacacgatggattcttgggattataggggttctgctggcatgtgtcatgctatttgtggtggtggttgccatcactaggcgattgatcaagggactgactcaaagggcgaaggtggcatga

SEQ ID NO: 10481 - DNA, 1032 bp, unidentified
  source 1..1032: mol_type = other DNA
  misc_feature 1..1032: note = Synthetic
aagaaaagaatcatcatgtgccgccgggagtcgctccgaactctgccgtggctgttctgggtgctgttgagctgcccgcgactcctcgaatattcttcctcttcgttccccttcgccaccgctgacatcgccgaaaagatgtgggccgagaactatgagaccacgtcgccggcgccggtgttggtcgccgagggagagcaagttaccatcccctgcacggtcatgacacactcctggcccatggtttccattcgcgcacgtttctgtcgttcccacgacggcagcgacgagctcatcctggacgccgtcaaaggccataggctgatgaatggacttcaataccgcctgccgtacgccacttggaatttctcgcagttgcatctcggccaaatattctcgctgactttcaacgtatcgacggacacggccggcatgtacgaatgcgtgctgcgcaactatagccacggcctcatcatgcaacgcttcgtaattctgacgcaactggagacgctcagccggcccgacgaaccttgctgcacgccggcgttaggtcgctactcgctgggagaccagatctggtcgccgacgccctggcgtctacggaatcacgactgcgggatgtaccgcggttttcaacgcaactacttctatatcggccgcgccgacgccgaggattgctggaaacccgcatgtccggacgaggaacccgaccgctgttggacagtgatacagcgttaccggctccccggcgactgctaccgttcgcagccacacccgccgaaatttttaccggtgacgccagcaccgccggccgacatagacaccgggatgtctccctgggccactcggggaatcgcggcatttttgggattttggagtattttcaccgtatgtttcctatgctacctgtgttacctgcagtgctgtggacgctggtgccccacgccgggaaggggacgacgaggcggtgagggctatcgacgcctaccgacttacgatagttaccccggtgttaaaaagatgaagaggtga

SEQ ID NO: 10482 - DNA, 756 bp, unidentified
  misc_feature 1..756: note = Synthetic
  source 1..756: mol_type = other DNA
atggcagaagaacaagcataccatgtcaacaaggggctggaatgtatcaagtccctcaaagcctctcccccggatctatccaccatcagagacaccattgagagctggagagaggggctcagcccctcgggccgtgcaacaccgaaccctgatacgtccgagggagatcatcagagtatcaaccaatcatgctcaccagcaatcggaccaaacaaagtctacttgtctcctggagataatctcggatttagagagatcactggcaacgactgtgaggctgggctcggaggagtccaggggaaaagatccaactctcaagtacagcgttactatgtttatagccacgggggtgaagagattgaaggactcgaggatgctgactctctcgtggttcaagcagatcctccagttgctaacgtcttcaatggaggagaggatggatctgacgacagcgatgtggactctggcccagatgatcccagcagagatactctatatgaccggggatctgttgccggcaatgatgtcgctaggtccacagatgtcgaaaaactagaaggtgctgatattcaagaggttcttaactcccagaaaggcaaaggaggaagattccaaggcgggaagaccttacgagtcccggaaatacccgatgtcaagcactccagaccatcagcccaatcaattaaaaagggcacagacgggaactcagtctcatctggaacggtgacagagtgtttatcgataagtggtgcaacc

SEQ ID NO: 10483 - DNA, 1671 bp, unidentified
  source 1..1671: mol_type = other DNA
  misc_feature 1..1671: note = Synthetic
ctgcaaacaagcaccaaaacagaggtcaaaagacaaagagcaccagatatgaccatcacaaccacaatcatagccatattactaatacccccatcattttgtcaaatagacataacaaaactgcaacgtgtaggtgtgttagtcaacaatcctaaaggcatgaagatttcacaaaatttcgaaacgagatacctgatattaagtttgatacccaaaatagagaattcacactcatgtggggatcaacagataaaccaatacaagaagttattggatagattgataattcctctatatgatggattaaaattacaaaaagatgtaatagtagtaagtcatgaaacccacaacaatactaatcttaggacaaaacgattctttggagagataattgggacaattgcgatagggatagccacttcagcacaaatcaccgcagcagtcgctcttgtcgaagctaaacaggcaaagtcagacatagaaaaactcaaagaggctataagagacacaaacaaggcagtacaatcgattcaaagttctgtaggtaacctaattgttgcagttaaatcagttcaagactatgtcaacaatgaaattataccttcaatcacaagattaggctgtgaagcagcagggttacaattgggaattgcattgacacaacattactcagaattaacaaatatatttggtgataatataggaacactgaaagaaaaagggataaaattacaagggatagcatcattatatcacacaaacataacggaaatatttactacttcaacagttgaccaatatgatatttatgacctattattcactgagtcaatcaagatgagagtgatagatgttgatttgagtgattactcaattactcttcaagttagacttcctttattaactaaactatcaaatactcaaatttataaagtagattctatatcatacaacatccagggcaaagagtggtatattcctcttcccaatcacatcatgacaaaaggggcttttctaggtggtgctgatattaaagaatgcatagaggcattcagcagttatatatgtccttctgatccaggttacatattaaatcacgagatagagaattgtttatcagggaacataacacagtgtcctaagactgttgttacatcagatgtggtaccacgatacgcgtttgtgaatggtggattaattgcaaactgcataacaactacatgtacatgcaatggaattgacaatagaattaatcaatcacctgatcaaggaattaagatcataacacataaagaatgccaggtaataggtataaacggaatgttattcaatactaatagagaagggacattagcaacttatacatttgatgacatcatattaaataactctgttgcacttaatccaattgatatatctatggaactcaacaaggcaaaactagaattagaagaatcgaaggaatggataaagaaatcaaatcaaaagttagattccgttggaagttggtatcaatctagtgcaacaatcaccataatcatagtgatgataataattctagttataatcaatataacaattattgtagtcataatcaaattccatagaattcaggggaaagatcaaaacgacaaaaacagtgagccgtatatactgacaaatagacaataa

SEQ ID NO: 10484 - DNA, 738 bp, unidentified
  misc_feature 1..738: note = Synthetic
  source 1..738: mol_type = other DNA
atgactgactggtctgcaatagctgttgagattggcaacgagccactggatgttccagctttggtcgagtttgcaaaggagatagcttatgagggcctggatcctgctgtgatctttgggctgcttcgtgagagggggggtgagaactggaggaatgatgtgaagtacatcattgtatttgctctcactagagggaacaagatagtgaaagcatgtggcaagatgtctaagaaaggcgctgagaggatgacaaacctggctagagtctatgagctgaaggagaatgctgttgacagaatggctgtgacaccagtgagagttgcccagtgcctgccaacctggacctgtgctgctgcagcagcaatcaaggagtacctccctgttgggccagcaatcatgcacaacaagatccaaggttatccactggaaatgatgtgcatggcctttggctcattgatcccacaggcagatgtctcaattgaagtcataaaggacttcatggatgcctactccctttggcaagacacatttgctcgaacaatcaatgtggaccaaaggaagatgacaaaggcagaggtgtatgccaaattcagagaccctctgcatgcagctgtcaattccctcttcttcccaaatgccaccaggatcagctggctgcaggccaagggcttgctcacagcaaccaaggaagcatccggctcagtgaaggctgcagctgctgcttacagaaacatgtaa

SEQ ID NO: 10485 - DNA, 942 bp, unidentified
  misc_feature 1..942: note = Synthetic
  source 1..942: mol_type = other DNA
atggacgacagtagatctatacagttcagactgtctggtgaggtttcccctggatccctgatcattggaggatactggaggatgtcagttgctaacatccgaatacgggacgtccacacattgtatcctccagtgccccgtgagcttgctgatcttttccaagggactgcagcaatacagactctcttcctcgatggtggccatatggtgagatctttgcccagaccactttacttgttgggcacaatggaagagattctgccaaaagggaggccaatgactaaacaggagagaagctctttgaggtggcctcaaaatgtagcttcagtctcttggatctctctggcccttaaggtctacgggaatggcacacctctagagagatgtttctcctggaaggctctggtgaaacttttgatcaggtcaactcctgagtcatgcagagagagcgcaattgctgatagactctatgatctggaccaaaaggccaacattagggctcagagactaggtgtttttagtgcccttagtggaacccccattctaatgaaagtgggctttcttcaggcattgtcttacttaaggatggcggcaaaagacctagaacttctcgggatttccaattctgggctagtggatgtgcaagtcctccaggcattaagctggttttacccagtcaagctgcctagacccatcaggaagtcagttgatgattacatcaggattgaggccagccttggctcgaatactaggatattgctgctggaaacttttgactcaagagatcgcaagaaggtcaacaagggccctccttttgatgaggccacgcatctaagcaaattgagttgcgaagaatccatcaattacttccttgagacacaggagacattcagacttcattacttttgcaccaaattcacttcagactggccaactccctag

SEQ ID NO: 10486 - DNA, 15 bp, unidentified
  source 1..15: mol_type = other DNA
  misc_feature 1..15: note = Synthetic
attcccgtgtattaa

SEQ ID NO: 10487 - DNA, 762 bp, unidentified
  source 1..762: mol_type = other DNA
  misc_feature 1..762: note = Synthetic
atgtcagacgagaattatcgcgatattgctcttgcttttcttgatgagtctgcagattctgggaccatcaatgcatgggtgaatgagtttgcttaccaagggtttgatccaaagcgcattgttcagttggtcaaggagagaggaacggcaaagggcagggactggaagaaagatgtgaagatgatgattgtgctgaaccttgtcaggggaaacaagccagaggccatgatgaagaagatgtcagagaagggtgcttctattgtggccaacctgatttcagtctaccagttgaaagaagggaaccctggcagggacaccatcactctgtcaagggtgtcagccgcatttgttccgtggactgttcaggcactacgtgtcctgtcagaatccctgcccgtgtctgggaccactatggatgccattgctggtgtaacctacccaagagccatgatgcaccctagctttgctgggatcattgatctggaccttccgaatggagctggagccactattgctgatgctcatgggctgttcatgattgagttctcaaagaccataaatccatctctgagaacaaaacaggctaatgaagtggctgccacatttgaaaagcccaatatggccgccatgagtggacgattcttcaccagagaagataagaagaagctgctcatagcagtggggatcattgatgaggatcttgttctggcgtctgcagtagtgaggagtgctgagaagtatcgcgccaaggttggcaagtga

SEQ ID NO: 10488 - DNA, 18 bp, unidentified
  misc_feature 1..18: note = Synthetic
  source 1..18: mol_type = other DNA
atggaattccatacttaa

SEQ ID NO: 10489 - DNA, 18 bp, unidentified
  misc_feature 1..18: note = Synthetic
  source 1..18: mol_type = other DNA
atggaattccatacttaa

SEQ ID NO: 10490 - DNA, 39 bp, unidentified; identical to SEQ ID NO: 325
  source 1..39: mol_type = other DNA
  misc_feature 1..39: note = Synthetic

SEQ ID NO: 10491 - DNA, 219 bp, unidentified
  misc_feature 1..219: note = Synthetic
  source 1..219: mol_type = other DNA
atgcagaactcgcgcgcgcacatgatcgccgactgcggcaaggccgtgggcgcgggctatgcagacccggaccccggcgtgcgcgacaacgcgtccgcgaacctgcccgccgtgccgcccttcctggtggcggcgctcgcggctggcgtcatcttctacttcgtggctgtctactcgaggcgatccgtggaaaccaagaccataaatgtttctagatag

SEQ ID NO: 10492 - DNA, 1530 bp, unidentified
  misc_feature 1..1530: note = Synthetic
  source 1..1530: mol_type = other DNA
atggcctacaggagaaggaggtggaggaaaccgaggagatcgagatggaggacctatagaagaaatagatactggagaagacctcatcggcgccactggaggaggaggagatatatcagaccaagaactgctacagtaagatattacccctcacggagaagaaagagaatctccgttcgaggttgggaacctttggggaatgtatgttcttctgatatagcttcatcagaagcaaccccatatacagatcttgatatgtatgacctttcacctttagaagatgatactagaaaatataaaggaaagtggcatgggacctggggccatcatttctttacactcaggtctctacttgtcagagctaaatattattttaactattggtcatcagattgggaaggttatgattatgttaaattcaaaggagggtatatctggataccaagaatgacttattttagctggattttctatctagacagcagtattcaatctaaccctagagaggatggtgagccagaagcaaaatacaaatatgagaaaagctggttacatccaggtattctattaaacagacctggctcaaaactgatgataagtagccttcaacaaccaaatagaccattttataggagaataaaagtaactcctccatcagcatgggagggaaattatagaatggacacggccatggactaccttttatttcactggggttggacagtttgtaatgtaacagcatcattttttgactttttctgtcaaagaaaaagatctgctactcataatgacacatgtccaacaactccatggtttatacatgattcatgttggaaacaaggtataactgctaatgaagtatgcaaagcgattaaagaagtgtatgacagaatcaataaaagacatctagacccgagatctgtctgggtcaacagaaaaatgtatataaaaagtgactgtgtaaatactccaaattctaacagtgttccaagtaactgtcacaattggggtccatttttacctcagaatgtaattttagaaacaagtacaggtaacagtctttatttcagatataaattattttttgaggtctctggagacagcctctatagaagacaacccagccaaccttgcaaagatggggtcattccaccagcaccaggagcagaatcagcttgcccagaaatatcgactcgctccatatacaagaaaaagaaaagaccccaatccatctatgatatcttacagggagacctcgactcagacggaatgctcacggaaagagcttatgagagaattactggagataatagatgtgaccagccaaccagaatgggggatgtcccccatagggtcccccccagaaagcgagtcagattcagactctctgatagaaaactccagcacaggaagcgggagctcatcagaattttattgggaagacgagaccaacccagggggggagggtccccccctagtccccccccagtagaggaacctcttgacctcttgttgaacttccctaaataa

SEQ ID NO: 10493 - DNA, 441 bp, unidentified
  misc_feature 1..441: note = Synthetic
  source 1..441: mol_type = other DNA
atagatatagacatcgttaaattgttaatgaaaggaatagataacactgcttattcatatatagacgatctaacatgttgcactcgagtaattatggctgattatctaaatagtgattatagatacaataaagatgtagatttagatttggtcaaattgtttttggaaaatggaaagccgcacggaataatgtgtagtattgtaccactatggagaaatgataaggaaaccatctttttgatattgaaaacaatgaactcggatgtcctccaacatatactaattgagtatatgacattcggcgatatccctctagtggaatatggaactgtggtaaataaagaggctatacacgaatactttagaaatattaatattgattcttacacgatgaaatatctactaaaaaaggaagggagatgccatcaattatctcgatga

SEQ ID NO: 10494 - DNA, 309 bp, unidentified
  source 1..309: mol_type = other DNA
  misc_feature 1..309: note = Synthetic
atggggaaggtcctaagaaagccgtttgcaaaggctgtgccactgctcttcctcgccgccacctggcttctgaccggggtgctgccggccggcgcttccagtcccacaaacgcggcggcggcttccctgactgaagcccaggaccagttctactcctacacatgtaatgcggacacattctcgccttctttgaccagctttgcctccatctgggcacttctgacgcttgtcttagtcattatagcctcagccatctacctgatgtacgtctgctttaacaagtttgtgaacacgctgctgacggattag

SEQ ID NO: 10495 - DNA, 309 bp, unidentified; identical to SEQ ID NO: 10494
  source 1..309: mol_type = other DNA
  misc_feature 1..309: note = Synthetic

SEQ ID NO: 10496 - DNA, 309 bp, unidentified; identical to SEQ ID NO: 10494
  misc_feature 1..309: note = Synthetic
  source 1..309: mol_type = other DNA

SEQ ID NO: 10497 - DNA, 114 bp, unidentified; identical to SEQ ID NO: 970
  misc_feature 1..114: note = Synthetic
  source 1..114: mol_type = other DNA

SEQ ID NO: 10498 - DNA, 3018 bp, unidentified
  misc_feature 1..3018: note = Synthetic
  source 1..3018: mol_type = other DNA
atcgacccaactcgcggaggcccgagaaacactgtgaggcaacccacgccgtcacagtcgccaactgtcccctcggagacaagagtatgcaggcttataccggcctgtttccaaaccccggggcgacccggcgtggttgccgtggacaccacatttccacccacctacttccagggccccaagcggggagaagtattcgcgggagagactgggtctatctggaaaacaaggcgcggacaggcacgcaatgctcctatgtcgcacctcatattccacgtatacgacatcgtggagaccacctacacggccgaccgctgcgaggacgtgccatttagcttccagactgatatcattcccagcggcaccgtcctcaagctgctcggcagaacactagatggcgccagtgtctgcgtgaacgttttcaggcagcgctgctacttctacacactagcaccccagggggtaaacctgacccacgtcctccagcaggccctccaggctggcttcggtcgcgcatcctgcggcttctccaccgagccggtcagaaaaaaaatcttgcgcgcgtacgacacacaacaatatgctgtgcaaaaaataaccctgtcatccagtccgatgatgcgaacgcttagcgaccgcctaacaacctgtgggtgcgaggtgtttgagtccaatgtggacgccattaggcgcttcgtgctggaccacgggttctcgacattcgggtggtacgagtgcagcaacccggccccccgcacccaggccagagactcttggacggaactggagtttgactgcagctgggaggacctaaagtttatcccggagaggacggagtggcccccatacacaatcctatcctttgatatagaatgtatgggcgagaagggttttcccaacgcgactcaagacgaggacatgattatacaaatctcgtgtgttttacacacagtcggcaacgataaaccgtacacccgcatgctactgggcctagggacatgcgacccccttcctggggtggaggtctttgagtttccttcggagtacgacatgctggccgccttcctcagcatgctccgcgattacaatgtggagtttataacggggtacaacatagcaaactttgaccttccatacatcatagcccgggcaactcaggtgtacgacttcaagctgcaggacttcaccaaaataaaaactgggtccgtgtttgaggtccaccaacccagaggcggttccgatgggggcaacttcatgaggtcccagtcaaaggtcaaaatatcggggatcgtccccatagacatgtaccaggtttgcagggaaaagctgagtctgtcagactacaagctggacacagtggctaagcaatgcctcggtcgacaaaaagatgacatctcatacaaggacatacccccgctttttaaatctggacctgatggtcgcgcaaaggtgggaaactactgtgttattgactcggtcctggttatggatcttctgctacggtttcagacccacgttgagatctcggaaatagccaagctggccaagatccccacccgtagggtactgacggacggccaacagatcagggtattttcctgcctcttggaggctgctgccacggaaggttacattctccccgtcccaaaaggagacgcggttagcgggtatcagggggccactgtaataagcccctctccgggattctatgacgaccccgtactcgtggtggattttgccagcttgtaccccagtatcatccaagcgcacaacttgtgctactccacactgatacccggcgattcgctccacctgcacccacacctctccccggacgactacgaaacctttgtcctcagcggaggtccggtccactttgtaaaaaaacacaaaagggagtcccttcttgccaagcttctgacggtatggctcgcgaagagaaaagaaataagaaagaccctggcatcatgcacggaccccgcactgaaaactattctagacaaacaacaactggccatcaaggttacctgcaacgccgtttacggcttcacgggcgttgcctctggcatactgccttgcctaaacatagcggagaccgtgacactacaagggcgaaagatgctggagagatctcaggcctttgtagaggccatctcgccggaacgcctagcgggtctcctgcggaggccagtagacgtctcacccgacgcccgattcaaggtcatatacggcgacactgactctcttttcatatgctgcatgggtttcaacatggacagcgtgtcagacttcgcggaggagctagcgtcaatcaccaccaacacgctgtttcgtagccccatcaagctggaggctgaaaagatcttcaagtgccttctgctcctgactaaaaagagatacgtgggggtactcagtgacgacaaggttctgatgaagggcgtagacctcattaggaaaacagcctgtcgttttgtccaggaaaagagcagtcaggtcctggacctcatactgcgggagccgagcgtcaaggccgcggccaagcttatttcggggcaggcgacagactgggtgtacagggaagggctcccagaggggttcgtcaagataattcaagtgctcaacgcgagccaccgggaactgtgcgaacgcagcgtaccagtagacaaactgacgtttaccaccgagctaagccgcccgctggcggactacaagacgcaaaacctcccgcacctgaccgtgtaccaaaagctacaagctagacaggaggagcttccccagatacacgacagaatcccctacgtgttcgtcgacgccccaggtagcctgcgctccgagctggcagagcaccccgagtacgtcaagcagcacggactgcgcgtggcggtggacctgtacttcgacaagctggtacacgcggtagccaacatcatccaatgcctcttccagaacaacacgtcggcaaccgtagctatcttgtataactttttagacattcccgtgacttttcccacgccctag

SEQ ID NO: 10499 - DNA, 3018 bp, unidentified
  misc_feature 1..3018: note = Synthetic
  source 1..3018: mol_type = other DNA
atcgacccaactcgcggaggcccgagaaacactgtgaggcaacccacgccgtcacagtcgccaactgtcccctcggagacaagagtatgcaggcttataccggcctgtttccaaaccccggggcgacccggcgtggttgccgtggacaccacatttccacccacctacttccagggccccaagcggggagaagtattcgcgggagagactgggtctatctggaaaacaaggcgcggacaggcacgcaatgctcctatgtcgcacctcatattccacgtatacgacatcgtggagaccacctacacggccgaccgctgcgaggacgtgccatttagcttccagactgatatcattcccagcggcaccgtcctcaagctgctcggcagaacactagatggcgccagtgtctgcgtgaacgttttcaggcagcgctgctacttctacacactagcaccccagggggtaaacctgacccacgtcctccagcaggccctccaggctggcttcggtcgcgcatcctgcggcttctccaccgagccggtcagaaaaaaaatcttgcgcgcgtacgacacacaacaatatgctgtgcaaaaaataaccctgtcatccagtccgatgatgcgaacgcttagcgaccgcctaacaacctgtgggtgcgaggtgtttgagtccaatgtggacgccattaggcgcttcgtgctggaccacgggttttcgacattcgggtggtacgagtgcagcaatccggccccccgcacccaggccagagactcttggacggaactggagtttgactgcagctgggaggacctaaagtttatcccggagaggacggagtggcccccatacacaatcctatcctttgatatagaatgtatgggcgagaagggttttcccaacgcgactcaagacgaggacatgattatacaaatctcgtgtgttttacacacagtcggcaacgataaaccgtacacccgcatgctactgggcctggggacatgcgacccccttcctggggtggaggtctttgagtttccttcggagtacgacatgctggccgccttcctcagcatgctccgcgattacaatgtggagtttataacggggtacaacatagcaaactttgaccttccatacatcatagcccgggcaactcaggtgtacgacttcaagctgcaggacttcaccaaaataaaaactgggtccgtgtttgaggtccaccaacccagaggcggttccgatgggggcaacttcatgaggtcccagtcaaaggtcaaaatatcggggatcgtccccatagacatgtaccaggtttgcagggaaaagctgagtctgtcagactacaagctggacacagtggctaagcaatgcctcggtcgacaaaaagatgacatctcatacaaggacatacccccgctttttaaatctgggcctgatggtcgcgcaaaggtgggaaactactgtgttattgactcggtcctggttatggatcttctgctacggtttcagacccatgttgagatctcggaaatagccaagctggccaagatccccacccgtagggtactgacggacggccaacagatcagggtattttcctgcctcttggaggctgctgccacggaaggttacattctccccgtcccaaaaggagacgcggttagcgggtatcagggggccactgtaataagcccctctccgggattctatgacgaccccgtactcgtggtggattttgccagcttgtaccccagtatcatccaagcgcacaacttgtgctactccacactgatacccggcgattcgctccacctgcacccacacctctccccggacgactacgaaacctttgtcctcagcggaggtccggtccactttgtaaaaaaacacaaaagggagtcccttcttgccaagcttctgacggtatggctcgcgaagagaaaagaaataagaaagaccctggcatcatgcacggaccccgcactgaaaactattctagacaaacaacaactggccatcaaggttacctgcaacgccgtttacggcttcacgggcgttgcctctggcatactgccttgcctaaacatagcggagaccgtgacactacaagggcgaaagatgctggagagatctcaggcctttgtagaggccatctcgccggaacgcctagcgggtctcctgcggaggccagtagacgtctcacccgacgcccgattcaaggtcatatacggcgacactgactctcttttcatatgctgcatgggtttcaacatggacagcgtgtcagacttcgcggaggagctagcgtcaatcaccaccaacacgctgtttcgtagccccatcaagctggaggctgaaaagatcttcaagtgccttctgctcctgactaaaaagagatacgtgggggtactcagtgacgacaaggttctgatgaagggcgtagacctcattaggaaaacagcctgtcgttttgtccaggaaaagagcagtcaggtcctggacctcatactgcgggagccgagcgtcaaggccgcggccaagcttatttcggggcaggcgacagactgggtgtacagggaagggctcccagaggggttcgtcaagataattcaagtgctcaacgcgagccaccgggaactgtgcgaacgcagcgtaccagtagacaaactgacgtttaccaccgagctaagccgcccgctggcggactacaagacgcaaaacctcccgcacctgaccgtgtaccaaaagctacaagctagacaggaggagcttccacagatacacgacagaatcccctacgtgttcgtcgacgccccaggtagcctgcgctccgagctggcagagcaccccgagtacgtcaagcagcacggactgcgcgtggcggtggacctgtacttcgacaagctggtacacgcggtagccaacatcatccaatgcctcttccagaacaacacgtcggcaaccgtagctatgttgtataactttttagacattcccgtgacttttcccacgccctag

SEQ ID NO: 10500 - DNA, 111 bp, unidentified; identical to SEQ ID NO: 974
  misc_feature 1..111: note = Synthetic
  source 1..111: mol_type = other DNA

SEQ ID NO: 10501 - DNA, 1551 bp, unidentified
  misc_feature 1..1551: note = Synthetic
  source 1..1551: mol_type = other DNA
atggagaagttggtcagtgactttacaacgtttataaacgctaactggacaaagcctttgaataataggtcatgtatacctagaagaactagaaaagttgtaagagatttgttacgcgaatacataaagcaagcgccgcctatacagggagataacccaagcggccttccagtaaatctatttctaaagagttatgtggacagaaatccagtttacaaaagtatatttgaaaataacatatggttactcgaaagtgctcaaaacataagaacttttgacaacataacaacggtaggaagatttttgttaatggttgtttacagaataatgtcaggaagtattggcgagggaaacactatcgtggataactactctcagcagactagtaaacaggttttaaacacacagatggattatttttgctataatttcatgtggcatatagcttctgtagcaaattattataaaaataagtctcttgtaataggattgccaatgtactggtggagagatgagcaagagcaacggttcgtactagaacagttaaaaaatgattttccagacattagcatgcccgatgctagaggagctatagattttgtacaatacatgacagatgtgtatgacaaaaattacgaagcacaaccgcgagtaaacatttcgtttgataagttcaatactaattttgtagtatcggttccggaattcattatggatggtttgtgttatacgtcgtgggataaaataacaaaatatggaactgcgttcaatgtggatatttttttaacactcaacagatacagaggagttaattttaaaacagtggagcatcacaaagaaggagttgttgatggaataactaaagacagtgacaatgtcgactgtagtgcattgcgtttggtttatcttccaggatttggaaggcgtgtttttagtcctcaactgtctagacaagttcctagatccatggaagatacgtacagtaagcaacacgatgtcaataataaaacaccgattatatttacaagaaatcatgaaaacagtggctattacttggactatcaacattacagtacgatagaaaacgtaggaaataacgagcgagagcgaagggacagacttacgtacaacggatgcataaatcacaggtttttgggagacatagacaatgacaaaagcacgtacagaagaatgcttagagacaggtttatgggttatttggacactaaacaggaagttcctcccaaagttggggaaactggtaacgatacacctcagtgcatggatattgacaaacttaacgacttaattaagccgttagaagatttggcaaagtccaacacttgttgcgtttcaaagattacaggtaatggagaaacaacagtagtaggatcgacaacatctagtactccagtagttagagaagtggaccgttggtggggaagacaccataacacgtcttggctcacacgcccgttatctagacatcacccttacaggtatcctttagatggtacgtggtggagaggaaggagcggtgctatctggtaa

SEQ ID NO: 10502 - DNA, 435 bp, unidentified
  source 1..435: mol_type = other DNA
  misc_feature 1..435: note = Synthetic
atgacgcttgtttcttttattttgcagactaattcaaaactaacaatgttggagcgcagcgcggtaacctattgtatttgcatcccaacggttttgaatgtttctttggaaaatttttcttttattcaatttttacaagaaactctgcctgattatatttccagcaactttgatgatattactggtggttcccagtatgcttattctaatcttgtttttgctggagccaattggggaggtctgcgcttgtactgcactgtagcgtcccctgctattgttcccggggggcttctggctaagcagtttggtgataatatgagagagtatctacaactagaacttagagaagaacttagagccaagggcatgtcaattgatgatgccattcttaatttgctacaggtgacacaggagcaagatattttgtcattatga

SEQ ID NO: 10503 - DNA, 2196 bp, unidentified
  source 1..2196: mol_type = other DNA
  misc_feature 1..2196: note = Synthetic
atgaaggttatccaaggaatatataatggagtaacaacggtagaattggacactctggcagccgaaatagcagccacttgtactacacaacatccagattatgccattttagccgccagaatagccgtatcaaatctacacaaggaaacaaaaaaactatttagtgaagtgatggaggatttattcaactatgttaatcctaaaaatgggaaacattctccgattatttcaagtatcaccatggatgtagttaacaaatataaggataaactcaactcggttattatttacgaacgagacttttcatacaactattttggttttaaaactttggaaaaatcttacttgttgaaaataaataacaagatcgttgaaagacctcagcacatgttaatgcgtgtcgcggtaggaattcatcaatgggatatagaatcagctattgagacgtacaatctactgtctgaaaaatggtttacgcacgcttctcctaccttatttaatgcgggaactagtcgtcaccaaatgtctagctgttttctacttaacatgattgatgatagcatagagggcatctatgatacgttaaaacgatgcgcattaatctctaaaatggcagggggaataggtctatcaattagtaatattcgtgccagtggaagctatatctccgggaccaatggtacatccaatggtattattccaatgttgagagtttataataacaccgctagatacatagatcagggaggaaacaaacgaccgggagttatggccatatacttggaaccgtggcattctgatattatggcgttcctcgatcttaaaaagaatacaggaaacgaggagcatagaaccagagatctatttatagctctttggattcctgatctctttatgaaacgagtaaaggatgatggagagtggtcgttgatgtgtcctgacgaatgtcctggattagacgatgtttggggagacgagttcgaacgattatatacacaatacgaaagagaaaagagatacaagtctataataaaggctcgagtcgtctggaaagcgattatagaatctcagattgaaactggtactccgttcattctttataaggatgcgtgtaacaaaaagagtaatcaacaaaatttaggaaccattaagtgtagtaacctctgcactgaaataatacaatatgcggatgctaatgaggtagccgtttgtaatctggcatctgtcgcgttgaacatgtttgtaatagatggacgatttgattttctcaaactaaaggatgtggtcaaagtaatagtcaggaatctcaataaaattatagatattaattattatcctattccagaagctgaaatttctaataagagacatagacctatcggtattggtgttcaaggattagcagacgcgtttattctcttaaattatccatttgatagcctagaagcacaagatctcaataagaagattttcgaaaccatttattacggagcattagaggcgagttgtgaattagccgaaaaggaaggaccttatgaaacatacacaggatcatacgctagtaacggtattctacaatatgatctttggaatgttgtcccgtctgatctttgggattgggaatctctaaaagataaaatcagatcatacggtcttagaaatagtttattggtggcacctatgccaacggcatcaactgctcaaattttgggaaataatgaatcggtggaaccatataccagtaatatttacactcggagagtattgtctggagaatttcaagtagttaatccgcatctccttagagttttaaccgagagaaaattatggaatgaagagatcaagaataggattatggcagatggtggatccattcagaatacaaaccttccagaagatattaagcgagtttataaaactatttgggaaattccacaaaagacgatcataaaaatggctgcagacaggggagccttcatcgatcaaagtcaatctatgaatatccatatagcagatccgagttattccaaactaacgagtatgcatttctacggatggagtctcggtctaaaaacgggaatgtactatctacgtacgaaacccgcatccgctcccattcaattcacattggacaaggataagataaagccaccagtggtttgcgattccgaaatctgtacatcatgcagcggttaa

SEQ ID NO: 10504 - DNA, 39 bp, unidentified; identical to SEQ ID NO: 984
  misc_feature 1..39: note = Synthetic
  source 1..39: mol_type = other DNA

SEQ ID NO: 10505 - DNA, 54 bp, unidentified; identical to SEQ ID NO: 989
  source 1..54: mol_type = other DNA
  misc_feature 1..54: note = Synthetic

SEQ ID NO: 10506 - DNA, 324 bp, unidentified
  source 1..324: mol_type = other DNA
  misc_feature 1..324: note = Synthetic
atcacgcttacccctgttcaggataacactgaaaacatgggtctacgctacagcaaagaggtgagagagagacacggagacaaagatctggaagggagagtccccatgacactcaatctcccacagggtttatatggacgcttcaactgtaagtcttgctggtttgcaaacagaggtctcatagcctgctcagatcactatctgtgcctgaattgcttgactagactcaggtctcagtctcaattctgtggaatctgcggcaagcctctgccaacaaaaatcagatttgaggagagcccatctgctccaccatacgaaccctaa

SEQ ID NO: 10507 - DNA, 15 bp, unidentified
  source 1..15: mol_type = other DNA
  misc_feature 1..15: note = Synthetic
atggagaagatttga

SEQ ID NO: 10508 - DNA, 108 bp, unidentified
  misc_feature 1..108: note = Synthetic
  source 1..108: mol_type = other DNA
atggtttacaaggagcatttgtcgataaagacggtacttatgacaaagtttacattcttttcactgttactatcggctcaaagagaattgttaaaattccgtatatag

SEQ ID NO: 10509 - DNA, 96 bp, unidentified
  source 1..96: mol_type = other DNA
  misc_feature 1..96: note = Synthetic
atgaggatgataatgataatattgtcttctcaccgtttgggtattcgttttctatgtttatgtcgctattgtctgcatcaggtaatactagagtag

SEQ ID NO: 10510 - DNA, 1122 bp, unidentified
  source 1..1122: mol_type = other DNA
  misc_feature 1..1122: note = Synthetic
atgattgtgttattgatactatcgttagcgtgtacagcgttcacctatcgcctgcaaggatttaccaatgccggtatagtagcgtataaaaatattcaagatgggaatgaggatgataatattgtcttctcgccgtttggctattcgttttctatgtttatgtcactattgcctgcatcaggtaatactaaagtagaattattgaagactatggatttgagaaaaatagatctgggtccagcatttacagaattaatatcaggattagctaagccaaaaacatctaaatatacgtacactgatctaacttatcaaagtttcgtagataatactgtgtgtattaaaccgtcgtattatcaacaatatcatagattcggcctatatagattaaactttagacgagatgcggttaataaaattaattccatagtagaacgtagatcaggtatgtctaatgtagtagattctactatgctcgacaataatactctatgggcaatcattaatactatatattttaaaggtacgtggcaatatccatttgatatcactaaaacacacaatactagttttactaataagtacggcacgaaaacggttcccatgatgagcgtagttactaaattacaaggaaatacaatcacaatcgatgacgaagaatatgatatggtgcgccttcagtataaggatgctaatattagtatgtatctggcaataggtgataatatgacccatttcacagattctatcatggctgcaaaattagactattggtcgtctcaattagggaataaagtgtacaatcttaaactccctagattttctatcgaaaataagagggatattaagtcgatagccgaaatgatggctcctagtatgtttaatccagataatgcgtcgtttaaacatatgactagggacccattatatatttataaaatgtttcagaatgcaaagatagatgtcaacgaacaaggaactgtagcggaggcatctactatcatggtagctacggtgagatcatctcctgaagaactggaatttaatacaccatttgtgttcatcattagacatgatattactggatttatattgtttatgggtaaggtagaatctccttaa

SEQ ID NO: 10511 - DNA, 174 bp, unidentified
  source 1..174: mol_type = other DNA
  misc_feature 1..174: note = Synthetic
ctggctgcgagaggctacccgaccgtagcggttagcttttcttacgaattgctgggatcgttgcggttgtcgcctttggtggtccgcaaccgcagccagaccgcagtggtggccacggtggtgtctcagacgtcgtgcgtcaaacatgacgtgctgaacttttccttggtataa

SEQ ID NO: 10512 - DNA, 120 bp, unidentified; identical to SEQ ID NO: 1023
  source 1..120: mol_type = other DNA
  misc_feature 1..120: note = Synthetic

SEQ ID NO: 10513 - DNA, 33 bp, unidentified; identical to SEQ ID NO: 1024
  misc_feature 1..33: note = Synthetic
  source 1..33: mol_type = other DNA

SEQ ID NO: 10514 - DNA, 36 bp, unidentified; identical to SEQ ID NO: 1026
  source 1..36: mol_type = other DNA
  misc_feature 1..36: note = Synthetic

SEQ ID NO: 10515 - DNA, 270 bp, unidentified
  source 1..270: mol_type = other DNA
  misc_feature 1..270: note = Synthetic
atgctgatctacggacctcgtctagaagtcaacgacctcatcgacaggatgatggacgacgttcaagtaaacggagacctaatgccctcacccgatcctatccccgaagaggtggcgcagtgctccccggaagacatgtcaatcatgctagaccaattcctcgaaaatattcaactcaagtccgagctccagttgctgacctccgaagaaatggacgaactcctaaccgaactcgaagaactcgcccgcctgctaaaagactttccctga

SEQ ID NO: 10516 - DNA, 1659 bp, unidentified
  source 1..1659: mol_type = other DNA
  misc_feature 1..1659: note = Synthetic
atgtatgagatattattatctgttaaaatgaaatttaatatcttaggagcaaagattctccttcttggatctgggtttgggataaccaaaatgtcccgacttggacctgcgttggatgagtttcgctcctttaagaataatccccctaggagaggtgcactcacaacagcaatccaagggatcaagaagaatgttattgtcttggttcctaccatgaaacaaccagcaaagagattccaatttatgacattaatacttcagattgcttggtctgccaaatcctctgctgcatttatcactggtgcttttttctcactgctctcgatgtttgctgacaatcctggagctatgttaaggaaccttgtcaatgaccctgacattgatgtgcagattgccgaagtgtcagacgtcaatgattcaaggataacacttgccacaagaggtcgcggtatggagcgttatgaggaagagatagtgcagatggtggaaacaccaccgaaaggaagggacaaggcgtatccatatgcagagagtgattatgtcaaaataattcctcgctctacggaggaccttcagattgctattcagaccgtgactgcgcaactttggatcctactgacaaaggcagtaactgccattgacacagcacgtgactctgagaacaggcgctggattaagtacgaacagcagagaagagcagatgctgattacaggttggatgagggttggctgaattttgccagagtgaggattgcagctgatcttgctgtgagaaggtatatggttgagattctcattgacgcaaacagagccccttccccgaaagcaagagtccttgagctgatttgcgatatcgggaactatataagtgaagcagggttggccggtttccacttgacaatcaagtatgggattgagactcgttatcctgccttggcattgaatgagttgcaagctgatctagggactatcctggctctgatgaaatgttatgttgaactaggagagagagcaccctttatggttattcttgaagattcagttcagaccaagttttctccgggttcgtacccgttgctctggagctacgccatgggggttgggtcaatgctagatcgagctgtcaacaacctgaactatgcaagaaattaccttgagcagcctttttataaccttggtgttgggatggtagaaaagatggaggggtcggttaacaggcatgtggctgaagaacttggactgacaggtgagcaaattgcccagatcaaagacctggtaaagcaggaggcggaccactctggtgctgttccaaaacatacatccagaactggagtcggcagcgccaaattcaatcctgcgagcgtagatgaacttatccctagtgatgaggacaaccaagacgatgatgatgctacaacgtcctatgggaaaccatacagaccccagattgagcttgcagagaaaccagacagtgtgccaatcaatgaacaccttgctcgaaagtatgcagacgcggacacagatgccatgagagggcaagtagctgggatcctgaggaaagaaaggaagaaaaagaaacacagcaaggaaaatgcacctggtgtggtgctccccgactcgcagagcacaggtggggacctatctgtcatagactcataa

SEQ ID NO: 10517 - DNA, 1620 bp, unidentified
  misc_feature 1..1620: note = Synthetic
  source 1..1620: mol_type = other DNA
atcctattatcagggacaagagcaggattagggatatccgagatggccacacttttgaggagcttagcattgttcaaaagaaacaaggacaaaccacccattacatcaggatccggtggagccatcagaggaatcaaacacattattatagtaccaattcctggagattcctcaattaccactcgatccagactactggaccggttggtcaggttaattggaaacccggatgtgagcgggcccaaactaacaggggcactaataggtatattatccttatttgtggagtctccaggtcaattgattcagaggatcaccgatgaccctgacgttagcatcaggctgttagaggttgttcagagtgaccagtcacaatctggccttaccttcgcatcaagaggtaccaacatggaggatgaggcggaccaatacttttcacatgatgatccaagcagtagtgatcaatccaggtccggatggttcgagaacaaggaaatctcagatattgaagtgcaagaccctgagggattcaacatgattctgggtaccattctagcccagatctgggtcttgctcgcaaaggcggttacggccccagacacggcagctgattcggagctaagaaggtggataaagtacacccaacaaagaagggtagttggtgaatttagattggagagaaaatggttggatgtggtgaggaacaggattgccgaggacctctctttacgccgattcatggtggctctaatcctggatatcaagaggacacccgggaacaaacctaggattgctgaaatgatatgtgacattgatacatatatcgtagaggcaggattagccagttttatcctgactattaagtttgggatagaaactatgtatcctgctcttggactgcatgaatttgctggtgagttatccacacttgagtccttgatgaatctttaccagcaaatgggagaaactgcaccctacatggtaatcctagagaactcaattcagaacaagttcagtgcaggatcataccctctgctctggagctatgccatgggagtaggagtggaacttgaaaactccatgggaggtttgaactttggtcgatcttactttgatccagcatattttagattagggcaagagatggtgaggaggtcagctggaaaggtcagttccacattggcatccgaactcggtatcactgccgaggatgcaaggcttgtttcagagattgcaatgcatactactgaggacaggatcagtagagcggtcggacccagacaagcccaagtgtcatttctacacggtgatcaaagtgagaatgagctaccaggattggggggcaaggaagataggagggtcaaacagggtcggggagaagccagggagagctacagagaaaccgggtccagcagagcaagtgatgcgagagctgcccatcctccaaccagcatgcccctagacattgacactgcatcggagtcaggccaagatccgcaggacagtcgaaggtcagctgacgccctgctcaggctgcaagccatggcaggaatcttggaagaacaaggctcagacacggacacccctagggtatacaatgacagagatcttctagactag

SEQ ID NO: 10518 - DNA, 18 bp, unidentified
  source 1..18: mol_type = other DNA
  misc_feature 1..18: note = Synthetic
atggactggcaaacttag

SEQ ID NO: 10519 - DNA, 1620 bp, unidentified
  source 1..1620: mol_type = other DNA
  misc_feature 1..1620: note = Synthetic
atcctactgtcggggggaggaggaggagcaagatctttgactatggcgactcttcttaaaagcttagcattgttcaagaggaacaaagacaaagcgccgacggcatcaggttcaggaggggccatccgggggattaagaatgttatcatagtcccgattcccggagactcgtccatcattacccgttcaagactgctcgacaggcttgtcagattggccggagatcctgacatcaacgggtcaaagttaaccggcgtgatgatcagcatgttatctttgttcgtagagtcacccgggcaattgatacagcgaatcacagatgatccagatgttagtatccgccttgttgaggtagttcaaagtactaggtctcagtccgggttgacctttgcatcacgtggtgctgatttagacaacgaggcagacatgtatttttcaactgaggggccctcgagtggaggtaagaaaaggatcaactggtttgagaacagagaaataatagacatagaagtgcaggatccagaagagttcaatatgttgttagcctccatactagcacaagtctggatccttctggccaaggctgttacggcaccggatacggcagctgactcagaattgagaaggtgggttaaatatacacaacaaaggagagtgattggggaatttcgccttgacaaagggtggctggacgcagtccgcaacagaattgcagaagatctatcacttcggcggttcatggtatctctcatacttgacatcaagaggacccccggcaacaagccaaggattgcagaaatgatctgcgacattgacaactatattgtcgaagccggactcgccagtttcatccttactatcaagtttggtatcgaaaccatgtatcctgcattagggctccacgagtttgccggggaattgtccactattgaatccttgatgaacttgtatcaacagctaggagaggttgcaccctacatggtaattctcgagaactcaattcagaacaagtttagtgcaggagcttatcccctcctctggagctatgcgatgggtgtcggagttgggctggagaactcaatggggggcttgaactttggcaggtcatattttgaccctgcctattttcgtctcggacaggagatggtcagaagatctgcaggaaaggtcagctctgtgattgcggccgagctcggcatcacagcagaggaagccaaactagtctcggaaatcgcctcgcaggctggggacgaaagaaccgctagagggactgggcctcgacaggcgcaggtctccttcctccagcacaaaacaggagagggagagtcgtccgcaccagcaaccagagagggggtcaaagctgcgatcccaaacggatccgaagaaagggacaggaagcaaacacgctcaggaaggcccagaggagagacccccagccaactgctcctggaaatcatgccagaggatgaggtctcgcgagagtctggtcaaaaccctcgtgaggctcaaagatcggccgaggcactcttcaggctgcaggccatggccaagattctggaggaccaggaggagggagaagacaacagtcaggtctacaacgacaaggatctcctcggctaa

SEQ ID NO: 10520 - DNA, 15 bp, unidentified
  source 1..15: mol_type = other DNA
  misc_feature 1..15: note = Synthetic
ctggagcaggcttaa

SEQ ID NO: 10521 - DNA, 1557 bp, unidentified
  misc_feature 1..1557: note = Synthetic
  source 1..1557: mol_type = other DNA
atttcaaaaatgttgagcctatttgatacatttaatgcacgtaggcaagaaaacataacaaaatcagctggtggagctatcattcctggacagaaaaatactgtctctatatttgcccttggaccgacaataactgatgataatgagaaaatgacattagctcttctatttctatctcattcactagataatgagaagcaacatgcacaaagagcagggttcttagtgtctttattgtcaatggcttatgccaatccagagctctacctaacaacaaatggaagtaatgcagatgtcaagtatgtcatatacatgattgagaaagatctaaaacggcaaaagtatggaggatttgtggttaagacgagagagatgatatatgaaaagacaactgattggatatttggaagtgacctggattatgaccaggaaactatgttgcagaacggcagaaacaattcaacaattgaagaccttgtccacacatttgggtatccatcatgtttaggagctcttataatacagatctggatagttttggtcaaagctatcactagtatctcagggttaagaaaaggtttttttacccgattggaagctttcagacaagatggaacagtgcaagcagggctggtattgagcggtgacacagtagatcagattgggtcaatcatgcggtctcaacagagcttggtaactcttatggttgagacattaataacaatgaatactagcagaaatgacctcacaaccatagaaaagaatatacagattgttggtaactacataagagatgcaggtctcgcttcattcttcaatacaatcagatatggaattgagactagaatggcagctttgactctatccactctcagaccagatatcaatagattaaaagctctgatggaactgtatttatcaaagggaccacgcgctcctttcatctgtatcctcagagatcctatacatggtgagttcgcaccaggcaactatcctgccatatggagctatgcaatgggggtggcagttgtacaaaatagagccatgcaacagtatgtgacaggaagatcatatctagatattgatatgttccagctaggacaagcagtagcacgtgatgctgaagctcagatgagctcaacactggaagatgaacttggagtgacacacgaagccaaagaaagcttgaaaagacatataaggaacataaacagttcagagacatctttccacaaaccaacaggtggatcagccatagagatggcaatagatgaagagccagaacaattcgaacatagagcagatcaagaacaagatggagaacctcaatcatctataatccaatatgcttgggcagaaggaaacagaagcgatgatcggactgagcaagctacagaatctgacaatatcaagactgaacaacaaaacatcagagacagactaaacaagagactcaacgacaagaagaaacaaggcagtcaaccacccaccaattccacaaacagaacggaccaggacgaaatagatgatctgtttaatgcatttggaagtaactaa

SEQ ID NO: 10522 - DNA, 1593 bp, unidentified
  source 1..1593: mol_type = other DNA
  misc_feature 1..1593: note = Synthetic
ttgctgccaaagtacacgatggctgggttgttgagcaccttcgacacgtttagctctaggaggagtgagagtattaataagtcaggaggaggtgctgttatccccggccagaggagcacagtctcagtgttcgtactaggcccaagtgttactgatgatgcagacaagttatccattgcaaccaccttcttagctcactcattagacacagataagcagcactctcagagaggagggttcctagtctccctacttgccatggcttacagtagtccagaattatacttgacaacaaatggagtaaatgccgatgttaagtacgtgatctacaacatagagaaggaccctaagaggacgaagacggatggatttattgtgaagacaagggacatggaatatgagaggaccacagagtggctgttcggacctatggtcaacaagagtccgcttttccaggggcaacgagatgctgcagaccctgatacgctccttcaaatctatgggtatccggcatgcctaggggcaattattgtccaggtctggattgtgctggtgaaggcaatcacgagtagtgccggcctaaggaaaggatttttcaatagattagaggctttcagacaagatggcactgtgaaaggtgccttagttttcactggagagacagttgaggggataggctcggtcatgcgatcccagcaaagcttggtatctctcatggttgagacccttgtgactatgaacactgcgaggtccgatctcactacactagagaagaacatccagatcgttgggaactacatccgagatgcaggactagcctctttcatgaataccatcaaatatggggtagagacaaagatggcggccttaacgctgtcaaacctgaggcccgacatcaacaagctgagaagcctcatagacacctacctgtcaaaaggccccagggctccttttatttgtatcctaaaggaccctgtccatggtgagtttgcaccaggcaactatccagcactctggagctatgcaatgggagtcgccgttgtacagaataaggcgatgcagcagtacgtcacagggagaacataccttgatatggagatgttcttactaggacaagctgtagcaaaggatgctgagtccaagatcagcagtgctctggaggacgagctaggagtgacagatacggctaaggagaggctcagacatcatttggcaaatctgtccggtggggatggcgcgtaccacaagccaacaggcggcggtgcaatcgaggtagctctagacaatgccgatatagacctggagcctgaagctcacacagatcaggacgccagaggttggggtggggatagcggtgacagatgggctcgctcgatgggtagtggccactttatcacactacatggggcagaacggttggaggaggagaccaatgatgaagatgtctccgacatagagagaagaatagctaggaggcttgcagagagacggcaagaggacgctacaacccacgaagacgaaggccgtaataacggtgttgatcatgacgaagaggatgatgccgcggcagcagctgggatgggaggaatctaa

SEQ ID NO: 10523 - DNA, 1548 bp, unidentified; identical to SEQ ID NO: 10183
  misc_feature 1..1548: note = Synthetic
  source 1..1548: mol_type = other DNA

SEQ ID NO: 10524 - DNA, 1557 bp, unidentified
  source 1..1557: mol_type = other DNA
  misc_feature 1..1557: note = Synthetic
atttcaaaaatgttgagcctatttgatacatttaatgcacgtaggcaagaaaacataacaaaatcagccggtggagctatcattcctggacagaaaaatactgtctctatatttgctcttggaccgacaataactgatgataatgagaaaatgacattagctcttctttttttatctcattcactggataatgagaaacaacatgcacaaagggcagggttcctggtgtccttattatcaatggcttatgccaatccagagctctacctaacaacaaatggaagtaatgcagatgtcaagtatgtcatatacatgatcgagaaagatctaaaacggcaaaagtatggaggatttgtggttaagacgagagagatggtatatgacaagacaactgattggatatttggaagtgacctggattgtgatcaggaaactatgttgcagaacggaagaaacaattcaacaattgaagaccttgtccacacatttgggtatccatcatgtttaggagctcttataatacagatctggatagttctggtcaaagctatcactagtatctcagggttaagaaaaggctttttcacccgattggaagctttcagacaagatggaacagtgcaggcagggctggtattgagcggtgacacagtggatcagattgggtcaattatgcggtctcaacagagcttggtaactcttatggttgaaacattaataacaatgaatactagcagaaatgacctcacaaccatagaaaagaatatacaaattgttggtaactatataagagatgcaggtctcgcttcattcttcaatacaatcagatatggaattgagactagaatggcagctttgactctatccactctcagaccagacatcaatagattaaaagctttgatggaactgtatttatcaaagggaccacgcgctcctttcatctgtatcctcagagatcccatacatggtgagttcgcaccaggcaactatcctgccatatggagctatgcaatgggagtggcagttgtacaaaatagagccatgcaacagtatgtgacgggaagatcatatctggatattgatatgttccagctaggacaagcagtagcacgtgatgctgaagctcagatgagctcaacactagaagatgaacttggagtgacacacgaagctaaagaaagcttgaagagacatataaggaacataaatagttcagagacatctttccacaaaccaacaggtggatcagccatagagatggcaatagatgaagagccagaacaattcgaacatagatcagatcaagaacgagatggagaacctcaatcatctataattcaatatgcttgggcagaaggaaacagaagcgatgatcggactgagcaagatacagaatctgacaatatcaagactgaacaacaaaacatcagagacagactaaacaagagactcaacgaaaagaagaaacaaggcagtcaaccacctaccaatcccacaaacagaacgaatcaggacgaaatagatgatctgtttaatgcatttggaagcaactaa

SEQ ID NO: 10525 - DNA, 1545 bp, unidentified
  source 1..1545: mol_type = other DNA
  misc_feature 1..1545: note = Synthetic
ctgagttcatttgatacattcagtgcacggagacaggagaatataacgaaatcagctggaggagcgataatccctgggcagaagagcactgtatctatatttgtgcttggtccatcaataacagatgataatgacaagatggcaatagctttgctctttctatcccattcattggataatgaaaagcaacatgcacagcgtgctggatttttggtgtcattactatcaatggcttatgccaatccagaactatacttaacagcaaatggcagtaacgcagatgttagatacgtgatatacatgatagaaaaagatccaggaagacaaaaatatggaggattaattgttaaaaccagagaaatggtatatgaaaagactactgactggatctttgggagtgatcttgaatatgatcaagataatatgttgcagaatagccgaggttcggcaagcattgaagatcttgtgcatacctttggttatcaggcatgtttgggggctctcattgtacaggtttggatagtgcttgtcaaagctatcacaagtatatcaggattacgaaagggattcttcacaaggttggaggcttttagacaagatggaactgttaaatccagcttagtcttgagtggagaagcggtagaacagatcggatcaatcatgagatctcagcagaatctagtgacactcatggtggagacattgataacgatgaacacaggcagaaatgatttgacaacaattgaaaagaatatacaaattgttgggaactatattagagatgctggtcttgcttccttctttaacactatcagatatggaattgaaaccagaatggcagctctaactttatccagtcttagaccagatataaacagattaaaggcactaatggaactgtatctatctaaagggccacgtgcaccatttatatgcatcttaagagacccagtacatggtgagttcgcaccaggtaattatcctgcattatggagctatgctatgggtgtagcagttgtacagaacaaagccatgcagcagtatgtgacagggagatcctacttagacattgagatgtttcagttaggacaagctgtagcacgtgatgctgaatcacagatgagttcaattttagaagatgaattaggtgtaacacaagaagctaaacagaacctcaagatgcacatccagaggataagtaactctgatatagctttccaaaagccgacaggaggttcagcgatagaaatggctattgacgaagaagtagatcaggtcaattccaacaataaccaagatcaaagcaatgaggtaccatcatctctcgtctcttatgcatggccgagtgggccagatagcaggaatcgagaggagtcaacagcacaaccagataacatcaaaaatgagcaagagaacatcagagaaagacttaacaggagattgagagaaaagagggagaagagtgaatccaagcccactgaggaaccacaggaagaaaaccgaacagaaatagacgacttgttcagtgcatttggtgacaactaa

SEQ ID NO: 10526 - DNA, 1584 bp, unidentified
  source 1..1584: mol_type = other DNA
  misc_feature 1..1584: note = Synthetic
atttttataatggccgggctactaagtacttttgacacatttagttccaggagaagtgagagcatcaataagtctggcggaggagcaattatacctggtcaaagaagtaccgtttctgtcttcacattaggcccgagtgtgacagatgatgcagataaattattaatagcaaccactttcttagcccactcattggacacagataaacaacactctcaaagaggaggatttttagtatcactccttgcaatggcctacagtagtccggagttatatctcactacaaacggtgtcaatgctgatgtcaagtatgtgatatacaatatagagagagatcctaaaagaacaaaaacagatgggttcattgtcaaaacaagagacatggagtatgaaagaacaacagagtggttgtttggacctatgatcaacaagaacccattgttccaagggcaaagagagaatgcggatctagaggcattgcttcagacatatggatatcctgcatgtctcggagctataatagttcaagtttggatagtgttggttaaagccataacaagtagtgctggtctaagaaaaggattcttcaatagattagaagcattcagacaggatggaaccgttaaaagtgccctggtcttcacaggagacacagttgaaggtattggtgcagtgatgaggtcacaacaaagcttagtatctcttatggtagaaactctggtgactatgaacacatccaggtcagatttaactacattagagaagaacattcagattgtaggaaattacataagagatgcaggattagcatctttcatgaacaccatcaagtatggtgtagaaacgaagatggccgccctgacactatcaaatctgagaccagatataaacaaattgagaagccttgttgatatctatctatcaaagggagcccgagccccttttatatgtatactcagagacccagttcatggagactttgcccctggaaactatccagcactgtggagctacgcaatgggcgttgctgtggtacaaaacaaagctatgcaacagtatgtaactggaagaacatatttggacatggaaatgttcctacttggacaagctgtagctaaagatgctgattccaaaatcagcagtgctctggaggaagaactaggtgtgacagatacagcaaaagagagactaagacaccatctgacaaacctttcaggaggggatggtgcgtaccacaagcctacaggtggtggagctatagaagtggcaattgatcatacagacataacatttggagtcgaggacactgctgatcgggacaacaagaactggacaaatgacagcaatgaaagatggatgaatcactcgatcagcaaccacacaatcacgattcgtggtgcagaagaacttgaagaagagacaaatgatgaagacatcactgatatagaaaacaagattgcacgaaggctggccgacagaaaacagagactaagccaggcaaacaataaacgagacaccagcagtgatgctgactatgagaatgatgatgatgctacagcggctgcagggataggaggaatttaa

SEQ ID NO: 10527 - DNA, 39 bp, unidentified; identical to SEQ ID NO: 1051
  source 1..39: mol_type = other DNA
  misc_feature 1..39: note = Synthetic

SEQ ID NO: 10528 - DNA, 51 bp, unidentified; identical to SEQ ID NO: 1052
  source 1..51: mol_type = other DNA
  misc_feature 1..51: note = Synthetic

SEQ ID NO: 10529 - DNA, 24 bp, unidentified
  source 1..24: mol_type = other DNA
  misc_feature 1..24: note = Synthetic
atgcaagaccaacgggaactttaa

SEQ ID NO: 10530 - DNA, 27 bp, unidentified
  misc_feature 1..27: note = Synthetic
  source 1..27: mol_type = other DNA
ctggaggttttgaataggtcgctatag

(The sequence listing continues in the following parts.)

1. A polynucleotide comprising one or more viral polynucleotides selected from SEQ ID NOS: 1-9890 or SEQ ID NOS: 9891-16277.

2. A vector comprising:
a synthetic library expression construct comprising:
a short synthetic polynucleotide;
a pair of constant primers flanking the short synthetic polynucleotide, the pair of constant primers comprising a forward constant primer and a reverse constant primer, wherein the forward constant primer and the reverse constant primer are each independently coupled to a 5′ end or a 3′ end of the short synthetic polynucleotide;
a stop codon polynucleotide comprising one or more stop codons, wherein the stop codon polynucleotide is coupled to a constant primer coupled to the 3′ end of the short synthetic polynucleotide such that the constant primer coupled to the 3′ end of the short synthetic polynucleotide is between the stop codon polynucleotide and the short synthetic polynucleotide;
a poly A signal, wherein the poly A signal is operably coupled to the short synthetic polynucleotide, the pair of constant primers, and the stop codon polynucleotide; and
a promoter, wherein the promoter is operably coupled to the short synthetic polynucleotide, the pair of constant primers, and the stop codon polynucleotide, and the poly A signal.

3. The vector of claim 2, wherein the short synthetic polynucleotide is about 200 nucleotides, optionally having a sequence corresponding to a region of a human genome, a non-human animal genome, a plant genome, a microbial genome, or a viral genome, optionally an annotated or unannotated region, a mutation, a 5′UTR, a 3′UTR, an open reading frame, or any combination thereof; and wherein the short synthetic polynucleotide optionally is a sequence in SEQ ID NOS: 1-9890 or SEQ ID NOS: 9891-16277, is a synthetic in silico designed sequence, does not have 100% identity to a genome sequence, is not native to any genome, or any combination thereof.

4. (canceled)

5. (canceled)

6. (canceled)

7. (canceled)

8. (canceled)

9. (canceled)

10. (canceled)

11. (canceled)

12. The vector of claim 2, further comprising an additional regulatory element, a reporter gene, an origin of replication, a cloning sites, an internal ribosome entry sites, a transcription termination sequence, an inverted terminal repeat, a long terminal repeats, a trans-activating response elements, a central polypurine tract, a Psi element, a Rev response element, a packaging protein gene, a polymerase gene, an envelope protein gene, a capsid protein gene, a Rep protein gene, a U3 element, a repeat element (R), a unique 5′ element (U5), an untranslated region stabilization element, or any combination thereof; and/or wherein the vector comprises two or more synthetic library expression constructs, optionally wherein at least two constructs comprise a different short synthetic polynucleotide, optionally wherein each construct comprises a different short synthetic polynucleotide.

13. The vector of claim 2, further comprising a Woodchuck hepatitis virus post-transcriptional regulatory element (WPRE), wherein the WPRE is operably coupled to the short synthetic polynucleotide and the pair of constant primers.

14. (canceled)

15. The vector of claim 2, wherein the vector is a eukaryotic expression vector or a viral expression vector.

16. The vector of claim 2, wherein the promoter is a constitutive promoter, an inducible promoter or a conditional promoter.

17. (canceled)

18. A vector library comprising a plurality of vectors, wherein each vector of the plurality of vectors is as in claim 2, and wherein at least two vectors comprise different short synthetic polynucleotides, optionally wherein each vector comprises a different short synthetic polynucleotide, optionally wherein at least two of the vectors of the plurality of vectors comprise the same short synthetic polynucleotides.

19. (canceled)

20. (canceled)

21. (canceled)

22. (canceled)

23. (canceled)

24. A high through put method of determining translated sequences, the method comprising:
expressing a vector as in claim 2 in one or more cells under conditions sufficient to produce translation products;
obtaining a sample of ribosomes comprising ribosome-protected mRNA fragments (RPFs) from the cells;
recovering ribosome footprints consisting essentially of the RPFs from the sample of ribosomes; and
determining a sequence of the RPFs thereby identifying translated sequences; and optionally further comprising expressing the one or more vectors or vector library in a second plurality of cells under a stress condition, obtaining a sample of ribosomes comprising ribosome-protected mRNA fragments (RPFs) from the second plurality of cells, recovering ribosome footprints from the sample, determining a sequence of the RPFs, and comparing the translated sequences of the first and second plurality of cells to identify translationally regulated sequences.

25. The method of claim 24, wherein determining the sequence of the RPFs comprises nucleotide sequencing, optionally RNA sequencing or DNA sequencing of cDNA generated from the RPFs, optionally by next generation sequencing or third generation sequencing.

26. (canceled)

27. (canceled)

28. The method of claim 24, further comprising digesting unprotected mRNA prior to recovering ribosome footprints and/or removing rRNA from the sample containing ribosomes.

29. (canceled)

30. (canceled)

31. (canceled)

32. (canceled)

33. (canceled)

34. (canceled)

35. (canceled)

36. A delivery vehicle comprising:
the polynucleotide of claim 1, a vector comprising the polynucleotide, a polypeptide encoded by the polynucleotide or vector, or any combination thereof.

37. (canceled)

38. (canceled)

39. An immunogenic composition comprising:
the polynucleotide of claim 1, a vector comprising the polynucleotide, a polypeptide encoded by the polynucleotide or vector, a delivery vehicle comprising the polynucleotide, polypeptide, and/or vector, a cell of claim comprising the polynucleotide, vector, polypeptide, and/or delivery vehicle, or any combination thereof.

40. (canceled)

41. (canceled)

42. A therapeutic composition comprising:
the immunogenic composition of claim 39; and
an anti-viral therapeutic.

43. The immunogenic composition of claim 39 or a therapeutic composition comprising the immunogenic composition and an antiviral therapeutic, wherein the one or more polynucleotides is a synthetic mRNA vaccine.

44. A formulation comprising:
the polynucleotide of claim 1, a vector comprising the polynucleotide, a polypeptide encoded by the polynucleotide or vector, a delivery vehicle comprising the polynucleotide, the vector, the polypeptide or any combination thereof, a cell comprising the polynucleotide, a polypeptide encoded by the polynucleotide or vector, the delivery vehicle or any combination thereof, an immunogenic composition comprising the polynucleotide, the vector, the polypeptide, the delivery vehicle, the cell or any combination thereof, and/or a therapeutic composition comprising the immunogenic composition and an anti-viral therapeutic, or any combination thereof and
a pharmaceutically acceptable carrier.

45. (canceled)

46. (canceled)

47. (canceled)

48. (canceled)

49. A method of massively parallel antigen profiling comprising:
delivering to and expressing in a plurality of cells a pan-genomic library or a polynucleotide as in claim 1, wherein the pan-genomic library comprises a plurality of synthetic library expression constructs, each comprising a short synthetic polynucleotide and a pair of constant primers flanking the short synthetic polynucleotide, wherein the short synthetic polynucleotide has a sequence corresponding to a region of a genome;-and-, optionally wherein delivering comprises infecting the plurality of cells with viral particles comprising the pan-genomic library or the polynucleotide; and
determining the antigens presented by the cells, optionally by protein sequencing, mass spectrometry, Raman spectroscopy, immunodetection, chromatography, centrifugation, isoelectric focusing, or isolation of MHC complexes, optionally wherein isolating MHC complexes comprises detecting peptides loaded in the MHC complex, wherein the MHC is optionally an HLA; and optionally further comprising evaluating an immune response to the antigens presented.

50. (canceled)

51. (canceled)

52. (canceled)

53. (canceled)

54. A method of determining translational regulation comprising:
determining a first set of translated sequences by a method comprising:
expressing a pan-genomic library in a first plurality of cells, wherein the pan-genomic library comprises a plurality of synthetic library expression constructs, each comprising a short synthetic polynucleotide and a pair of constant primers flanking the short synthetic polynucleotide, wherein the short synthetic polynucleotide has a sequence corresponding to a region of a genome;
obtaining a sample of ribosomes comprising ribosome-protected mRNA fragments (RPFs) from the first plurality of cells;
recovering ribosome footprints consisting essentially of the RPFs from the sample of ribosomes; and
determining the sequence of the RPFs thereby identifying translated sequences to form the first set of translated sequences;
determining a second set of translated sequences by a method comprising:
expressing the pan-genomic library in a second plurality of cells;
applying a stress to the second plurality of cells;
obtaining a sample of ribosomes comprising ribosome-protected mRNA fragments (RPFs) from the second plurality of cells;
recovering ribosome footprints consisting essentially of the RPFs from the sample of ribosomes; and
determining the sequence of the RPFs thereby identifying translated sequences to form the second set of translated sequences,
whereby similarities and differences in the sequences of the first and the second set of translated sequences indicates sequences that are translationally regulated or regulate translation.

55. The method of claim 54, wherein the short synthetic polynucleotide is about 200 nucleotides, optionally having a sequence corresponding to a region of a human genome, a non-human animal genome, a plant genome, a microbial genome, or a viral genome, optionally an annotated or unannotated region, a mutation, a 5′UTR, a 3′UTR, an open reading frame, or any combination thereof; and/or wherein the short synthetic polynucleotide optionally is a synthetic in silico designed sequence, does not have 100% identity to a genome sequence, or is not native to any genome; and/or wherein the stress is a small molecule agent, a biologic agent, a physical stress, a chemical stress, or any combination thereof.

56. (canceled)

57. (canceled)

58. (canceled)

59. (canceled)

60. (canceled)

61. (canceled)

62. A vector comprising:
an optically active reporter construct comprising:
a test polynucleotide;
a first optically active protein encoding polynucleotide, wherein the first optically active protein encoding polynucleotide is operatively coupled in-frame with the test polynucleotide;
a second optically active protein encoding polynucleotide, wherein the second optically active protein is a different optically active protein that the first optically active protein;
a promoter, wherein the test polynucleotide, the first optically active protein encoding polynucleotide, and the second optically active protein encoding polynucleotide are operatively coupled to the promoter; and
an internal ribosomal entry site (IRES), wherein the IRES is between the first optically active protein encoding polynucleotide and the second optically active protein encoding polynucleotide.

63. The vector of claim 62, further comprising one or more additional regulatory elements, one or more additional reporters, viral replication elements and/or encoding polynucleotides, viral packaging elements and/or encoding polynucleotides, viral envelope protein encoding polynucleotides, long-terminal repeats, viral poly or any combination thereof; optionally further comprising one or more untranslated regions (UTRs) operatively coupled at a 5′ and/or 3′ end of the test polynucleotide and/or the first optically active protein encoding polynucleotide, optionally comprising 5′ UTRs, 3′ UTRs, or both: wherein the promoter is optionally a constitutive promoter or an inducible promoter; and/or wherein the vector is a viral vector, optionally a retroviral vector, lentiviral vector, adenoviral vector, or adeno-associated viral vector.

64. (canceled)

65. (canceled)

66. (canceled)

67. The vector of claim 62, wherein the test polynucleotide comprises or consists of a short synthetic polynucleotide, optionally about 200 nucleotides, optionally having a sequence corresponding to a region of a human genome, a non-human animal genome, a plant genome, a microbial genome, or a viral genome, optionally an annotated or unannotated region, a mutation, a 5′UTR, a 3′UTR, an open reading frame, or any combination thereof; and/or wherein the short synthetic polynucleotide optionally is a sequence in SEQ ID NOS: 1-9890 or SEQ ID NOS: 9891-16277, is a synthetic in silico designed sequence, does not have 100% identity to a genome sequence, or is not native to any genome.

68. (canceled)

69. (canceled)

70. (canceled)

71. (canceled)

72. (canceled)

73. (canceled)

74. (canceled)

75. (canceled)

76. (canceled)

77. (canceled)

78. (canceled)

79. (canceled)

80. (canceled)

81. (canceled)

82. (canceled)

83. (canceled)

84. (canceled)

85. (canceled)

86. (canceled)

87. (canceled)

88. (canceled)

89. A method comprising:
a. transducing one or more cells with one or more viral particles or a pan-viral engineered viral particle library comprising the optically active reporter construct of claim 62 and allowing for genomic integration and expression of the optically active reporter construct in the one or more cells;
b. selecting cells for genomic integration of the optically active reporter construct via sorting by detecting an optical signal produced from the first optically active protein and selecting cells that produce the optical signal from the second optically active protein;
c. sorting selected cells from (b) into expression bins, wherein sorting selected cells from (b) comprises detecting an optical signal produced by the first optically active protein;
d. sequencing one or more nucleic acids of the sorted selected cells by expression bin; and
e. computing an expression score for each test polynucleotide by expression bin, optionally wherein sequencing comprises DNA sequencing, RNA sequencing, or both, optionally comprising next generation sequencing, third generation sequencing, deep sequencing, or single cell sequencing.

90. (canceled)

91. (canceled)

92. (canceled)

93. (canceled)

94. (canceled)

95. A method of screening test agents and/or conditions comprising:
a. transducing a first set of one or more cells with one or more viral particles or a pan-viral engineered viral particle library comprising the optically active reporter construct of claim 62 and allowing for genomic integration and expression of the optically active reporter construct in the one or more cells;
b. transducing a second set of the one or more cells with the one or more viral particles or a pan-viral engineered viral particle library comprising the optically active reporter construct of claim 62 and allowing for genomic integration and expression of the optically active reporter construct in the one or more cells, wherein the second set of one or more cells comprises the same one or more cells as the first set of one or more cells, and wherein the one or more viral particles or the pan-viral engineered viral particle library used to transduce the second set of one or more cells is the same as the one or more viral particles or the pan-viral engineered viral particle library used to transduce the first set of one or more cells;
c. exposing the second set of one or more cells to one or more test agents and/or conditions;
d. selecting cells in each of the first set of one or more cells and second set of one or more cells for genomic integration of the optically active reporter construct via sorting by detecting an optical signal produced from the first optically active protein and selecting cells that produce the optical signal from the second optically active protein;
e. sorting selected cells from (d) into expression bins, wherein sorting selected cells from (d) comprises detecting an optical signal produced by the first optically active protein;
f. sequencing one or more nucleic acids of the sorted selected cells by expression bin; and;
g. computing an expression score for each test polynucleotide by expression bin;
h. comparing expression scores for each test polynucleotide between the first and second set of cells to determine an effect of the test agent and/or condition: wherein the test agent or condition optionally comprises a small molecule agent, a biologic agent, a physical condition, or a chemical condition, and wherein sequencing optionally comprises DNA sequencing, RNA sequencing, or both, optionally comprising next generation sequencing, third generation sequencing, deep sequencing, or single cell sequencing.

96. (canceled)

97. (canceled)

98. (canceled)

99. (canceled)

100. (canceled)

101. (canceled)
